United States Patent Application Publication US 2022/0211838 A1 - sequence listing, part 6

SEQ ID NO: 8285 - protein, 1307 aa, Artificial Sequence
  SARS-CoV-2/2019-nCoV/USA-CruiseA-18/2020__MT159716.1 spike protein (1-1147)(I909C_Y1047C) LumSynth construct
MFVFLVLLPLVSSQCVNLTTRTQLPPAYTNSFTRGVYYPDKVFRSSVLHSTQDLFLPFFSNVTWFHAIHVSGTNGTKRFDNPVLPFNDGVYFASTEKSNIIRGWIFGTTLDSKTQSLLIVNNATNVVIKVCEFQFCNDPFLGVYYHKNNKSWMESELRVYSSANNCTFEYVSQPFLMDLEGKQGNFKNLREFVFKNIDGYFKIYSKHTPINLVRDLPQGFSALEPLVDLPIGINITRFQTLLALHRSYLTPGDSSSGWTAGAAAYYVGYLQPRTFLLKYNENGTITDAVDCALDPLSETKCTLKSFTVEKGIYQTSNFRVQPTESIVRFPNITNLCPFGEVFNATRFASVYAWNRKRISNCVADYSVLYNSASFSTFKCYGVSPTKLNDLCFTNVYADSFVIRGDEVRQIAPGQTGKIADYNYKLPDDFTGCVIAWNSNNLDSKVGGNYNYLYRLFRKSNLKPFERDISTEIYQAGSTPCNGVEGFNCYFPLQSYGFQPTNGVGYQPYRVVVLSFELLHAPATVCGPKKSTNLVKNKCVNFNFNGLTGTGVLTESNKKFLPFQQFGRDIADTTDAVRDPQTLEILDITPCSFGGVSVITPGTNTSNQVAVLYQDVNCTEVPVAIHADQLTPTWRVYSTGSNVFQTRAGCLIGAEHVNNSYECDIPIGAGICASYQTQTNSPRRARSVASQSIIAYTMSLGAENSVAYSNNSIAIPTNFTISVTTEILPVSMTKTSVDCTMYICGDSTECSNLLLQYGSFCTQLNRALTGIAVEQDKNTQEVFAQVKQIYKTPPIKDFGGFNFSQILPDPSKPSKRSFIEDLLFNKVTLADAGFIKQYGDCLGDIAARDLICAQKFNGLTVLPPLLTDEMIAQYTSALLAGTITSGWTFGAGAALQIPFAMQMAYRFNGCGVTQNVLYENQKLIANQFNSAIGKIQDSLSSTASALGKLQDVVNQNAQALNTLVKQLSSNFGAISSVLNDILSRLDKVEAEVQIDRLITGRLQSLQTYVTQQLIRAAEIRASANLAATKMSECVLGQSKRVDFCGKGCHLMSFPQSAPHGVVFLHVTYVPAQEKNFTTAPAICHDGKAHFPREGVFVSNGTHWFVTQRNFYEPQIITTDNTFVSGNCDVVIGIVNNTVYDPLQPELDSGGGSGGGQIYEGKLTAEGLRFGIVASRFNHALVDRLVEGAIDAIVRHGGREEDITLVRVPGSWEIPVAAGELARKEDIDAVIAIGVLIRGATPHFDYIASEVSKGLADLSLELRKPITFGVITADTLEQAIERAGTKHGNKGWEAALSAIEMANLFKSLR

SEQ ID NO: 8286 - protein, 1307 aa, Artificial Sequence
  SARS-CoV-2/SARS-CoV-2/Yunnan-01/human/2020/CHN__MT049951.1 spike protein (1-1147)(I909C_Y1047C) LumSynth construct
MFVFLVLLPLVSSQCVNLTTRTQLPPANTNSFTRGVYYPDKVFRSSVLHSTQDLFLPFFSNVTWFHAIHVSGTNGTKRFDNPVLPFNDGVYFASTEKSNIIRGWIFGTTLDSKTQSLLIVNNATNVVIKVCEFQFCNDPFLGVYYHKNNKSWMESEFRVYSSANNCTFEYVSQPFLMDLEGKQGNFKNLREFVFKNIDGYFKIYSKHTPINLVRDLPQGFSALEPLVDLPIGINITRFQTLLALHRSYLTPGDSSSGWTAGAAAYYVGYLQPRTFLLKYNENGTITDAVDCALDPLSETKCTLKSFTVEKGIYQTSNFRVQPTESIVRFPNITNLCPFGEVFNATRFASVYAWNRKRISNCVADYSVLYNSASFSTFKCYGVSPTKLNDLCFTNVYADSFVIRGDEVRQIAPGQTGKIADYNYKLPDDFTGCVIAWNSNNLDSKVGGNYNYLYRLFRKSNLKPFERDISTEIYQAGSTPCNGVEGFNCYFPLQSYGFQPTNGVGYQPYRVVVLSFELLHAPATVCGPKKSTNLVKNKCVNFNFNGLTGTGVLTESNKKFLPFQQFGRDIADTTDAVRDPQTLEILDITPCSFGGVSVITPGTNTSNQVAVLYQDVNCTEVPVAIHADQLTPTWRVYSTGSNVFQTRAGCLIGAEHVNNSYECDIPIGAGICASYQTQTNSPRRARSVASQSIIAYTMSLGAENSVAYSNNSIAIPTNFTISVTTEILPVSMTKTSVDCTMYICGDSTECSNLLLQYGSFCTQLNRALTGIAVEQDKNTQEVFAQVKQIYKTPPIKDFGGFNFSQILPDPSKPSKRSFIEDLLFNKVTLADAGFIKQYGDCLGDIAARDLICAQKFNGLTVLPPLLTDEMIAQYTSALLAGTITSGWTFGAGAALQIPFAMQMAYRFNGCGVTQNVLYENQKLIANQFNSAIGKIQDSLSSTASALGKLQDVVNQNAQALNTLVKQLSSNFGAISSVLNDILSRLDKVEAEVQIDRLITGRLQSLQTYVTQQLIRAAEIRASANLAATKMSECVLGQSKRVDFCGKGCHLMSFPQSAPHGVVFLHVTYVPAQEKNFTTAPAICHDGKAHFPREGVFVSNGTHWFVTQRNFYEPQIITTDNTFVSGNCDVVIGIVNNTVYDPLQPELDSGGGSGGGQIYEGKLTAEGLRFGIVASRFNHALVDRLVEGAIDAIVRHGGREEDITLVRVPGSWEIPVAAGELARKEDIDAVIAIGVLIRGATPHFDYIASEVSKGLADLSLELRKPITFGVITADTLEQAIERAGTKHGNKGWEAALSAIEMANLFKSLR

SEQ ID NO: 8287 - protein, 1307 aa, Artificial Sequence
  SARS-CoV-2/USA/WA-UW292/2020__EPI_ISL_418077 spike protein (1-1147)(I909C_Y1047C) LumSynth construct
MFVFLVLLPLVSSQCVNLTTRTQLPPAYTNSFTRGVYYPDKVFRSSVLHSTQDLFLPFFSNVTWFHAIHVSGTNGTKRFDNPVLPFNDGVYFASTEKSNIIRGWIFGTTLDSKTQSLLIVNNATNVVIKVCEFQFCNDPFLGVYYHKNNKSWMESEFRVYSSANNCTFEYVSQPFLMDLEGKQGNFKNLREFVFKNIDGYFKIYSKHTPINLVRDLPQGFSALEPLVDLPIGINITRFQTLLALHRSYLTPGDSSSGWTAGAAAYYVGYLQPRTFLLKYNENGTITDAVDCALDPLSETKCTLKSFTVEKGIYQTSNFRVQPTESIVRFPNITNLCPFGEVFNATRFASVYAWNRKRISNCVADYSVLYNSASFSTFKCYGVSPTKLNDLCFTNVYADSFVIRGDEVRQIAPGQTGKIADYNYKLPDDFTGCVIAWNSNNLDSKVGGNYNYLYRLFRKSNLKPFERDISTEIYQASSTPCNGVEGFNCYFPLQSYGFQPTNGVGYQPYRVVVLSFELLHAPATVCGPKKSTNLVKNKCVNFNFNGLTGTGVLTESNKKFLPFQQFGRDIADTTDAVRDPQTLEILDITPCSFGGVSVITPGTNTSNQVAVLYQDVNCTEVPVAIHADQLTPTWRVYSTGSNVFQTRAGCLIGAEHVNNSYECDIPIGAGICASYQTQTNSPRRARSVASQSIIAYTMSLGAENSVAYSNNSIAIPTNFTISVTTEILPVSMTKTSVDCTMYICGDSTECSNLLLQYGSFCTQLNRALTGIAVEQDKNTQEVFAQVKQIYKTPPIKDFGGFNFSQILPDPSKPSKRSFIEDLLFNKVTLADAGFIKQYGDCLGDIAARDLICAQKFNGLTVLPPLLTDEMIAQYTSALLAGTITSGWTFGAGAALQIPFAMQMAYRFNGCGVTQNVLYENQKLIANQFNSAIGKIQDSLSSTASALGKLQDVVNQNAQALNTLVKQLSSNFGAISSVLNDILSRLDKVEAEVQIDRLITGRLQSLQTYVTQQLIRAAEIRASANLAATKMSECVLGQSKRVDFCGKGCHLMSFPQSAPHGVVFLHVTYVPAQEKNFTTAPAICHDGKAHFPREGVFVSNGTHWFVTQRNFYEPQIITTDNTFVSGNCDVVIGIVNNTVYDPLQPELDSGGGSGGGQIYEGKLTAEGLRFGIVASRFNHALVDRLVEGAIDAIVRHGGREEDITLVRVPGSWEIPVAAGELARKEDIDAVIAIGVLIRGATPHFDYIASEVSKGLADLSLELRKPITFGVITADTLEQAIERAGTKHGNKGWEAALSAIEMANLFKSLR

SEQ ID NO: 8288 - protein, 1307 aa, Artificial Sequence
  SARS-CoV-2/Iceland/192/2020__EPI_ISL_417819 spike protein (1-1147)(I909C_Y1047C) LumSynth construct
MFVFFVLLPLVSSQCVNLTTRTQLPPAYTNSFTRGVYYPDKVFRSSVLHSTQDLFLPFFSNVTWFHAIHVSGTNGTKRFDNPVLPFNDGVYFASTEKSNIIRGWIFGTTLDSKTQSLLIVNNATNVVIKVCEFQFCNDPFLGVYYHKNNKSWMESEFRVYSSANNCTFEYVSQPFLMDLEGKQGNFKNLREFVFKNIDGYFKIYSKHTPINLVRDLPQGFSALEPLVDLPIGINITRFQTLLALHRSYLTPGDSSSGWTAGAAAYYVGYLQPRTFLLKYNENGTITDAVDCALDPLSETKCTLKSFTVEKGIYQTSNFRVQPTESIVRFPNITNLCPFGEVFNATRFASVYAWNRKRISNCVADYSVLYNSASFSTFKCYGVSPTKLNDLCFTNVYADSFVIRGDEVRQIAPGQTGKIADYNYKLPDDFTGCVIAWNSNNLDSKVGGNYNYLYRLFRKSNLKPFERDISTEIYQAGSTPCNGVEGFNCYFPLQSYGFQPTNGVGYQPYRVVVLSFELLHAPATVCGPKKSTNLVKNKCVNFNFNGLTGTGVLTESNKKFLPFQQFGRDIADTTDAVRDPQTLEILDITPCSFGGVSVITPGTNTSNQVAVLYQGVNCTEVPVAIHADQLTPTWRVYSTGSNVFQTRAGCLIGAEHVNNSYECDIPIGAGICASYQTQTNSPRRARSVASQSIIAYTMSLGAENSVAYSNNSIAIPTNFTISVTTEILPVSMTKTSVDCTMYICGDSTECSNLLLQYGSFCTQLNRALTGIAVEQDKNTQEVFAQVKQIYKTPPIKDFGGFNFSQILPDPSKPSKRSFIEDLLFNKVTLADAGFIKQYGDCLGDIAARDLICAQKFNGLTVLPPLLTDEMIAQYTSALLAGTITSGWTFGAGAALQIPFAMQMAYRFNGCGVTQNVLYENQKLIANQFNSAIGKIQDSLSSTASALGKLQDVVNQNAQALNTLVKQLSSNFGAISSVLNDILSRLDKVEAEVQIDRLITGRLQSLQTYVTQQLIRAAEIRASANLAATKMSECVLGQSKRVDFCGKGCHLMSFPQSAPHGVVFLHVTYVPAQEKNFTTAPAICHDGKAHFPREGVFVSNGTHWFVTQRNFYEPQIITTDNTFVSGNCDVVIGIVNNTVYDPLQPELDSGGGSGGGQIYEGKLTAEGLRFGIVASRFNHALVDRLVEGAIDAIVRHGGREEDITLVRVPGSWEIPVAAGELARKEDIDAVIAIGVLIRGATPHFDYIASEVSKGLADLSLELRKPITFGVITADTLEQAIERAGTKHGNKGWEAALSAIEMANLFKSLR

SEQ ID NO: 8289 - protein, 1307 aa, Artificial Sequence
  SARS-CoV-2/Belgium/ULG-6939/2020__EPI_ISL_417020 spike protein (1-1147)(I909C_Y1047C) LumSynth construct
MFVFLVLLPLVSSQCVNLTTRTQLPPAYTNSFTRGVYYPDKVFRSSVLHSTQDLFLPFFSNVTWFHAIHVSGTNGTKRFDNPVLPFNDGVYFASTEKSNIIRGWIFGTTLDSKTQSLLIVNNATNVVIKVCEFQFCNDPFLGVYYHKNNKSWMESEFRVYSSANNCTFEYVSQPFLMDLEGKQGNFKNLREFVFKNIDGYFKIYSKHTPINLVRDLPQGFSALEPLVDLPIGINITRFQTLLALHRSYLTPGDSSSGWTAGAAAYYVGYLQPRTFLLKYNENGTITDAVDCALDPLSETKCTLKSFTVEKGIYQTSNFRVQPTESIVRFPNITNLCPFGEVFNATRFASVYAWNRKRISNCVADYSVLYNSASFSTFKCYGVSPTKLNDLCFTNVYADSFVIRGDEVRQIAPGQTGKIADYNYKLPDDFTGCVIAWNSNNLDSKVGGNYNYLYRLFRKSNLKPFERDISTEIYQAGSTPCNGVEGFNCYFPLQSYGFQPTNGVGYQPYRVVVLSFELLHAPATVCGPKKSTNLVKNKCVNFNFNGLTGTGVLTESNKKFLPFQQFGRDIADTTDAVRDPQTLEILDITPCSFGGVSVITPGTNTSNQVAVLYQGVNCTEVPVAIHADQLTPTWRVYSTGSNVFQTRAGCLIGAEHVNNSYECDIPIGAGICASYQTQTNSPRRARSVASQSIIAYTMSLGAENSVVYSNNSIAIPTNFTISVTTEILPVSMTKTSVDCTMYICGDSTECSNLLLQYGSFCTQLNRALTGIAVEQDKNTQEVFAQVKQIYKTPPIKDFGGFNFSQILPDPSKPSKRSFIEDLLFNKVTLADAGFIKQYGDCLGDIAARDLICAQKFNGLTVLPPLLTDEMIAQYTSALLAGTITSGWTFGAGAALQIPFAMQMAYRFNGCGVTQNVLYENQKLIANQFNSAIGKIQDSLSSTASALGKLQDVVNQNAQALNTLVKQLSSNFGAISSVLNDILSRLDKVEAEVQIDRLITGRLQSLQTYVTQQLIRAAEIRASANLAATKMSECVLGQSKRVDFCGKGCHLMSFPQSAPHGVVFLHVTYVPAQEKNFTTAPAICHDGKAHFPREGVFVSNGTHWFVTQRNFYEPQIITTDNTFVSGNCDVVIGIVNNTVYDPLQPELDSGGGSGGGQIYEGKLTAEGLRFGIVASRFNHALVDRLVEGAIDAIVRHGGREEDITLVRVPGSWEIPVAAGELARKEDIDAVIAIGVLIRGATPHFDYIASEVSKGLADLSLELRKPITFGVITADTLEQAIERAGTKHGNKGWEAALSAIEMANLFKSLR

SEQ ID NO: 8290 - protein, 1307 aa, Artificial Sequence
  SARS-CoV-2/France/HF2496/2020__EPI_ISL_418231 spike protein (1-1147)(I909C_Y1047C) LumSynth construct
MFVFLVLLPLVSSQCVNLTTRTQLPPAYTNSFTRGVYYPDKVFRSSVLHSTQDLFLPFFSNVTWFHAIHVSGTNGTKRFDNPVLPFNDGVYFASTEKSNIIRGWIFGTTLDSKTQSLLIVNNATNVVIKVCEFQFCNDPFLGVYYHKNNKSWMESEFRVYSSANNCTFEYVSQPFLMDLEGKQGNFKNLREFVFKNIDGYFKIYSKHTPINLVRDLPQGFSALEPLVDLPIGINITRFQTLLALHRSYLTPGDSSSGWTAGAAAYYVGYLQPRTFLLKYNENGTITDAVDCALDPLSETKCTLKSFTVEKGIYQTSNFRVQPTESIVRFPNITNLCPFGEVFNATRFASVYAWNRKRISNCVADYSVLYNSASFSTFKCYGVSPTKLNDLCFTNVYADSFVIRGDEVRQIAPGQTGKIADYNYKLPDDFTGCVIAWNSNNLDSKVGGNYNYLYRLFRKSNLKPFERDISTEIYQAGSTPCNGVEGFNCYFPLQSYGFQPTNGVGYQPYRVVVLSFELLHAPATVCGPKKSTNLVKNKCVNFNFNGLTGTGVLTESNKKFLPFQQFGRDIADTTDAVRDPQTLEILDITPCSFGGVSVITPGTNTSNQVAVLYQGVNCTEVPVAIHADQLTPTWRVYSTGSNVFQTRAGCLIGAEHVNNSYECDIPIGAGICASYQTQTNSPRRARSVASQSIIAYTMSLGAENSVAYSNNSIAIPTNFTISVTTEILPVSMTKTSVDCTMYICGDSTECSNLLLQYGSFCTQLNRALTGIAVEQDKNTQEVFAQVKQIYKTPPIKDFGGFNFSQILPDPSKPSKRSFIEDLLFNKVTLADAGFIKQYGDCLGDIVARDLICAQKFNGLTVLPPLLTDEMIAQYTSALLAGTITSGWTFGAGAALQIPFAMQMAYRFNGCGVTQNVLYENQKLIANQFNSAIGKIQDSLSSTASALGKLQDVVNQNAQALNTLVKQLSSNFGAISSVLNDILSRLDKVEAEVQIDRLITGRLQSLQTYVTQQLIRAAEIRASANLAATKMSECVLGQSKRVDFCGKGCHLMSFPQSAPHGVVFLHVTYVPAQEKNFTTAPAICHDGKAHFPREGVFVSNGTHWFVTQRNFYEPQIITTDNTFVSGNCDVVIGIVNNTVYDPLQPELDSGGGSGGGQIYEGKLTAEGLRFGIVASRFNHALVDRLVEGAIDAIVRHGGREEDITLVRVPGSWEIPVAAGELARKEDIDAVIAIGVLIRGATPHFDYIASEVSKGLADLSLELRKPITFGVITADTLEQAIERAGTKHGNKGWEAALSAIEMANLFKSLR

SEQ ID NO: 8291 - protein, 1307 aa, Artificial Sequence
  SARS-CoV-2/USA/WA-UW291/2020__EPI_ISL_418076 spike protein (1-1147)(I909C_Y1047C) LumSynth construct
MFVFLVLLPLVSSQCVNLTTRTQLPPAYTNSFTRGVYYPDKVFRSSVLHSTQDLFLPFFSNVTWFHAIHVSGTNGTKRFDNPVLPFNDGVYFASTEKSNIIRGWIFGTTLDSKTQSLLIVNNATNVVIKVCEFQFCNDPFLGVYYHKNNKSWMESEFRVYSSANNCTFEYVSQPFLMDLEGKQGNFKNLREFVFKNIDGYFKIYSKHTPINLVRDLPQGFSALEPLVDLPIGINITRFQTLLALHRSYLTPGDSSSGWTAGAAAYYVGYLQPRTFLLKYNENGTITDAVDCALDPLSETKCTLKSFTVEKGIYQTSNFRVQPTESIVRFPNITNLCPFGEVFNATRFASVYAWNRKRISNCVADYSVLYNSASFSTFKCYGVSPTKLNDLCFTNVYADSFVIRGDEVRQIAPGQTGKIADYNYKLPDDFTGCVIAWNSNNLDSKVGGNYNYLYRLFRKSNLKPFERDISTEIYQAGSTPCNGVEGFNCYFPLQSYGFQPTNGVGYQPYRVVVLSFELLHAPATVCGPKKSTNLVKNKCVNFNFNGLTGTGVLTESNKKFLPFQQFGRDIADTTDAVRDPQTLEILDITPCSFGGVSVITPGTNTSNQVAVLYQGVNCTEVPVAIHADQLTPTWRVYSTGSNVFQTRAGCLIGAEHVNNSYECDIPIGAGICASYQTQTNSPRRARSVASQSIIAYTMSLGAENSVAYSNNSIAIPTNFTISVTTEILPVSMTKTSVDCTMYICGDSTECSNLLLQYGSFCTQLNRALTGIAVEQDKNTQEVFAQVKQIYKTPPIKDFGGFNFSQILPDPSKPSKRSFIEDLLFNKVTLADAGFIKQYGDCLGDIAARDLICAQKFNGLTVLPPLLTDEMIAQYTSALLAGTITSGWTFGAGAALQIPFAMQMAYRFNGCGVTQNVLYENQKLIANQFNSAIGKIQYSLSSTASALGKLQDVVNQNAQALNTLVKQLSSNFGAISSVLNDILSRLDKVEAEVQIDRLITGRLQSLQTYVTQQLIRAAEIRASANLAATKMSECVLGQSKRVDFCGKGCHLMSFPQSAPHGVVFLHVTYVPAQEKNFTTAPAICHDGKAHFPREGVFVSNGTHWFVTQRNFYEPQIITTDNTFVSGNCDVVIGIVNNTVYDPLQPELDSGGGSGGGQIYEGKLTAEGLRFGIVASRFNHALVDRLVEGAIDAIVRHGGREEDITLVRVPGSWEIPVAAGELARKEDIDAVIAIGVLIRGATPHFDYIASEVSKGLADLSLELRKPITFGVITADTLEQAIERAGTKHGNKGWEAALSAIEMANLFKSLR

SEQ ID NO: 8292 - protein, 1307 aa, Artificial Sequence; identical to SEQ ID NO: 8255
  SARS-CoV-2/Portugal/PT0034/2020__EPI_ISL_418019 spike protein (1-1147)(I909C_Y1047C) LumSynth construct

SEQ ID NO: 8293 - protein, 1307 aa, Artificial Sequence; identical to SEQ ID NO: 8247
  SARS-CoV-2/Iceland/202/2020__EPI_ISL_417750 spike protein (1-1147)(I909C_Y1047C) LumSynth construct

SEQ ID NO: 8294 - protein, 1307 aa, Artificial Sequence
  SARS-CoV-2/USA/WA-UW261/2020__EPI_ISL_418046 spike protein (1-1147)(I909C_Y1047C) LumSynth construct
MFVFLVLLPLVSSQCVNLTTRTQLPPAYTNSFTRGVYYPDKVFRSSVLHSTQDLFLPFFSNVTWFHAIHVSGTNGTKRFDNPVLPFNDGVYFASTEKSNIIRGWIFGTTLDSKTQSLLIVNNATNVVIKVCEFQFCNDPFLGVYYHKNNKSWMESEFRVYSSANNCTFEYVSQPFLMDLEGKQGNFKNLREFVFKNIDGYFKIYSKHTPINLVRDLPQGFSALEPLVDLPIGINITRFQTLLALHRSYLTPGDSSSGWTAGAAAYYVGYLQPRTFLLKYNENGTITDAVDCALDPLSETKCTLKSFTVEKGIYQTSNFRVQPTESIVRFPNITNLCPFGEVFNATRFTSVYAWNRKRISNCVADYSVLYNSASFSTFKCYGVSPTKLNDLCFTNVYADSFVIRGDEVRQIAPGQTGKIADYNYKLPDDFTGCVIAWNSNNLDSKVGGNYNYLYRLFRKSNLKPFERDISTEIYQAGSTPCNGVEGFNCYFPLQSYGFQPTNGVGYQPYRVVVLSFELLHAPATVCGPKKSTNLVKNKCVNFNFNGLTGTGVLTESNKKFLPFQQFGRDIADTTDAVRDPQTLEILDITPCSFGGVSVITPGTNTSNQVAVLYQDVNCTEVPVAIHADQLTPTWRVYSTGSNVFQTRAGCLIGAEHVNNSYECDIPIGAGICASYQTQTNSPRRARSVASQSIIAYTMSLGAENSVAYSNNSIAIPTNFTISVTTEILPVSMTKTSVDCTMYICGDSTECSNLLLQYGSFCTQLNRALTGIAVEQDKNTQEVFAQVKQIYKTPPIKDFGGFNFSQILPDPSKPSKRSFIEDLLFNKVTLADAGFIKQYGDCLGDIAARDLICAQKFNGLTVLPPLLTDEMIAQYTSALLAGTITSGWTFGAGAALQIPFAMQMAYRFNGCGVTQNVLYENQKLIANQFNSAIGKIQDSLSSTASALGKLQDVVNQNAQALNTLVKQLSSNFGAISSVLNDILSRLDKVEAEVQIDRLITGRLQSLQTYVTQQLIRAAEIRASANLAATKMSECVLGQSKRVDFCGKGCHLMSFPQSAPHGVVFLHVTYVPAQEKNFTTAPAICHDGKAHFPREGVFVSNGTHWFVTQRNFYEPQIITTDNTFVSGNCDVVIGIVNNTVYDPLQPELDSGGGSGGGQIYEGKLTAEGLRFGIVASRFNHALVDRLVEGAIDAIVRHGGREEDITLVRVPGSWEIPVAAGELARKEDIDAVIAIGVLIRGATPHFDYIASEVSKGLADLSLELRKPITFGVITADTLEQAIERAGTKHGNKGWEAALSAIEMANLFKSLR

SEQ ID NO: 8295 - protein, 1307 aa, Artificial Sequence
  SARS-CoV-2/Portugal/PT0035/2020__EPI_ISL_418020 spike protein (1-1147)(I909C_Y1047C) LumSynth construct
MFVFLVLLPLVSSQCVNLTTRTQLPPAYTNSFTRGVYYPDKVFRSSVLHSTQDLFLPFFSNVTWFHAIHVSGTNGTKRFDNPVLPFNDGVYFASTEKSNIIRGWIFGTTLDSKTQSLLIVNNATNVVIKVCEFQFCNDPFLGVYYHKNNKSWMESEFRVYSSANNCTFEYVSQPFLMDLEGKQGNFKNLREFVFKNIDGYFKIYSKHTPINLVRDLPQGFSALEPLVDLPIGINITRFQTLLALHRSYLTPGDSSSGWTAGAAAYYVGYLQPRTFLLKYNENGTITDAVDCALDPLSETKCTLKSFTVEKGIYQTSNFRVQPTESIVRFPNITNLCPFGEVFNATRFASVYAWNRKRISNCVADYSVLYNSASFSTFKCYGVSPTKLNDLCFTNVYADSFVIRGDEVRQIAPGQTGKIADYNYKLPDDFTGCVIAWNSNNLDSKVGGNYNYLYRLFRKSNLKPFERDISTEIYQAGSTPCNGVEGFNCYFPLQSYGFQPTNGVGYQPYRVVVLSFELLHAPATVCGPKKSTNLVKNKCVNFNFNGLTGTGVLTESNKKFLPFQQFGRDIADTTDAVRDPQTLEILDITPCSFGGVSVITPGTNTSNQVAVLYQDVNCTEVPVAIHADQLTPTWRVYSTGSNVFQTRAGCLIGAEHVNNSYECDIPIGAGICASYQTQTNSPRRARSVASQSIIAYTMSLGAENSVAYSNNSIAIPTNFTISVTTEILPVSMTKTSVDCTMYICGDSTECSNLLLQYGSFCTQLNRALTGIAVEQDKNTQEVFAQVKQIYKTPPIKDFGGFNFSQILPDPSKPSKRSFIEDLLFNKVTLADAGFIKQYGDCLGDISARDLICAQKFNGLTVLPPLLTDEMIAQYTSALLAGTITSGWTFGAGAALQIPFAMQMAYRFNGCGVTQNVLYENQKLIANQFNSAIGKIQDSLSSTASALGKLQDVVNQNAQALNTLVKQLSSNFGAISSVLNDILSRLDKVEAEVQIDRLITGRLQSLQTYVTQQLIRAAEIRASANLAATKMSECVLGQSKRVDFCGKGCHLMSFPQSAPHGVVFLHVTYVPAQEKNFTTAPAICHDGKAHFPREGVFVSNGTHWFVTQRNFYEPQIITTDNTFVSGNCDVVIGIVNNTVYDPLQPELDSGGGSGGGQIYEGKLTAEGLRFGIVASRFNHALVDRLVEGAIDAIVRHGGREEDITLVRVPGSWEIPVAAGELARKEDIDAVIAIGVLIRGATPHFDYIASEVSKGLADLSLELRKPITFGVITADTLEQAIERAGTKHGNKGWEAALSAIEMANLFKSLR

SEQ ID NO: 8296 - protein, 1307 aa, Artificial Sequence
  SARS-CoV-2/USA/NY-NYUMC7/2020__EPI_ISL_418192 spike protein (1-1147)(I909C_Y1047C) LumSynth construct
MFVFLVLLPLVSSQCVNLTTRTQLPPAYTNSFTRGVYYPDKVFRSSVLHSTQDLFLPFFSNVTWFHAIHVSGTNGTKRFDNPVLPFNDGVYFASTEKSNIIRGWIFGTTLDSKTQSLLIVNNATNVVIKVCEFQFCNDPFLGVYHHKNNKSWMESEFRVYSSANNCTFEYVSQPFLMDLEGKQGNFKNLREFVFKNIDGYFKIYSKHTPINLVRDLPQGFSALEPLVDLPIGINITRFQTLLALHRSYLTPGDSSSGWTAGAAAYYVGYLQPRTFLLKYNENGTITDAVDCALDPLSETKCTLKSFTVEKGIYQTSNFRVQPTESIVRFPNITNLCPFGEVFNATRFASVYAWNRKRISNCVADYSVLYNSASFSTFKCYGVSPTKLNDLCFTNVYADSFVIRGDEVRQIAPGQTGKIADYNYKLPDDFTGCVIAWNSNNLDSKVGGNYNYLYRLFRKSNLKPFERDISTEIYQAGSTPCNGVEGFNCYFPLQSYGFQPTNGVGYQPYRVVVLSFELLHAPATVCGPKKSTNLVKNKCVNFNFNGLTGTGVLTESNKKFLPFQQFGRDIADTTDAVRDPQTLEILDITPCSFGGVSVITPGTNTSNQVAVLYQGVNCTEVPVAIHADQLTPTWRVYSTGSNVFQTRAGCLIGAEHVNNSYECDIPIGAGICASYQTQTNSPRRARSVASQSIIAYTMSLGAENSVAYSNNSIAIPTNFTISVTTEILPVSMTKTSVDCTMYICGDSTECSNLLLQYGSFCTQLNRALTGIAVEQDKNTQEVFAQVKQIYKTPPIKDFGGFNFSQILPDPSKPSKRSFIEDLLFNKVTLADAGFIKQYGDCLGDIAARDLICAQKFNGLTVLPPLLTDEMIAQYTSALLAGTITSGWTFGAGAALQIPFAMQMAYRFNGCGVTQNVLYENQKLIANQFNSAIGKIQDSLSSTASALGKLQDVVNQNAQALNTLVKQLSSNFGAISSVLNDILSRLDKVEAEVQIDRLITGRLQSLQTYVTQQLIRAAEIRASANLAATKMSECVLGQSKRVDFCGKGCHLMSFPQSAPHGVVFLHVTYVPAQEKNFTTAPAICHDGKAHFPREGVFVSNGTHWFVTQRNFYEPQIITTDNTFVSGNCDVVIGIVNNTVYDPLQPELDSGGGSGGGQIYEGKLTAEGLRFGIVASRFNHALVDRLVEGAIDAIVRHGGREEDITLVRVPGSWEIPVAAGELARKEDIDAVIAIGVLIRGATPHFDYIASEVSKGLADLSLELRKPITFGVITADTLEQAIERAGTKHGNKGWEAALSAIEMANLFKSLR

SEQ ID NO: 8297 - protein, 1307 aa, Artificial Sequence
  SARS-CoV-2/Iceland/189/2020__EPI_ISL_417709 spike protein (1-1147)(I909C_Y1047C) LumSynth construct
MFVFLVLLPLVSSQCVNLTTRTQLPPAYTNSFTRGVYYPDKVFRSSVLHSTQDLFLPFFSNVTWFHAIHVSGTNGTKRFDNPVLPFNDGVYFASTEKSNIIRGWIFGTTLDSKTQSLLIVNNATNVVIKVCEFQFCNDPFLGVYYHKNNKSWMESEFRVYSSANNCTFEYVSQPFLMDLEGKQGNFKNLREFVFKNIDGYFKIYSKHTPINLVRDLPQGFSALEPLVDLPIGINITRFQTLLALHRSYLTPGDSSSGWTAGAAAYYVGYLQPRTFLLKYNENGTITDAVDCALDPLSETKCTLKSFTVEKGIYQTSNFRVQPTESIVRFPNITNLCPFGEVFNATRFASVYAWNRKRISNCVADYSVLYNSASFSTFKCYGVSPTKLNDLCFTNVYADSFVIRGDEVRQIAPGQTGKIADYNYKLPDDFTGCVIAWNSNNLDSKVGGNYNYLYRLFRKSNLKPFERDISTEIYQAGSTPCNGVEGFNCYFPLQSYGFQPTNGVGYQPYRVVVLSFELLHAPATVCGPKKSTNLVKNKCVNFNFNGLTGTGVLTESNKKFLPFQQFGRDIADTTDAVRDPQTLEILDITPCSFGGVSVITPGTNTSNQVAVLYQGVNCTEVPVAIHADQLTPTWRVYSTGSNVFQTRAGCLIGAEHVNNSYECDIPIGAGICASYQTQTNSPRRARSVASQSIIAYTMSLGAENSVAYSNNSIAIPTNFTISVTTEILPVSMTKTSVDCTMYICGDSTECSNLLLQYGSFCTQLNRALTGIAVEQDKNTQEVFAQVKQIYKTPPIKDFGGFNFSQILPDPSKPSKRSFIEDLLFNKVTLADAGFTKQYGDCLGDIAARDLICAQKFNGLTVLPPLLTDEMIAQYTSALLAGTITSGWTFGAGAALQIPFAMQMAYRFNGCGVTQNVLYENQKLIANQFNSAIGKIQDSLSSTASALGKLQDVVNQNAQALNTLVKQLSSNFGAISSVLNDILSRLDKVEAEVQIDRLITGRLQSLQTYVTQQLIRAAEIRASANLAATKMSECVLGQSKRVDFCGKGCHLMSFPQSAPHGVVFLHVTYVPAQEKNFTTAPAICHDGKAHFPREGVFVSNGTHWFVTQRNFYEPQIITTDNTFVSGNCDVVIGIVNNTVYDPLQPELDSGGGSGGGQIYEGKLTAEGLRFGIVASRFNHALVDRLVEGAIDAIVRHGGREEDITLVRVPGSWEIPVAAGELARKEDIDAVIAIGVLIRGATPHFDYIASEVSKGLADLSLELRKPITFGVITADTLEQAIERAGTKHGNKGWEAALSAIEMANLFKSLR

SEQ ID NO: 8298 - protein, 1307 aa, Artificial Sequence
  SARS-CoV-2/Australia/NSW56/2020__EPI_ISL_417408 spike protein (1-1147)(I909C_Y1047C) LumSynth construct
MFVFLVLLPLVSSQCVNLTTRTQLPPAYTNSFTRGVYYPDKVFRSSVLHSTQDLFLPFFSNVTWFHAIHVSGTNGTKRFDNPVLPFNDGVYFASTEKSNIIRGWIFGTTLDSKTQSLLIVNNATNVVIKVCEFQFCNDPFLGVYYHKNNKSWMESEFRVYSSANNCTFEYVSQPFLMDLEGKQGNFKNLREFVFKNIDGYFKIYSKHTPINLVRDLPQGFSALEPLVDLPIGINITRFQTLLALHRSYLTPGDSSSGWTAGAAAYYVGYLQPRTFLLKYNENGTITDAVDCALDPLSETKCTLKSFTVEKGIYQTSNFRVQPTESIVRFPNITNLCPFGEVFNATRFASVYAWNRKRISNCVADYSVLYNSASFSTFKCYGVSPTKLNDLCFTNVYADSFVIRGDEVRQIAPGQTGKIADYNYKLPDDFTGCVIAWNSNNLDSKVGGNYNYLYRLFRKSNLKPFERDISTEIYQAGSTPCNGVEGFNCYFPLQSYGFQPTNGVGYQPYRVVVLSFELLHAPATVCGPKKSTNLVKNKCVNFNFNGLTGTGVLTESNKKFLPFQQFGRDIADTTDAVRDPQTLEILDITPCSFGGVSVITPGTNTSNQVAVLYQDVNCTEVPVAIHADQLTPTWRVYSTGSNVFQTRAGCLIGAEHVNNSYECDIPIGAGICASYQTQTNSPRRARSVASQSIIAYTMSLGAENSVAYSNNSIAIPTNFTISVTTEILPVSMTKTSVDCTMYICGDSTECSNLLLQYGSFCTQLNRALTGIAVEQDKNTQEVFAQVKQIYKTPPIKDFGGFNFSQILPDSSKPSKRSFIEDLLFNKVTLADAGFIKQYGDCLGDIAARDLICAQKFNGLTVLPPLLTDEMIAQYTSALLAGTITSGWTFGAGAALQIPFAMQMAYRFNGCGVTQNVLYENQKLIANQFNSAIGKIQDSLSSTASALGKLQDVVNQNAQALNTLVKQLSSNFGAISSVLNDILSRLDKVEAEVQIDRLITGRLQSLQTYVTQQLIRAAEIRASANLAATKMSECVLGQSKRVDFCGKGCHLMSFPQSAPHGVVFLHVTYVPAQEKNFTTAPAICHDGKAHFPREGVFVSNGTHWFVTQRNFYEPQIITTDNTFVSGNCDVVIGIVNNTVYDPLQPELDSGGGSGGGQIYEGKLTAEGLRFGIVASRFNHALVDRLVEGAIDAIVRHGGREEDITLVRVPGSWEIPVAAGELARKEDIDAVIAIGVLIRGATPHFDYIASEVSKGLADLSLELRKPITFGVITADTLEQAIERAGTKHGNKGWEAALSAIEMANLFKSLR

SEQ ID NO: 8299 - protein, 1307 aa, Artificial Sequence
  SARS-CoV-2/Iceland/280/2020__EPI_ISL_417608 spike protein (1-1147)(I909C_Y1047C) LumSynth construct
MFVFLVLLPLVSSQCVNLTTRTQLPPAYTNSFTRGVYYPDKVFRSSVLHSTQDLFLPFFSNVTWFHAIHVSGTNGTKRFDNPVLPFNDGVYFASTEKSNIIRGWIFGTTLDSKTQSLLIVNNATNVVIKVCEFQFCNDPFLGVYYHKNNKSWMESEFRVYSSANNCTFEYVSQPFLMDLEGKQGNFKNLREFVFKNIDGYFKIYSKHTPINLVRDLPQGFSALEPLVDLPIGINITRFQTLLALHRSYLTPGDSSSGWTAGAAAYYVGYLQPRTFLLKYNENGTITDAVDCALDPLSETKCTLKSFTVEKGIYQTSNFRVQPTESIVRFPNITNLCPFGEVFNATRFASVYAWNRKRISNCVADYSVLYNSASFSTFKCYGVSPTKLNDLCFTNVYADSFVIRGDEVRQIAPGQTGKIADYNYKLPDDFTGCVIAWNSNNLDSKVGGNYNYLYRLFRKSNLKPFERDISTEIYQAGSTPCNGVEGFNCYFPLQSYGFQPTNGVGYQPYRVVVLSFELLHAPATVCGPKKSTNLVKNKCVNFNFNGLTGTGVLTESNKKFLPFQQFGRDIADTTDAVRDPQTLEILDITPCSFGGVSVITPGTNTSNQVAVLYQGVNCTEVPVAIHADQLTPTWRVYSTGSNVFQTRAGCLIGAEHVNNSYECDIPIGAGICASYHTQTNSPRRARSVASQSIIAYTMSLGAENSVAYSNNSIAIPTNFTISVTTEILPVSMTKTSVDCTMYICGDSTECSNLLLQYGSFCTQLNRALTGIAVEQDKNTQEVFAQVKQIYKTPPIKDFGGFNFSQILPDPSKPSKRSFIEDLLFNKVTLADAGFIKQYGDCLGDIAARDLICAQKFNGLTVLPPLLTDEMIAQYTSALLAGTITSGWTFGAGAALQIPFAMQMAYRFNGCGVTQNVLYENQKLIANQFNSAIGKIQDSLSSTASALGKLQDVVNQNAQALNTLVKQLSSNFGAISSVLNDILSRLDKVEAEVQIDRLITGRLQSLQTYVTQQLIRAAEIRASANLAATKMSECVLGQSKRVDFCGKGCHLMSFPQSAPHGVVFLHVTYVPAQEKNFTTAPAICHDGKAHFPREGVFVSNGTHWFVTQRNFYEPQIITTDNTFVSGNCDVVIGIVNNTVYDPLQPELDSGGGSGGGQIYEGKLTAEGLRFGIVASRFNHALVDRLVEGAIDAIVRHGGREEDITLVRVPGSWEIPVAAGELARKEDIDAVIAIGVLIRGATPHFDYIASEVSKGLADLSLELRKPITFGVITADTLEQAIERAGTKHGNKGWEAALSAIEMANLFKSLR

SEQ ID NO: 8300 - protein, 1307 aa, Artificial Sequence; identical to SEQ ID NO: 8255
  SARS-CoV-2/Iceland/247/2020__EPI_ISL_417575 spike protein (1-1147)(I909C_Y1047C) LumSynth construct

SEQ ID NO: 8301 - protein, 1307 aa, Artificial Sequence
  SARS-CoV-2/Iceland/238/2020__EPI_ISL_417566 spike protein (1-1147)(I909C_Y1047C) LumSynth construct
MFVFLVLLPLVSSQCVNLTTRTQLPPAYTNSFTRGVYYPDKVFRSSVLHSTQDLFLPFFSNVTWFHAIHVSGTNGTKRFDNPVLPFNDGVYFASTEKSNIIRGWIFGTTLDSKTQSLLIVNNATNVVIKVCEFQFCNDPFLGVYYHKNNKSWMESEFRVYSSANNCTFEYVSQPFLMDLEGKQGNFKNLREFVFKNIDGYFKIYSKHTPINLVRDLPQGFSALEPLVDLPIGINITRFQTLLALHRSYLTPGDSSSGWTAGAAAYYVGYLQPRTFLLKYNENGTITDAVDCALDPLSETKCTLKSFTVEKGIYQTSNFRVQPTESIVRFPNITNLCPFGEVFNATRFASVYAWNRKRISNCVADYSVLYNSASFSTFKCYGVSPTKLNDLCFTNVYADSFVIRGDEVRQIAPGQTGKIADYNYKLPDDFTGCVIAWNSNNLDSKVGGNYNYLYRLFRKSNLKPFERDISTEIYQAGSTPCNGVEGFNCYFPLQSYGFQPTNGVGYQPYRVVVLSFELLHAPATVCGPKKSTNLVKNKCVNFNFNGLTGTGVLTESNKKFLPFQQFGRDIADTTDAVRDPQTLEILDITPCSFGGVSVITPGTNTSNQVAVLYQGVNCTEVPVAIHADQLTPTWRVYSTGSNVFQTRAGCLIGAEHVNNSYECDIPIGAGICASYQTQTNSPRRARSVASQSIIAYTMSLGAENSVAYSNNSIAIPTNFTISVTTEILPVSMTKTSVDCTMYICGDSTECSNLLLQYGSFCTQLNRALTGIAVEQDKNTQEVFAQVKQIYKTPPIKDFGGFNFSQILPDPSKPSKRSFIEDLLFNKVTLADVGFIKQYGDCLGDIAARDLICAQKFNGLTVLPPLLTDEMIAQYTSALLAGTITSGWTFGAGAALQIPFAMQMAYRFNGCGVTQNVLYENQKLIANQFNSAIGKIQDSLSSTASALGKLQDVVNQNAQALNTLVKQLSSNFGAISSVLNDILSRLDKVEAEVQIDRLITGRLQSLQTYVTQQLIRAAEIRASANLAATKMSECVLGQSKRVDFCGKGCHLMSFPQSAPHGVVFLHVTYVPAQEKNFTTAPAICHDGKAHFPREGVFVSNGTHWFVTQRNFYEPQIITTDNTFVSGNCDVVIGIVNNTVYDPLQPELDSGGGSGGGQIYEGKLTAEGLRFGIVASRFNHALVDRLVEGAIDAIVRHGGREEDITLVRVPGSWEIPVAAGELARKEDIDAVIAIGVLIRGATPHFDYIASEVSKGLADLSLELRKPITFGVITADTLEQAIERAGTKHGNKGWEAALSAIEMANLFKSLR

SEQ ID NO: 8302 - protein, 1307 aa, Artificial Sequence
  SARS-CoV-2/Greece/16/2020__EPI_ISL_418265 spike protein (1-1147)(I909C_Y1047C) LumSynth construct
MFVFLVLLPLVSSQCVNLTTRTQLPPAYTNSFTRGVYYPDKVFRSSVLHSTQDLFLPFFSNVTWFHAIHVSGTNGTKRFDNPVLPFNDGVYFASTEKSNIIRGWIFGTTLDSKTQSLLIVNNATNVVIKVCEFQFCNDPFLGVYYHKNNKSWMESEFRVYSSANNCTFEYVSQPFLMDLEGKQGNFKNLREFVFKNVDGYFKIYSKHTPINLVRDLPQGFSALEPLVDLPIGINITRFQTLLALHRSYLTPGDSSSGWTAGAAAYYVGYLQPRTFLLKYNENGTITDAVDCALDPLSETKCTLKSFTVEKGIYQTSNFRVQPTESIVRFPNITNLCPFGEVFNATRFASVYAWNRKRISNCVADYSVLYNSASFSTFKCYGVSPTKLNDLCFTNVYADSFVIRGDEVRQIAPGQTGKIADYNYKLPDDFTGCVIAWNSNNLDSKVGGNYNYLYRLFRKSNLKPFERDISTEIYQAGSTPCNGVEGFNCYFPLQSYGFQPTNGVGYQPYRVVVLSFELLHAPATVCGPKKSTNLVKNKCVNFNFNGLTGTGVLTESNKKFLPFQQFGRDIADTTDAVRDPQTLEILDITPCSFGGVSVITPGTNTSNQVAVLYQDVNCTEVPVAIHADQLTPTWRVYSTGSNVFQTRAGCLIGAEHVNNSYECDIPIGAGICASYQTQTNSPRRARSVASQSIIAYTMSLGAENSVAYSNNSIAIPTNFTISVTTEILPVSMTKTSVDCTMYICGDSTECSNLLLQYGSFCTQLNRALTGIAVEQDKNTQEVFAQVKQIYKTPPIKDFGGFNFSQILPDPSKPSKRSFIEDLLFNKVTLADAGFIKQYGDCLGDIAARDLICAQKFNGLTVLPPLLTDEMIAQYTSALLAGTITSGWTFGAGAALQIPFAMQMAYRFNGCGVTQNVLYENQKLIANQFNSAIGKIQDSLSSTASALGKLQDVVNQNAQALNTLVKQLSSNFGAISSVLNDILSRLDKVEAEVQIDRLITGRLQSLQTYVTQQLIRAAEIRASANLAATKMSECVLGQSKRVDFCGKGCHLMSFPQSAPHGVVFLHVTYVPAQEKNFTTAPAICHDGKAHFPREGVFVSNGTHWFVTQRNFYEPQIITTDNTFVSGNCDVVIGIVNNTVYDPLQPELDSGGGSGGGQIYEGKLTAEGLRFGIVASRFNHALVDRLVEGAIDAIVRHGGREEDITLVRVPGSWEIPVAAGELARKEDIDAVIAIGVLIRGATPHFDYIASEVSKGLADLSLELRKPITFGVITADTLEQAIERAGTKHGNKGWEAALSAIEMANLFKSLR

SEQ ID NO: 8303 - protein, 1307 aa, Artificial Sequence
  SARS-CoV-2/Iceland/319/2020__EPI_ISL_417648 spike protein (1-1147)(I909C_Y1047C) LumSynth construct
MFVFLVLLPLVSSQCVNLTTRTQLPPAYTNSFTRGVYYPDKVFRSSVLHSTQDLFLPFFSNVTWFHAIHVSGTNGTKRFDNPVLPFNDGVYFASTEKSNIIRGWIFGTTLDSKTQSLLIVNNATNVVIKVCEFQFCNDPFLGVYYHKNNKSWMESEFRVYSSANNCTFEYVSQPFLIDLEGKQGNFKNLREFVFKNIDGYFKIYSKHTPINLVRDLPQGFSALEPLVDLPIGINITRFQTLLALHRSYLTPGDSSSGWTAGAAAYYVGYLQPRTFLLKYNENGTITDAVDCALDPLSETKCTLKSFTVEKGIYQTSNFRVQPTESIVRFPNITNLCPFGEVFNATRFASVYAWNRKRISNCVADYSVLYNSASFSTFKCYGVSPTKLNDLCFTNVYADSFVIRGDEVRQIAPGQTGKIADYNYKLPDDFTGCVIAWNSNNLDSKVGGNYNYLYRLFRKSNLKPFERDISTEIYQAGSTPCNGVEGFNCYFPLQSYGFQPTNGVGYQPYRVVVLSFELLHAPATVCGPKKSTNLVKNKCVNFNFNGLTGTGVLTESNKKFLPFQQFGRDIADTTDAVRDPQTLEILDITPCSFGGVSVITPGTNTSNQVAVLYQGVNCTEVPVAIHADQLTPTWRVYSTGSNVFQTRAGCLIGAEHVNNSYECDIPIGAGICASYQTQTNSPRRARSVASQSIIAYTMSLGAENSVAYSNNSIAIPTNFTISVTTEILPVSMTKTSVDCTMYICGDSTECSNLLLQYGSFCTQLNRALTGIAVEQDKNTQEVFAQVKQIYKTPPIKDFGGFNFSQILPDPSKPSKRSFIEDLLFNKVTLADAGFIKQYGDCLGDIAARDLICAQKFNGLTVLPPLLTDEMIAQYTSALLAGTITSGWTFGAGAALQIPFAMQMAYRFNGCGVTQNVLYENQKLIANQFNSAIGKIQDSLSSTASALGKLQDVVNQNAQALNTLVKQLSSNFGAISSVLNDILSRLDKVEAEVQIDRLITGRLQSLQTYVTQQLIRAAEIRASANLAATKMSECVLGQSKRVDFCGKGCHLMSFPQSAPHGVVFLHVTYVPAQEKNFTTAPAICHDGKAHFPREGVFVSNGTHWFVTQRNFYEPQIITTDNTFVSGNCDVVIGIVNNTVYDPLQPELDSGGGSGGGQIYEGKLTAEGLRFGIVASRFNHALVDRLVEGAIDAIVRHGGREEDITLVRVPGSWEIPVAAGELARKEDIDAVIAIGVLIRGATPHFDYIASEVSKGLADLSLELRKPITFGVITADTLEQAIERAGTKHGNKGWEAALSAIEMANLFKSLR

SEQ ID NO: 8304 - protein, 1307 aa, Artificial Sequence
  SARS-CoV-2/Congo/94/2020__EPI_ISL_417947 spike protein (1-1147)(I909C_Y1047C) LumSynth construct
MFVFLVLLPLVSSQCVNLTTRTQLPPAYTNSFTRGVYYPDKVFRSSVLHSTQDLFLPFFSNVTWFHAIHVSGTNGTKRFDNPVLPFNDGVYFASTEKSNIIRGWIFGTTLDSKTQSLLIVNNATNVVIKVCEFQFCNDPFLGVYYHKNNKSWMESEFRVYSSANNCTFEYVSQPFLMDLEGKQGNFKNLREFVFKNIDGYFKIYSKHTPINLVRDLPQGFSALEPLVDLPIGINITRFQTLLALHRSYLTPGDSSSGWTAGAAAYYVGYLQPRTFLLKYNENGTITDAVDCALDPLSETKCTLKSFTVEKGIYQTSNFRVQPTESIVRFPNITNLCPFGEVFNATRFASVYAWNRKRISNCVADYSVLYNSASFSTFKCYGVSPTKLNDLCFTNVYADSFVIRGDEVRQIAPGQTGKIADYNYKLPDDFTGCVIAWNSNNLDSKVGGNYNYLYRLFRKSNLKPFERDISTEIYQAGSTPCNGVEGFNCYFPLQSYGFQPTNGVGYQPYRVVVLSFELLHAPATVCGPKKSTNLVKNKCVNFNFNGLTGTGVLTESNKKFLPFQQFGRDIADTTDAVRDPQTLEILDITPCSFGGVSVITPGTNTSNQVAVLYQGVNCTEVPVAIHADQLTPTWRVYSTGSNVFQTRAGCLIGAEHVNNSYECDIPIGAGICASYQTQTNSPRRARSVASQSIIAYTMSLGAENSVAYSNNSIAIPTNFTISVTTEILPVSMTKTSVDCTMYICGDSTECSNLLLQYGSFCTQLNRALTGIAVEQDKNTQEVFAQVKQIYKTPPIKDFGGFNFSQILPDPSKPSKRSFIEDILFNKVTLADAGFIKQYGDCLGDIAARDLICAQKFNGLTVLPPLLTDEMIAQYTSALLAGTITSGWTFGAGAALQIPFAMQMAYRFNGCGVTQNVLYENQKLIANQFNSAIGKIQDSLSSTASALGKLQDVVNQNAQALNTLVKQLSSNFGAISSVLNDILSRLDKVEAEVQIDRLITGRLQSLQTYVTQQLIRAAEIRASANLAATKMSECVLGQSKRVDFCGKGCHLMSFPQSAPHGVVFLHVTYVPAQEKNFTTAPAICHDGKAHFPREGVFVSNGTHWFVTQRNFYEPQIITTDNTFVSGNCDVVIGIVNNTVYDPLQPELDSGGGSGGGQIYEGKLTAEGLRFGIVASRFNHALVDRLVEGAIDAIVRHGGREEDITLVRVPGSWEIPVAAGELARKEDIDAVIAIGVLIRGATPHFDYIASEVSKGLADLSLELRKPITFGVITADTLEQAIERAGTKHGNKGWEAALSAIEMANLFKSLR

SEQ ID NO: 8305 - protein, 1307 aa, Artificial Sequence
  SARS-CoV-2/Congo/158/2020__EPI_ISL_417950 spike protein (1-1147)(I909C_Y1047C) LumSynth construct
MFVFLVLLPLVSSQCVNLTTRTQLPPAYTNSFTRGVYYPDKVFRSSVLHSTQDLFLPFFSNVTWFHAIHVSGTNGTKRFDNPVLPFNDGVYFASTEKSNIIRGWIFGTTLDSKTQSLLIVNNATNVVIKVCEFQFCNDPFLGVYYHKNNKSWMESEFRVYSSANNCTFEYVSQPFLMDLEGKQGNFKNLREFVFKNIDGYFKIYSKHTPINLVRDLPQGFSALEPLVDLPIGINITRFQTLLALHRSYLTPGDSSSGWTAGAAAYYVGYLQPRTFLLKYNENGTITDAVDCALDPLSETKCTLKSFTVEKGIYQTSNFRVQPTESIVRFPNITNLCPFGEVFNATRFASVYAWNRKRISNCVADYSVLYNSASFSTFKCYGVSPTKLNDLCFTNVYADSFVIRGDEVRQIAPGQTGKIADYNYKLPDDFTGCVIAWNSNNLDSKVGGNYNYLYRLFRKSNLKPFERDISTEIYQAGSTPCNGVEGFNCYFPLQSYGFQPTNGVGYQPYRVVVLSFELLHAPATVCGPKKSTNLVKNKCVNFNFNGLTGTGVLTESNKKFLPFQQFGRDIADTTDAVRDPQTLEILDITPCSFGGVSVITPGTNTSNQVAVLYQDVNCTEVPVAIHADQLTPTWRVYSTGSNVFQTRAGCLIGAEHVNNSYECDIPIGAGICASYQTQTNSPRRARSVASQSIIAYTMSLGAENSVAYSNNSIAIPTNFTISVTTEILPVSMTKTSVDCTMYICGDSTECSNLLLQYGSFCTQLNRALTGIAVEQDKNTQEVFAQVKQIYKTPPIKDFGGFNFSQILPDPSKPSKRSFIEDLLFNKVTLADAGFIKQYGDCLGDIAARDLICAQKFNGLTVLPPLLTDEMIAQYTSALLAGTITSGWTFGAGAALQIPFAMQMAYRFNGCGVTQNVLYENQKLIANQFNSAIGKIQDSLSSTASALGKLQDVVNQNAQALNTLVKQLSSNFGAISSVLNDILSRLDKVEAEVQIDRLITGRLQSLQTYVTQQLIRAAEIRASANLAATKMSECVLGQSKRVDFCGKGCHLMSFPQSAPHGVVFLHVTYVPAQEKNFTTAPAICHDGKAHFPREGVFVSNGTHWFVTQRNFYEPQIITTDNTFLSGNCDVVIGIVNNTVYDPLQPELDSGGGSGGGQIYEGKLTAEGLRFGIVASRFNHALVDRLVEGAIDAIVRHGGREEDITLVRVPGSWEIPVAAGELARKEDIDAVIAIGVLIRGATPHFDYIASEVSKGLADLSLELRKPITFGVITADTLEQAIERAGTKHGNKGWEAALSAIEMANLFKSLR

SEQ ID NO: 8306 - protein, 1307 aa, Artificial Sequence
  SARS-CoV-2/USA/UT-00034/2020__EPI_ISL_417977 spike protein (1-1147)(I909C_Y1047C) LumSynth construct
MFVFLVLLPLVSSQCVNLTTRTQLPPAYTNSFTRGVYYPDKVFRSSVLHSTQDLFLPFFSNVTWFHAIHVSGTNGTKRFDNPVLPFNDGVYFASTEKSNIIRGWIFGTTLDSKTQSLLIVNNATNVVIKVCEFQFCNDPFLGVYYYKNNKSWMESEFRVYSSANNCTFEYVSQPFLMDLEGKQGNFKNLREFVFKNIDGYFKIYSKHTPINLVRDLPQGFSALEPLVDLPIGINITRFQTLLALHRSYLTPGDSSSGWTAGAAAYYVGYLQPRTFLLKYNENGTITDAVDCALDPLSETKCTLKSFTVEKGIYQTSNFRVQPTESIVRFPNITNLCPFGEVFNATRFASVYAWNRKRISNCVADYSVLYNSASFSTFKCYGVSPTKLNDLCFTNVYADSFVIRGDEVRQIAPGQTGKIADYNYKLPDDFTGCVIAWNSNNLDSKVGGNYNYLYRLFRKSNLKPFERDISTEIYQAGSTPCNGVEGFNCYFPLQSYGFQPTNGVGYQPYRVVVLSFELLHAPATVCGPKKSTNLVKNKCVNFNFNGLTGTGVLTESNKKFLPFQQFGRDIADTTDAVRDPQTLEILDITPCSFGGVSVITPGTNTSNQVAVLYQGVNCTEVPVAIHADQLTPTWRVYSTGSNVFQTRAGCLIGAEHVNNSYECDIPIGAGICASYQTQTNSPRRARSVASQSIIAYTMSLGAENSVAYSNNSIAIPTNFTISVTTEILPVSMTKTSVDCTMYICGDSTECSNLLLQYGSFCTQLNRALTGIAVEQDKNTQEVFAQVKQIYKTPPIKDFGGFNFSQILPDPSKPSKRSFIEDLLFNKVTLADAGFIKQYGDCLGDIAARDLICAQKFNGLTVLPPLLTDEMIAQYTSALLAGTITSGWTFGAGAALQIPFAMQMAYRFNGCGVTQNVLYENQKLIANQFNSAIGKIQDSLSSTASALGKLQDVVNQNAQALNTLVKQLSSNFGAISSVLNDILSRLDKVEAEVQIDRLITGRLQSLQTYVTQQLIRAAEIRASANLAATKMSECVLGQSKRVDFCGKGCHLMSFPQSAPHGVVFLHVTYVPAQEKNFTTAPAICHDGKAHFPREGVFVSNGTHWFVTQRNFYEPQIITTDNTFVSGNCDVVIGIVNNTVYDPLQPELDSGGGSGGGQIYEGKLTAEGLRFGIVASRFNHALVDRLVEGAIDAIVRHGGREEDITLVRVPGSWEIPVAAGELARKEDIDAVIAIGVLIRGATPHFDYIASEVSKGLADLSLELRKPITFGVITADTLEQAIERAGTKHGNKGWEAALSAIEMANLFKSLR

SEQ ID NO: 8307 - protein, 1307 aa, Artificial Sequence
  SARS-CoV-2/USA/UT-00033/2020__EPI_ISL_417976 spike protein (1-1147)(I909C_Y1047C) LumSynth construct
MFVFLVLLPLVSSQCVNLTTRTQLPPAYTNSFTRGVYYPDKVFRSSVLHSTQDLFLPFFSNVTWFHAIHVSGTNGTKRFDNPVLPFNDGVYFASTEKSNIIRGWIFGTTLDSKTQSLLIVNNATNVVIKVCEFQFCNDPFLGVYYHKNNKSWMESEFRVYSSANNCTFEYVSQPFLMDLEGKQGNFKNLREFVFKNIDGYFKIYSKHTPINLVRDLPQGFSALEPLVDLPIGINITRFQTLLALHRSYLTPGDSSSGLTAGAAAYYVGYLQPRTFLLKYNENGTITDAVDCALDPLSETKCTLKSFTVEKGIYQTSNFRVQPTESIVRFPNITNLCPFGEVFNATRFASVYAWNRKRISNCVADYSVLYNSASFSTFKCYGVSPTKLNDLCFTNVYADSFVIRGDEVRQIAPGQTGKIADYNYKLPDDFTGCVIAWNSNNLDSKVGGNYNYLYRLFRKSNLKPFERDISTEIYQAGSTPCNGVEGFNCYFPLQSYGFQPTNGVGYQPYRVVVLSFELLHAPATVCGPKKSTNLVKNKCVNFNFNGLTGTGVLTESNKKFLPFQQFGRDIADTTDAVRDPQTLEILDITPCSFGGVSVITPGTNTSNQVAVLYQGVNCTEVPVAIHADQLTPTWRVYSTGSNVFQTRAGCLIGAEHVNNSYECDIPIGAGICASYQTQTNSPRRARSVASQSIIAYTMSLGAENSVAYSNNSIAIPTNFTISVTTEILPVSMTKTSVDCTMYICGDSTECSNLLLQYGSFCTQLNRALTGIAVEQDKNTQEVFAQVKQIYKTPPIKDFGGFNFSQILPDPSKPSKRSFIEDLLFNKVTLADAGFIKQYGDCLGDIAARDLICAQKFNGLTVLPPLLTDEMIAQYTSALLAGTITSGWTFGAGAALQIPFAMQMAYRFNGCGVTQNVLYENQKLIANQFNSAIGKIQDSLSSTASALGKLQDVVNQNAQALNTLVKQLSSNFGAISSVLNDILSRLDKVEAEVQIDRLITGRLQSLQTYVTQQLIRAAEIRASANLAATKMSECVLGQSKRVDFCGKGCHLMSFPQSAPHGVVFLHVTYVPAQEKNFTTAPAICHDGKAHFPREGVFVSNGTHWFVTQRNFYEPQIITTDNTFVSGNCDVVIGIVNNTVYDPLQPELDSGGGSGGGQIYEGKLTAEGLRFGIVASRFNHALVDRLVEGAIDAIVRHGGREEDITLVRVPGSWEIPVAAGELARKEDIDAVIAIGVLIRGATPHFDYIASEVSKGLADLSLELRKPITFGVITADTLEQAIERAGTKHGNKGWEAALSAIEMANLFKSLR

SEQ ID NO: 8308 - protein, 1307 aa, Artificial Sequence
  SARS-CoV-2/USA/WI-13/2020__EPI_ISL_417516 spike protein (1-1147)(I909C_Y1047C) LumSynth construct
MFVFLVLLPLVSSQCVNLTTRTQLPPAYTNSFTRGVYYPDKVFRSSVLHSTQDLFLPFFSNVTWFHAIHVSGTNGTKRFDNPVLPFNDGVYFASTEKSNIIRGWIFGTTLDSKTQSLLIVNNATNVVIKVCEFQFCNDPFLGVYYHKNNKSWMESEFRVYSSANNCTFEYVSQPFLMDLEGKQGNFKNLREFVFKNIDGYFKIYSKHTPINLVRDLPQGFSALEPLVDLPIGINITRFQTLLALHRSYLTPGDSSSGWTAGAAAYYVGYLQPRTFLLKYNENGTITDAVDCALDPLSETKCTLKSFTVEKGIYQTSNFRVLPTESIVRFPNITNLCPFGEVFNATRFASVYAWNRKRISNCVADYSVLYNSASFSTFKCYGVSPTKLNDLCFTNVYADSFVIRGDEVRQIAPGQTGKIADYNYKLPDDFTGCVIAWNSNNLDSKVGGNYNYLYRLFRKSNLKPFERDISTEIYQAGSTPCNGVEGFNCYFPLQSYGFQPTNGVGYQPYRVVVLSFELLHAPATVCGPKKSTNLVKNKCVNFNFNGLTGTGVLTESNKKFLPFQQFGRDIADTTDAVRDPQTLEILDITPCSFGGVSVITPGTNTSNQVAVLYQGVNCTEVPVAIHADQLTPTWRVYSTGSNVFQTRAGCLIGAEHVNNSYECDIPIGAGICASYQTQTNSPRRARSVASQSIIAYTMSLGAENSVAYSNNSIAIPTNFTISVTTEILPVSMTKTSVDCTMYICGDSTECSNLLLQYGSFCTQLNRALTGIAVEQDKNTQEVFAQVKQIYKTPPIKDFGGFNFSQILPDPSKPSKRSFIEDLLFNKVTLADAGFIKQYGDCLGDIAARDLICAQKFNGLTVLPPLLTDEMIAQYTSALLAGTITSGWTFGAGAALQIPFAMQMAYRFNGCGVTQNVLYENQKLIANQFNSAIGKIQDSLSSTASALGKLQDVVNQNAQALNTLVKQLSSNFGAISSVLNDILSRLDKVEAEVQIDRLITGRLQSLQTYVTQQLIRAAEIRASANLAATKMSECVLGQSKRVDFCGKGCHLMSFPQSAPHGVVFLHVTYVPAQEKNFTTAPAICHDGKAHFPREGVFVSNGTHWFVTQRNFYEPQIITTDNTFVSGNCDVVIGIVNNTVYDPLQPELDSGGGSGGGQIYEGKLTAEGLRFGIVASRFNHALVDRLVEGAIDAIVRHGGREEDITLVRVPGSWEIPVAAGELARKEDIDAVIAIGVLIRGATPHFDYIASEVSKGLADLSLELRKPITFGVITADTLEQAIERAGTKHGNKGWEAALSAIEMANLFKSLR

SEQ ID NO: 8309 - protein, 1306 aa, Artificial Sequence
  SARS-CoV-2/India/1-27/2020__EPI_ISL_413522 spike protein (1-1146)(I908C_Y1046C) LumSynth construct
MFVFLVLLPLVSSQCVNLTTRTQLPPAYTNSFTRGVYYPDKVFRSSVLHSTQDLFLPFFSNVTWFHAIHVSGTNGTKRFDNPVLPFNDGVYFASTEKSNIIRGWIFGTTLDSKTQSLLIVNNATNVVIKVCEFQFCNDPFLGVYHKNNKSWMESEFRVYSSANNCTFEYVSQPFLMDLEGKQGNFKNLREFVFKNIDGYFKIYSKHTPINLVRDLPQGFSALEPLVDLPIGINITRFQTLLALHRSYLTPGDSSSGWTAGAAAYYVGYLQPRTFLLKYNENGTITDAVDCALDPLSETKCTLKSFTVEKGIYQTSNFRVQPTESIVRFPNITNLCPFGEVFNATRFASVYAWNRKRISNCVADYSVLYNSASFSTFKCYGVSPTKLNDLCFTNVYADSFVIRGDEVIQIAPGQTGKIADYNYKLPDDFTGCVIAWNSNNLDSKVGGNYNYLYRLFRKSNLKPFERDISTEIYQAGSTPCNGVEGFNCYFPLQSYGFQPTNGVGYQPYRVVVLSFELLHAPATVCGPKKSTNLVKNKCVNFNFNGLTGTGVLTESNKKFLPFQQFGRDIADTTDAVRDPQTLEILDITPCSFGGVSVITPGTNTSNQVAVLYQDVNCTEVPVAIHADQLTPTWRVYSTGSNVFQTRAGCLIGAEHVNNSYECDIPIGAGICASYQTQTNSPRRARSVASQSIIAYTMSLGAENSVAYSNNSIAIPTNFTISVTTEILPVSMTKTSVDCTMYICGDSTECSNLLLQYGSFCTQLNRALTGIAVEQDKNTQEVFAQVKQIYKTPPIKDFGGFNFSQILPDPSKPSKRSFIEDLLFNKVTLADAGFIKQYGDCLGDIAARDLICAQKFNGLTVLPPLLTDEMIAQYTSALLAGTITSGWTFGAGAALQIPFAMQMAYRFNGCGVTQNVLYENQKLIANQFNSAIGKIQDSLSSTASALGKLQDVVNQNAQALNTLVKQLSSNFGAISSVLNDILSRLDKVEAEVQIDRLITGRLQSLQTYVTQQLIRAAEIRASANLAATKMSECVLGQSKRVDFCGKGCHLMSFPQSAPHGVVFLHVTYVPAQEKNFTTAPAICHDGKAHFPREGVFVSNGTHWFVTQRNFYEPQIITTDNTFVSGNCDVVIGIVNNTVYDPLQPELDSGGGSGGGQIYEGKLTAEGLRFGIVASRFNHALVDRLVEGAIDAIVRHGGREEDITLVRVPGSWEIPVAAGELARKEDIDAVIAIGVLIRGATPHFDYIASEVSKGLADLSLELRKPITFGVITADTLEQAIERAGTKHGNKGWEAALSAIEMANLFKSLR

SEQ ID NO: 8310 - protein, 1301 aa, Artificial Sequence
  SARS-CoV-2/pangolin/Guangxi/P4L/2017__EPI_ISL_410538 spike protein (1-1141)(I903C_Y1041C) LumSynth construct
MFVFLFVLPLVSSQCVNLTTRTGIPPGYTNSSTRGVYYPDKVFRSSILHLTQDLFLPFFSNVTWFNTINYQGGFKKFDNPVLPFNDGVYFASTEKSNIIRGWIFGTTLDARTQSLLIVNNATNVVIKVCEFQFCTDPFLGVYYHNNNKTWVENEFRVYSSANNCTFEYISQPFLMDLEGKQGNFKNLREFVFKNVDGYFKIYSKHTPIDLVRDLPRGFAALEPLVDLPIGINITRFQTLLALHRSYLTPGNLESGWTTGAAAYYVGYLQQRTFLLSYNQNGTITDAVDCSLDPLSETKCTLKSLTVEKGIYQTSNFRVQPTISIVRFPNITNLCPFGEVFNASKFASVYAWNRKRISNCVADYSVLYNSTSFSTFKCYGVSPTKLNDLCFTNVYADSFVVKGDEVRQIAPGQTGVIADYNYKLPDDFTGCVIAWNSVKQDALTGGNYGYLYRLFRKSKLKPFERDISTEIYQAGSTPCNGQVGLNCYYPLERYGFHPTTGVNYQPFRVVVLSFELLNGPATVCGPKLSTTLVKDKCVNFNFNGLTGTGVLTTSKKQFLPFQQFGRDISDTTDAVRDPQTLEILDITPCSFGGVSVITPGTNTSNQVAVLYQDVNCTEVPMAIHAEQLTPAWRVYSAGANVFQTRAGCLVGAEHVNNSYECDIPVGAGICASYHSMSSLRSVNQRSIIAYTMSLGAENSVAYSNNSIAIPTNFTISVTTEILPVSMTKTSVDCTMYICGDSIECSNLLLQYGSFCTQLNRALTGIAVEQDKNTQEVFAQVKQIYKTPPIKDFGGFNFSQILPDPSKPSKRSFIEDLLFNKVTLADAGFIKQYGDCLGDIAARDLICAQKFNGLTVLPPLLTDEMIAQYTSALLAGTITSGWTFGAGAALQIPFAMQMAYRFNGCGVTQNVLYENQKLIANQFNSAIGKIQDSLSSTASALGKLQDVVNQNAQALNTLVKQLSSNFGAISSVLNDILSRLDKVEAEVQIDRLITGRLQSLQTYVTQQLIRAAEIRASANLAATKMSECVLGQSKRVDFCGKGCHLMSFPQSAPHGVVFLHVTYVPAQEKNFTTAPAICHEGKAHFPREGVFVSNGTHWFITQRNFYEPQIITTDNTFVSGSCDVVIGIVNNTVYDPLQPELDSGGGSGGGQIYEGKLTAEGLRFGIVASRFNHALVDRLVEGAIDAIVRHGGREEDITLVRVPGSWEIPVAAGELARKEDIDAVIAIGVLIRGATPHFDYIASEVSKGLADLSLELRKPITFGVITADTLEQAIERAGTKHGNKGWEAALSAIEMANLFKSLR

SEQ ID NO: 8311 - protein, 1301 aa, Artificial Sequence
  SARS-CoV-2/pangolin/Guangxi/P5L/2017__EPI_ISL_410540 spike protein (1-1141)(I903C_Y1041C) LumSynth construct
MFVFLFVLPLVSSQCVNLTTRTGIPPGYTNSSTRGVYYPDKVFRSSILHLTQDLFLPFFSNVTWFNTINYQGGFKKFDNPVLPFNDGVYFASTEKSNIIRGWIFGTTLDARTQSLLIVNNATNVVIKVCEFQFCTDPFLGVYYHNNNKTWVENEFRVYSSANNCTFEYISQPFLMDLEGKQGNFKNLREFVFKNVDGYFKIYSKHTPIDLVRDLPRGFAALEPLVDLPIGINITRFQTLLALHRSYLTPGKLESGWTTGAAAYYVGYLQQRTFLLSYNQNGTITDAVDCSLDPLSETKCTLKSLTVEKGIYQTSNFRVQPTISIVRFPNITNLCPFGEVFNASKFASVYAWNRKRISNCVADYSVLYNSTSFSTFKCYGVSPTKLNDLCFTNVYADSFVVKGDEVRQIAPGQTGVIADYNYKLPDDFTGCVIAWNSVKQDALTGGNYGYLYRLFRKSKLKPFERDISTEIYQAGSTPCNGQVGLNCYYPLERYGFHPTTGVNYQPFRVVVLSFELLNGPATVCGPKLSTTLVKDKCVNFNFNGLTGTGVLTTSKKQFLPFQQFGRDISDTTDAVRDPQTLEILDITPCSFGGVSVITPGTNTSNQVAVLYQDVNCTEVPMAIHAEQLTPAWRVYSAGANVFQTRAGCLVGAEHVNNSYECDIPVGAGICASYHSMSSFRSVNQRSIIAYTMSLGAENSVAYSNNSIAIPTNFTISVTTEILPVSMTKTSVDCTMYICGDSIECSNLLLQYGSFCTQLNRALTGIAVEQDKNTQEVFAQVKQIYKTPPIKDFGGFNFSQILPDPSKPSKRSFIEDLLFNKVTLADAGFIKQYGDCLGDIAARDLICAQKFNGLTVLPPLLTDEMIAQYTSALLAGTITSGWTFGAGAALQIPFAMQMAYRFNGCGVTQNVLYENQKLIANQFNSAIGKIQDSLSSTASALGKLQDVVNQNAQALNTLVKQLSSNFGAISSVLNDILSRLDKVEAEVQIDRLITGRLQSLQTYVTQQLIRAAEIRASANLAATKMSECVLGQSKRVDFCGKGCHLMSFPQSAPHGVVFLHVTYVPAQEKNFTTAPAICHEGKAHFPREGVFVSNGTHWFITQRNFYEPQIITTDNTFVSGSCDVVIGIVNNTVYDPLQPELDSGGGSGGGQIYEGKLTAEGLRFGIVASRFNHALVDRLVEGAIDAIVRHGGREEDITLVRVPGSWEIPVAAGELARKEDIDAVIAIGVLIRGATPHFDYIASEVSKGLADLSLELRKPITFGVITADTLEQAIERAGTKHGNKGWEAALSAIEMANLFKSLR

SEQ ID NO: 8312 - protein, 1301 aa, Artificial Sequence
  SARS-CoV-2/pangolin/Guangxi/P5E/2017__EPI_ISL_410541 spike protein (1-1141)(I903C_Y1041C) LumSynth construct
MFVFLFVLPLVSSQCVNLTTRTGIPPGYTNSSTRGVYYPDKVFRSSILHLTQDLFLPFFSNVTWFNTITYQGGSKKFDNPVLPFNDGVYFASTEKSNIIRGWIFGTTLDARTQSLLIVNNATNVVIKVCEFQFCTDPFLGVYYHNNNKTWVENEFRVYSSANNCTFEYISQPFLMDLEGKQGNFKNLREFVFKNVDGYFKIYSKHTPIDLVRDLPRGFAALEPLVDLPIGINITRFQTLLALHRSYLTPGKLESGWTTGAAAYYVGYLQQRTFLLSYNQNGTITDAVDCSLDPLSETKCTLKSLTVEKGIYQTSNFRVQPTISIVRFPNITNLCPFGEVFNASKFASVYAWNRKRISNCVADYSVLYNSTSFSTFKCYGVSPTKLNDLCFTNVYADSFVVKGDEVRQIAPGQTGVIADYNYKLPDDFTGCVIAWNSVKQDALTGDNYGYLYRLFRKSKLKPFERDISTEIYQAGSTPCNGQVGLNCYYPLERYGFHPTTGVNYQPFRVVVLSFELLNGPATVCGPKLSTTLVKDKCVNFNFNGLTGTGVLTTSKKQFLPFQQFGRDISDTTDAVRDPQTLEILDITPCSFGGVSVITPGTNTSNQVAVLYQDVNCTEVPMAIHAEQLTPAWRVYSAGANVFQTRAGCLVGAEHVNNSYECDIPVGAGICASYHSMSSFRSVNQRSIIAYTMSLGAENSVAYSNNSIAIPTNFTISVTTEILPVSMTKTSVDCTMYICGDSIECSNLLLQYGSFCTQLNRALTGIAVEQDKNTQEVFAQVKQIYKTPPIKDFGGFNFSQILPDPSKPSKRSFIEDLLFNKVTLADAGFIKQYGDCLGDIAARDLICAQKFNGLTVLPPLLTDEMIAQYTSALLAGTITSGWTFGAGAALQIPFAMQMAYRFNGCGVTQNVLYENQKLIANQFNSAIGKIQDSLSSTASALGKLQDVVNQNAQALNTLVKQLSSNFGAISSVLNDILSRLDKVEAEVQIDRLITGRLQSLQTYVTQQLIRAAEIRASANLAATKMSECVLGQSKRVDFCGKGCHLMSFPQSAPHGVVFLHVTYVPAQEKNFTTAPAICHEGKAHFPREGVFVSNGTHWFITQRNFYEPQIITTDNTFVSGSCDVVIGIVNNTVYDPLQPELDSGGGSGGGQIYEGKLTAEGLRFGIVASRFNHALVDRLVEGAIDAIVRHGGREEDITLVRVPGSWEIPVAAGELARKEDIDAVIAIGVLIRGATPHFDYIASEVSKGLADLSLELRKPITFGVITADTLEQAIERAGTKHGNKGWEAALSAIEMANLFKSLR

SEQ ID NO: 8313 - protein, 1299 aa, Artificial Sequence
  SARS-CoV-2/pangolin/Guangxi/P1E/2017__EPI_ISL_410539 spike protein (1-1139)(I901C_Y1039C) LumSynth construct
MFVFLFVLPLVSSQCVNLTTRTGIQPGYTNSSTRGVYYPDKVFRSSILHLTQDLFLPFFSNVTWFNTINYQGGFKKFDNPVLPFNDGVYFASTEKSNIIRGWIFGTTLDARTQSLLIVNNATNVVIKVCEFQFCTDPFLGVYYHNNNKTWVENEFRVYSSANNCTFEYISQPFLMDLEGKQGNFKNLREFVFKNVDGYFKIYSKHTPIDLVRDLPRGFAALEPLVDLPIGINITRFQTLLALHRSYLTPGKLESGWTTGAAAYYVGYLQQRTFLLSYNQNGTITDAVDCSLDPLSETKCTLKSLTVEKGIYQTSNFRVQPTISIVRFPNITNLCPFGEVFNASKFASVYAWNRKRISNCVADYSVLYNSTSFSTFKCYGVSPTKLNDLCFTNVYADSFVVKGDEVRQIAPGQTGVIADYNYKLPDDFTGCVIAWNSVKQDALTGGNYLYRLFRKSKLKPFERDISTEIYQAGSTPCNGQVGLNCYYPLERYGFHPTTGVNYQPFRVVVLSFELLNGPATVCGPKLSTTLVKDKCVNFNFNGLTGTGVLTTSKKQFLPFQQFGRDISDTTDAVRDPQTLEILDITPCSFGGVSVITPGTNTSNQVAVLYQDVNCTEVPMAIHAEQLTPAWRVYSAGANVFQTRAGCLVGAEHVNNSYECDIPVGAGICASYHSMSSLRSVNQRSIIAYTMSLGAENSVAYSNNSIAIPTNFTISVTTEILPVSMTKTSVDCTMYICGDSIECSNLLLQYGSFCTQLNRALTGIAVEQDKNTQEVFAQVKQIYKTPPIKDFGGFNFSQILPDPSKPSKRSFIEDLLFNKVTLADAGFIKQYGDCLGDIAARDLICAQKFNGLTVLPPLLTDEMIAQYTSALLAGTITSGWTFGAGAALQIPFAMQMAYRFNGCGVTQNVLYENQKLIANQFNSAIGKIQDSLSSTASALGKLQDVVNQNAQALNTLVKQLSSNFGAISSVLNDILSRLDKVEAEVQIDRLITGRLQSLQTYVTQQLIRAAEIRASANLAATKMSECVLGQSKRVDFCGKGCHLMSFPQSAPHGVVFLHVTYVPAQEKNFTTAPAICHEGKAHFPREGVFVSNGTHWFITQRNFYEPQIITTDNTFVSGSCDVVIGIVNNTVYDPLQPELDSGGGSGGGQIYEGKLTAEGLRFGIVASRFNHALVDRLVEGAIDAIVRHGGREEDITLVRVPGSWEIPVAAGELARKEDIDAVIAIGVLIRGATPHFDYIASEVSKGLADLSLELRKPITFGVITADTLEQAIERAGTKHGNKGWEAALSAIEMANLFKSLR

SEQ ID NO: 8314 - protein, 1307 aa, Artificial Sequence
  SARS-CoV-2/Wuhan/WIV05/2019__EPI_ISL_402128 spike protein (1-1147)(Q965C_S1003C) LumSynth construct
MFVFLVLLPLVSSQCVNLTTRTQLPPAYTNSFTRGVYYPDKVFRSSVLHSTQDLFLPFFSNVTWFHAIHVSGTNGTKRFDNPVLPFNDGVYFASTEKSNIIRGWIFGTTLDSKTQSLLIVNNATNVVIKVCEFQFCNDPFLGVYYHKNNKSWMESEFRVYSSANNCTFEYVSQPFLMDLEGKQGNFKNLREFVFKNIDGYFKIYSKHTPINLVRDLPQGFSALEPLVDLPIGINITRFQTLLALHRSYLTPGDSSSGWTAGAAAYYVGYLQPRTFLLKYNENGTITDAVDCALDPLSETKCTLKSFTVEKGIYQTSNFRVQPTESIVRFPNITNLCPFGEVFNATRFASVYAWNRKRISNCVADYSVLYNSASFSTFKCYGVSPTKLNDLCFTNVYADSFVIRGDEVRQIAPGQTGKIADYNYKLPDDFTGCVIAWNSNNLDSKVGGNYNYLYRLFRKSNLKPFERDISTEIYQAGSTPCNGVEGFNCYFPLQSYGFQPTNGVGYQPYRVVVLSFELLHAPATVCGPKKSTNLVKNKCVNFNFNGLTGTGVLTESNKKFLPFQQFGRDIADTTDAVRDPQTLEILDITPCSFGGVSVITPGTNTSNQVAVLYQDVNCTEVPVAIHADQLTPTWRVYSTGSNVFQTRAGCLIGAEHVNNSYECDIPIGAGICASYQTQTNSPRRARSVASQSIIAYTMSLGAENSVAYSNNSIAIPTNFTISVTTEILPVSMTKTSVDCTMYICGDSTECSNLLLQYGSFCTQLNRALTGIAVEQDKNTQEVFAQVKQIYKTPPIKDFGGFNFSQILPDPSKPSKRSFIEDLLFNKVTLADAGFIKQYGDCLGDIAARDLICAQKFNGLTVLPPLLTDEMIAQYTSALLAGTITSGWTFGAGAALQIPFAMQMAYRFNGIGVTQNVLYENQKLIANQFNSAIGKIQDSLSSTASALGKLQDVVNQNAQALNTLVKCLSSNFGAISSVLNDILSRLDKVEAEVQIDRLITGRLQCLQTYVTQQLIRAAEIRASANLAATKMSECVLGQSKRVDFCGKGYHLMSFPQSAPHGVVFLHVTYVPAQEKNFTTAPAICHDGKAHFPREGVFVSNGTHWFVTQRNFYEPQIITTDNTFVSGNCDVVIGIVNNTVYDPLQPELDSGGGSGGGQIYEGKLTAEGLRFGIVASRFNHALVDRLVEGAIDAIVRHGGREEDITLVRVPGSWEIPVAAGELARKEDIDAVIAIGVLIRGATPHFDYIASEVSKGLADLSLELRKPITFGVITADTLEQAIERAGTKHGNKGWEAALSAIEMANLFKSLR

SEQ ID NO: 8315 - protein, 1303 aa, Artificial Sequence
  SARS-CoV-2/bat/Yunnan/RaTG13/2013__EPI_ISL_402131 spike protein (1-1143)(Q961C_S999C) LumSynth construct
MFVFLVLLPLVSSQCVNLTTRTQLPPAYTNSSTRGVYYPDKVFRSSVLHLTQDLFLPFFSNVTWFHAIHVSGTNGIKRFDNPVLPFNDGVYFASTEKSNIIRGWIFGTTLDSKTQSLLIVNNATNVVIKVCEFQFCNDPFLGVYYHKNNKSWMESEFRVYSSANNCTFEYVSQPFLMDLEGKQGNFKNLREFVFKNIDGYFKIYSKHTPINLVRDLPPGFSALEPLVDLPIGINITRFQTLLALHRSYLTPGDSSSGWTAGAAAYYVGYLQPRTFLLKYNENGTITDAVDCALDPLSETKCTLKSFTVEKGIYQTSNFRVQPTDSIVRFPNITNLCPFGEVFNATTFASVYAWNRKRISNCVADYSVLYNSTSFSTFKCYGVSPTKLNDLCFTNVYADSFVITGDEVRQIAPGQTGKIADYNYKLPDDFTGCVIAWNSKHIDAKEGGNFNYLYRLFRKANLKPFERDISTEIYQAGSKPCNGQTGLNCYYPLYRYGFYPTDGVGHQPYRVVVLSFELLNAPATVCGPKKSTNLVKNKCVNFNFNGLTGTGVLTESNKKFLPFQQFGRDIADTTDAVRDPQTLEILDITPCSFGGVSVITPGTNASNQVAVLYQDVNCTEVPVAIHADQLTPTWRVYSTGSNVFQTRAGCLIGAEHVNNSYECDIPIGAGICASYQTQTNSRSVASQSIIAYTMSLGAENSVAYSNNSIAIPTNFTISVTTEILPVSMTKTSVDCTMYICGDSTECSNLLLQYGSFCTQLNRALTGIAVEQDKNTQEVFAQVKQIYKTPPIKDFGGFNFSQILPDPSKPSKRSFIEDLLFNKVTLADAGFIKQYGDCLGDIAARDLICAQKFNGLTVLPPLLTDEMIAQYTSALLAGTITSGWTFGAGAALQIPFAMQMAYRFNGIGVTQNVLYENQKLIANQFNSAIGKIQDSLSSTASALGKLQDVVNQNAQALNTLVKCLSSNFGAISSVLNDILSRLDKVEAEVQIDRLITGRLQCLQTYVTQQLIRAAEIRASANLAATKMSECVLGQSKRVDFCGKGYHLMSFPQSAPHGVVFLHVTYVPAQEKNFTTAPAICHDGKAHFPREGVFVSNGTHWFVTQRNFYEPQIITTDNTFVSGSCDVVIGIVNNTVYDPLQPELDSGGGSGGGQIYEGKLTAEGLRFGIVASRFNHALVDRLVEGAIDAIVRHGGREEDITLVRVPGSWEIPVAAGELARKEDIDAVIAIGVLIRGATPHFDYIASEVSKGLADLSLELRKPITFGVITADTLEQAIERAGTKHGNKGWEAALSAIEMANLFKSLR

SEQ ID NO: 8316 - protein, 1307 aa, Artificial Sequence
  SARS-CoV-2/Wuhan/HBCDC-HB-01/2019__EPI_ISL_402132 spike protein (1-1147)(Q965C_S1003C) LumSynth construct
MFVFLVLLPLVSSQCVNLTTRTQLPPAYTNSITRGVYYPDKVFRSSVLHSTQDLFLPFFSNVTWFHAIHVSGTNGTKRFDNPVLPFNDGVYFASTEKSNIIRGWIFGTTLDSKTQSLLIVNNATNVVIKVCEFQFCNDPFLGVYYHKNNKSWMESEFRVYSSANNCTFEYVSQPFLMDLEGKQGNFKNLREFVFKNIDGYFKIYSKHTPINLVRDLPQGFSALEPLVDLPIGINITRFQTLLALHRSYLTPGDSSSGWTAGAAAYYVGYLQPRTFLLKYNENGTITDAVDCALDPLSETKCTLKSFTVEKGIYQTSNFRVQPTESIVRFPNITNLCPFGEVFNATRFASVYAWNRKRISNCVADYSVLYNSASFSTFKCYGVSPTKLNDLCFTNVYADSFVIRGDEVRQIAPGQTGKIADYNYKLPDDFTGCVIAWNSNNLDSKVGGNYNYLYRLFRKSNLKPFERDISTEIYQAGSTPCNGVEGFNCYFPLQSYGFQPTNGVGYQPYRVVVLSFELLHAPATVCGPKKSTNLVKNKCVNFNFNGLTGTGVLTESNKKFLPFQQFGRDIADTTDAVRDPQTLEILDITPCSFGGVSVITPGTNTSNQVAVLYQDVNCTEVPVAIHADQLTPTWRVYSTGSNVFQTRAGCLIGAEHVNNSYECDIPIGAGICASYQTQTNSPRRARSVASQSIIAYTMSLGAENSVAYSNNSIAIPTNFTISVTTEILPVSMTKTSVDCTMYICGDSTECSNLLLQYGSFCTQLNRALTGIAVEQDKNTQEVFAQVKQIYKTPPIKDFGGFNFSQILPDPSKPSKRSFIEDLLFNKVTLADAGFIKQYGDCLGDIAARDLICAQKFNGLTVLPPLLTDEMIAQYTSALLAGTITSGWTFGAGAALQIPFAMQMAYRFNGIGVTQNVLYENQKLIANQFNSAIGKIQDSLSSTASALGKLQDVVNQNAQALNTLVKCLSSNFGAISSVLNDILSRLDKVEAEVQIDRLITGRLQCLQTYVTQQLIRAAEIRASANLAATKMSECVLGQSKRVDFCGKGYHLMSFPQSAPHGVVFLHVTYVPAQEKNFTTAPAICHDGKAHFPREGVFVSNGTHWFVTQRNFYEPQIITTDNTFVSGNCDVVIGIVNNTVYDPLQPELDSGGGSGGGQIYEGKLTAEGLRFGIVASRFNHALVDRLVEGAIDAIVRHGGREEDITLVRVPGSWEIPVAAGELARKEDIDAVIAIGVLIRGATPHFDYIASEVSKGLADLSLELRKPITFGVITADTLEQAIERAGTKHGNKGWEAALSAIEMANLFKSLR

SEQ ID NO: 8317 - protein, 1307 aa, Artificial Sequence
  SARS-CoV-2/Guangdong/20SF028/2020__EPI_ISL_403936 spike protein (1-1147)(Q965C_S1003C) LumSynth construct
MFVFLVLLPLVSSQCVNLTTRTQLPPAYTNSFTRGVYYPDKVFRSSVLYSTQDLFLPFFSNVTWFHAIHVSGTNGTKRFDNPVLPFNDGVYFASTEKSNIIRGWIFGTTLDSKTQSLLIVNNATNVVIKVCEFQFCNDPFLGVYYHKNNKSWMESEFRVYSSANNCTFEYVSQPFLMDLEGKQGNFKNLREFVFKNIDGYFKIYSKHTPINLVRDLPQGFSALEPLVDLPIGINITRFQTLLALHRSYLTPGDSSSGWTAGAAAYYVGYLQPRTFLLKYNENGTITDAVDCALDPLSETKCTLKSFTVEKGIYQTSNFRVQPTESIVRFPNITNLCPFGEVFNATRFASVYAWNRKRISNCVADYSVLYNSASFSTFKCYGVSPTKLNDLCFTNVYADSFVIRGDEVRQIAPGQTGKIADYNYKLPDDFTGCVIAWNSNNLDSKVGGNYNYLYRLFRKSNLKPFERDISTEIYQAGSTPCNGVEGFNCYFPLQSYGFQPTNGVGYQPYRVVVLSFELLHAPATVCGPKKSTNLVKNKCVNFNFNGLTGTGVLTESNKKFLPFQQFGRDIADTTDAVRDPQTLEILDITPCSFGGVSVITPGTNTSNQVAVLYQDVNCTEVPVAIHADQLTPTWRVYSTGSNVFQTRAGCLIGAEHVNNSYECDIPIGAGICASYQTQTNSPRRARSVASQSIIAYTMSLGAENSVAYSNNSIAIPTNFTISVTTEILPVSMTKTSVDCTMYICGDSTECSNLLLQYGSFCTQLNRALTGIAVEQDKNTQEVFAQVKQIYKTPPIKDFGGFNFSQILPDPSKPSKRSFIEDLLFNKVTLADAGFIKQYGDCLGDIAARDLICAQKFNGLTVLPPLLTDEMIAQYTSALLAGTITSGWTFGAGAALQIPFAMQMAYRFNGIGVTQNVLYENQKLIANQFNSAIGKIQDSLSSTASALGKLQDVVNQNAQALNTLVKCLSSNFGAISSVLNDILSRLDKVEAEVQIDRLITGRLQCLQTYVTQQLIRAAEIRASANLAATKMSECVLGQSKRVDFCGKGYHLMSFPQSAPHGVVFLHVTYVPAQEKNFTTAPAICHDGKAHFPREGVFVSNGTHWFVTQRNFYEPQIITTDNTFVSGNCDVVIGIVNNTVYDPLQPELDSGGGSGGGQIYEGKLTAEGLRFGIVASRFNHALVDRLVEGAIDAIVRHGGREEDITLVRVPGSWEIPVAAGELARKEDIDAVIAIGVLIRGATPHFDYIASEVSKGLADLSLELRKPITFGVITADTLEQAIERAGTKHGNKGWEAALSAIEMANLFKSLR

SEQ ID NO: 8318 - protein, 1307 aa, Artificial Sequence
  SARS-CoV-2/Shenzhen/SZTH-001/2020__EPI_ISL_406592 spike protein (1-1147)(Q965C_S1003C) LumSynth construct
MFVFLVLLPLVSSQCVNLTTRTQLPPAYTNSFTRGVYYPDKVFRSSVLHSTQDLFLPFFSNVTWFHAIHVSGTNGTKRFDNPVLPFNDGVYFASTEKSNIIRGWIFGTTLDSKTQSLLIVNNATNVVIKVCEFQFCNDPFLGVYYHKNNKSWMESEFRVYSSANNCTFEYVSQPFLMDLEGKQGNFKNLREFVFKNIDGYFKIYSKHTPINLVRDLPQGFSALEPLVDLPIGINITRFQTLLALHRSYLTPGDSSSGWTAGAAAYYVGYLQPRTFLLKYNENGTITDAVDCALDPLSETKCTLKSFTVEKGIYQTSNFRVQPTESIVRFPNITNLCPFGEVFNATRFASVYAWNRKRISNCVADYSVLYNSASFSTFKCYGVSPTKLNDLCFTNVYADSFVIRGDEVRQIAPGQTGKIADYNYKLPDDFTGCVIAWNSNNLDSKVGGNYNYLYRLFRKSNLKPFERDISTEIYQAGSTPCNGVEGFNCYFPLQSYGFQPTNGVGYQPYRVVVLSFELLHAPATVCGPKKSTNLVKNKCVNFNFNGLTGTGVLTESNKKFLPFQQFGRDIADTTDAVRDPQTLEILDITPCSFGGVSVITPGTNTSNQVAVLYQDVNCTEVPVAIHADQLTPTWRVYSTGSNVFQTRAGCLIGAEHVNNSYECDIPIGAGICASYQTQTNSPRRARSVASQSIIAYTMSLGAENSVAYSNNSIAIPTNFTISVTTEILPVSMTKTSVDCTMYICGDSTECSNLLLQYGSFCTQLNRALTGIAVEQDKNTQEVFAQVKQIYKTPPIKDFGGFNFSQILPDPSKPSKRSFIEDLLFNKVTLADAGFIKQYGDCLGDIAARDLICAQKFNGLTVLPPLLTDEMIAQYTSALLAGTITSGWTFGAGAALQIPFAMQMAYRFNGIGVTQNVLYENQKLIANQFNSAIGKIQDSLSSTASALGKLQDVVNQNAQALNTLVKCLSSNFGAISSVLNDILSRLDKVEAEVQIDRLITGRLQCLQTYVTQQLIRAAEIRASANLAATKMSECVLGQSKRVDFCGKGYHLMSFPQSAPHGVVFLHVTYVPAQEKNFTTAPAICHDGKAHFPREGVFVSNGTHWFVTQRNFYEPQIITTDNTFVSGNCDVLIGIVNNTVYDPLQPELDSGGGSGGGQIYEGKLTAEGLRFGIVASRFNHALVDRLVEGAIDAIVRHGGREEDITLVRVPGSWEIPVAAGELARKEDIDAVIAIGVLIRGATPHFDYIASEVSKGLADLSLELRKPITFGVITADTLEQAIERAGTKHGNKGWEAALSAIEMANLFKSLR

SEQ ID NO: 8319 - protein, 1307 aa, Artificial Sequence
  SARS-CoV-2/Shenzhen/SZTH-004/2020__EPI_ISL_406595 spike protein (1-1147)(Q965C_S1003C) LumSynth construct
MFVFLVLLPLVSSQCVNLTTRTQLPPAYTNSFTRGVYYPDKVFRSSVLHSTQDLFLPFFSNVTWFHAIHVSGTNGTKRFDNPVLPFNDGVYFASTEKSNIIRGWIFGTTLDSKTQSLLIVNNATNVVIKVCEFQFCNDPFLGVYYHKNNKSWMESEFRVYSSANNCTFEYVSQPFLMDLEGKQGNFKNLREFVFKNIDGYFKIYSKHTPINLVRDLPQGFSALEPLVDLPIGINITRFQTLLALHRSYLTPGDSSSGWTAGAAAYYVGYLQPRTFLLKYNENGTITDAVDCALDPLSETKCTLKSFTVEKGIYQTSNFRVQPTESIVRFPNITNLCPFGEVFNATRFASVYAWDRKRISNCVAYYSVLYNSASFSTFKCYGVSPTKLNDLCFTNVYADSFVIRGDEVRQIAPGQTGKIADYNYKLPDDFTGCVIAWNSNNLDSKVGGNYNYLYRLFRKSNLKPFERDISTEIYQAGSTPCNGVEGFNCYFPLQSYGFQPTNGVGYQPYRVVVLSFELLHAPATVCGPKKSTNLVKNKCVNFNFNGLTGTGVLTESNKKFLPFQQFGRDIADTTDAVRDPQTLEILDITPCSFGGVSVITPGTNTSNQVAVLYQDVNCTEVPVAIHADQLTPTWRVYSTGSNVFQTRAGCLIGAEHVNNSYECDIPIGAGICASYQTQTNSPRRARSVASQSIIAYTMSLGAENSVAYSNNSIAIPTNFTISVTTEILPVSMTKTSVDCTMYICGDSTECSNLLLQYGSFCTQLNRALTGIAVEQDKNTQEVFAQVKQIYKTPPIKDFGGFNFSQILPDPSKPSKRSFIEDLLFNKVTLADAGFIKQYGDCLGDIAARDLICAQKFNGLTVLPPLLTDEMIAQYTSALLAGTITSGWTFGAGAALQIPFAMQMAYRFNGIGVTQNVLYENQKLIANQFNSAIGKIQDSLSSTASALGKLQDVVNQNAQALNTLVKCLSSNFGAISSVLNDILSRLDKVEAEVQIDRLITGRLQCLQTYVTQQLIRAAEIRASANLAATKMSECVLGQSKRVDFCGKGYHLMSFPQSAPHGVVFLHVTYVPAQEKNFTTAPAICHDGKAHFPREGVFVSNGTHWFVTQRNFYEPQIITTDNTFVSGNCDVVIGIVNNTVYDPLQPELDSGGGSGGGQIYEGKLTAEGLRFGIVASRFNHALVDRLVEGAIDAIVRHGGREEDITLVRVPGSWEIPVAAGELARKEDIDAVIAIGVLIRGATPHFDYIASEVSKGLADLSLELRKPITFGVITADTLEQAIERAGTKHGNKGWEAALSAIEMANLFKSLR

SEQ ID NO: 8320 - protein, 1307 aa, Artificial Sequence
  SARS-CoV-2/France/IDF0372/2020__EPI_ISL_406596 spike protein (1-1147)(Q965C_S1003C) LumSynth construct
MFVFLVLLPLVSSQCVNLTTRTQLPPAYTNSFTRGVYYPDKVFRSSVLHSTQDLFLPFFSNVTWFHAIHVSGTNGTKRFDNPVLPFNDGVYFASTEKSNIIRGWIFGTTLDSKTQSLLIVNNATNVVIKVCEFQFCNDPFLGVYYHKNNKSWMESEFRVYSSANNCTFEYVSQPFLMDLEGKQGNFKNLREFVFKNIDGYFKIYSKHTPINLVRDLPQGFSALEPLVDLPIGINITRFQTLLALHRSYLTPGDSSSGWTAGAAAYYVGYLQPRTFLLKYNENGTITDAVDCALDPLSETKCTLKSFTVEKGIYQTSNFRVQPTESIVRFPNITNLCPFGEVFNATRFASVYAWNRKRISNCVADYSFLYNSASFSTFKCYGVSPTKLNDLCFTNVYADSFVIRGDEVRQIAPGQTGKIADYNYKLPDDFTGCVIAWNSNNLDSKVGGNYNYLYRLFRKSNLKPFERDISTEIYQAGSTPCNGVEGFNCYFPLQSYGFQPTNGVGYQPYRVVVLSFELLHAPATVCGPKKSTNLVKNKCVNFNFNGLTGTGVLTESNKKFLPFQQFGRDIADTTDAVRDPQTLEILDITPCSFGGVSVITPGTNTSNQVAVLYQDVNCTEVPVAIHADQLTPTWRVYSTGSNVFQTRAGCLIGAEHVNNSYECDIPIGAGICASYQTQTNSPRRARSVASQSIIAYTMSLGAENSVAYSNNSIAIPTNFTISVTTEILPVSMTKTSVDCTMYICGDSTECSNLLLQYGSFCTQLNRALTGIAVEQDKNTQEVFAQVKQIYKTPPIKDFGGFNFSQILPDPSKPSKRSFIEDLLFNKVTLADAGFIKQYGDCLGDIAARDLICAQKFNGLTVLPPLLTDEMIAQYTSALLAGTITSGWTFGAGAALQIPFAMQMAYRFNGIGVTQNVLYENQKLIANQFNSAIGKIQDSLSSTASALGKLQDVVNQNAQALNTLVKCLSSNFGAISSVLNDILSRLDKVEAEVQIDRLITGRLQCLQTYVTQQLIRAAEIRASANLAATKMSECVLGQSKRVDFCGKGYHLMSFPQSAPHGVVFLHVTYVPAQEKNFTTAPAICHDGKAHFPREGVFVSNGTHWFVTQRNFYEPQIITTDNTFVSGNCDVVIGIVNNTVYDPLQPELDSGGGSGGGQIYEGKLTAEGLRFGIVASRFNHALVDRLVEGAIDAIVRHGGREEDITLVRVPGSWEIPVAAGELARKEDIDAVIAIGVLIRGATPHFDYIASEVSKGLADLSLELRKPITFGVITADTLEQAIERAGTKHGNKGWEAALSAIEMANLFKSLR

SEQ ID NO: 8321 - protein, 1307 aa, Artificial Sequence
  SARS-CoV-2/Australia/VIC01/2020__EPI_ISL_406844 spike protein (1-1147)(Q965C_S1003C) LumSynth construct
MFVFLVLLPLVSSQCVNLTTRTQLPPAYTNSFTRGVYYPDKVFRSSVLHSTQDLFLPFFSNVTWFHAIHVSGTNGTKRFDNPVLPFNDGVYFASTEKSNIIRGWIFGTTLDSKTQSLLIVNNATNVVIKVCEFQFCNDPFLGVYYHKNNKSWMESEFRVYSSANNCTFEYVSQPFLMDLEGKQGNFKNLREFVFKNIDGYFKIYSKHTPINLVRDLPQGFSALEPLVDLPIGINITRFQTLLALHRRYLTPGDSSSGWTAGAAAYYVGYLQPRTFLLKYNENGTITDAVDCALDPLSETKCTLKSFTVEKGIYQTSNFRVQPTESIVRFPNITNLCPFGEVFNATRFASVYAWNRKRISNCVADYSVLYNSASFSTFKCYGVSPTKLNDLCFTNVYADSFVIRGDEVRQIAPGQTGKIADYNYKLPDDFTGCVIAWNSNNLDSKVGGNYNYLYRLFRKSNLKPFERDISTEIYQAGSTPCNGVEGFNCYFPLQSYGFQPTNGVGYQPYRVVVLSFELLHAPATVCGPKKSTNLVKNKCVNFNFNGLTGTGVLTESNKKFLPFQQFGRDIADTTDAVRDPQTLEILDITPCSFGGVSVITPGTNTSNQVAVLYQDVNCTEVPVAIHADQLTPTWRVYSTGSNVFQTRAGCLIGAEHVNNSYECDIPIGAGICASYQTQTNSPRRARSVASQSIIAYTMSLGAENSVAYSNNSIAIPTNFTISVTTEILPVSMTKTSVDCTMYICGDSTECSNLLLQYGSFCTQLNRALTGIAVEQDKNTQEVFAQVKQIYKTPPIKDFGGFNFSQILPDPSKPSKRSFIEDLLFNKVTLADAGFIKQYGDCLGDIAARDLICAQKFNGLTVLPPLLTDEMIAQYTSALLAGTITSGWTFGAGAALQIPFAMQMAYRFNGIGVTQNVLYENQKLIANQFNSAIGKIQDSLSSTASALGKLQDVVNQNAQALNTLVKCLSSNFGAISSVLNDILSRLDKVEAEVQIDRLITGRLQCLQTYVTQQLIRAAEIRASANLAATKMSECVLGQSKRVDFCGKGYHLMSFPQSAPHGVVFLHVTYVPAQEKNFTTAPAICHDGKAHFPREGVFVSNGTHWFVTQRNFYEPQIITTDNTFVSGNCDVVIGIVNNTVYDPLQPELDSGGGSGGGQIYEGKLTAEGLRFGIVASRFNHALVDRLVEGAIDAIVRHGGREEDITLVRVPGSWEIPVAAGELARKEDIDAVIAIGVLIRGATPHFDYIASEVSKGLADLSLELRKPITFGVITADTLEQAIERAGTKHGNKGWEAALSAIEMANLFKSLR

SEQ ID NO: 8322 - protein, 1307 aa, Artificial Sequence
  SARS-CoV-2/Germany/BavPat1/2020__EPI_ISL_406862 spike protein (1-1147)(Q965C_S1003C) LumSynth construct
MFVFLVLLPLVSSQCVNLTTRTQLPPAYTNSFTRGVYYPDKVFRSSVLHSTQDLFLPFFSNVTWFHAIHVSGTNGTKRFDNPVLPFNDGVYFASTEKSNIIRGWIFGTTLDSKTQSLLIVNNATNVVIKVCEFQFCNDPFLGVYYHKNNKSWMESEFRVYSSANNCTFEYVSQPFLMDLEGKQGNFKNLREFVFKNIDGYFKIYSKHTPINLVRDLPQGFSALEPLVDLPIGINITRFQTLLALHRSYLTPGDSSSGWTAGAAAYYVGYLQPRTFLLKYNENGTITDAVDCALDPLSETKCTLKSFTVEKGIYQTSNFRVQPTESIVRFPNITNLCPFGEVFNATRFASVYAWNRKRISNCVADYSVLYNSASFSTFKCYGVSPTKLNDLCFTNVYADSFVIRGDEVRQIAPGQTGKIADYNYKLPDDFTGCVIAWNSNNLDSKVGGNYNYLYRLFRKSNLKPFERDISTEIYQAGSTPCNGVEGFNCYFPLQSYGFQPTNGVGYQPYRVVVLSFELLHAPATVCGPKKSTNLVKNKCVNFNFNGLTGTGVLTESNKKFLPFQQFGRDIADTTDAVRDPQTLEILDITPCSFGGVSVITPGTNTSNQVAVLYQGVNCTEVPVAIHADQLTPTWRVYSTGSNVFQTRAGCLIGAEHVNNSYECDIPIGAGICASYQTQTNSPRRARSVASQSIIAYTMSLGAENSVAYSNNSIAIPTNFTISVTTEILPVSMTKTSVDCTMYICGDSTECSNLLLQYGSFCTQLNRALTGIAVEQDKNTQEVFAQVKQIYKTPPIKDFGGFNFSQILPDPSKPSKRSFIEDLLFNKVTLADAGFIKQYGDCLGDIAARDLICAQKFNGLTVLPPLLTDEMIAQYTSALLAGTITSGWTFGAGAALQIPFAMQMAYRFNGIGVTQNVLYENQKLIANQFNSAIGKIQDSLSSTASALGKLQDVVNQNAQALNTLVKCLSSNFGAISSVLNDILSRLDKVEAEVQIDRLITGRLQCLQTYVTQQLIRAAEIRASANLAATKMSECVLGQSKRVDFCGKGYHLMSFPQSAPHGVVFLHVTYVPAQEKNFTTAPAICHDGKAHFPREGVFVSNGTHWFVTQRNFYEPQIITTDNTFVSGNCDVVIGIVNNTVYDPLQPELDSGGGSGGGQIYEGKLTAEGLRFGIVASRFNHALVDRLVEGAIDAIVRHGGREEDITLVRVPGSWEIPVAAGELARKEDIDAVIAIGVLIRGATPHFDYIASEVSKGLADLSLELRKPITFGVITADTLEQAIERAGTKHGNKGWEAALSAIEMANLFKSLR

SEQ ID NO: 8323 - protein, 1307 aa, Artificial Sequence
  SARS-CoV-2/Wuhan/HBCDC-HB-02/2020__EPI_ISL_412978 spike protein (1-1147)(Q965C_S1003C) LumSynth construct
MFVFLVLLPLVSSQCVNLTTRTQLPPAYTNSFTRGVYYPDKVFRSSVLHSTQDLFLPFFSNVTWFHAIHVSGTNGTKRFDNPVLPFNDGVYFASTEKSNIIRGWIFGTTLDSKTQSLLIVNNATNVVIKVCEFQFCNDPFLGVYYHKNNKSWMESEFRVYSSANNCTFEYVSQPFLMDLEGKQGNFKNLREFVFKNIDGYFKIYSKHTPINLVRDLPQGFSALEPLVDLPIGINITRFQTLLALHRSYLTPGDSSSGWTAGAAAYYVGYLQPRTFLLKYNENGTITDAVDCALDPLSETKCTLKSFTVEKGIYQTSNFRVQPTESIVRFPNITNLCPFGEVFNATRFASVYAWNRKRISNCVADYSVLYNSASFSTFKCYGVSPTKLNDLCFTNVYADSFVIRGDEVRQIAPGQTGKIADYNYKLPDDFTGCVIAWNSNNLDSKVGGNYNYLYRLFRKSNLKPFERDISTEIYQAGSTPCNGVEGFNCYFPLQSYGFQPTNGVGYQPYRVVVLSFELLHAPATVCGPKKSTNLVKNKCVNFNFNGLTGTGVLTESNKKFLPFQQFGRDIADTTDAVRDPQTLEILDITPCSFGGVSVITPGTNTSNQVAVLYQDVNCTEVPVAIHADQLTPTWRVYSTGSNVFQTRAGCLIGAEHVNNSYECDIPIGAGICASYQTQTNSPRRARSVASQSIIAYTMSLGAENSVAYSNNSIAIPTNFTISVTTEILPVSMTKTSVDCTMYICGDSTECSNFLLQYGSFCTQLNRALTGIAVEQDKNTQEVFAQVKQIYKTPPIKDFGGFNFSQILPDPSKPSKRSFIEDLLFNKVTLADAGFIKQYGDCLGDIAARDLICAQKFNGLTVLPPLLTDEMIAQYTSALLAGTITSGWTFGAGAALQIPFAMQMAYRFNGIGVTQNVLYENQKLIANQFNSAIGKIQDSLSSTASALGKLQDVVNQNAQALNTLVKCLSSNFGAISSVLNDILSRLDKVEAEVQIDRLITGRLQCLQTYVTQQLIRAAEIRASANLAATKMSECVLGQSKRVDFCGKGYHLMSFPQSAPHGVVFLHVTYVPAQEKNFTTAPAICHDGKAHFPREGVFVSNGTHWFVTQRNFYEPQIITTDNTFVSGNCDVVIGIVNNTVYDPLQPELDSGGGSGGGQIYEGKLTAEGLRFGIVASRFNHALVDRLVEGAIDAIVRHGGREEDITLVRVPGSWEIPVAAGELARKEDIDAVIAIGVLIRGATPHFDYIASEVSKGLADLSLELRKPITFGVITADTLEQAIERAGTKHGNKGWEAALSAIEMANLFKSLR

SEQ ID NO: 8324 - protein, 1307 aa, Artificial Sequence
  SARS-CoV-2/Australia/QLD02/2020__EPI_ISL_407896 spike protein (1-1147)(Q965C_S1003C) LumSynth construct
MFVFLVLLPLVSSQCVNLTTRTQLPPAYTNSFTRGVYYPDKVFRSSVLHSTQDLFLPFFSNVTWFHAIHVSGTNGTKRFDNPVLPFNDGVYFASTEKSNIIRGWIFGTTLDSKTQSLLIVNNATNVVIKVCEFQFCNDPFLGVYYHKNNKSWMESEFRVYSSANNCTFEYVSQPFLMDLEGKQGNFKNLREFVFKNIDGYFKIYSKHTPINLVRDLPQGFSALEPLVDLPIGINITRFQTLLALHRSYLTPGDSSSGWTAGAAAYYVGYLQPRTFLLKYNENGTITDAVDCALDPLSETKCTLKSFTVEKGIYQTSNFRVQPTESIVRFPNITNLCPFGEVFNATRFASVYAWNRKRISNCVADYSVLYNSASFSTFKCYGVSPTKLNDLCFTNVYADSFVIRGDEVRQIAPGQTGKIADYNYKLPDDFTGCVIAWNSNNLDSKVGGNYNYLYRLFRKSNLKPFERDISTEIYQAGSTPCNGVEGFNCYFPLQSYGFQPTNGVGYQPYRVVVLSFELLHAPATVCGPKKSTNLVKNKCVNFNFNGLTGTGVLTESNKKFLPFQQFGRDIADTTDAVRDPQTLEILDITPCSFGGVSVITPGTNTSNQVAVLYQDVNCTEVPVAIHADQLTPTWRVYSTGSNVFQTRAGCLIGAEHVNNSYECDIPIGAGICASYQTQTNSPRRARSVASQSIIAYTMSLGAENSVAYSNNSIAIPTNFTISVTTEILPVSMTKTSVDCTMYICGDSTECSNLLLQYGSFCTQLNRALTGIAVEQDKNTQEVFAQVKQIYKTPPIKDFGGFNFSQILPDPSKPSKRSFIEDLLFNKVTLADAGFIKQYGDCLGDIAARDLICAQKFNGLTVLPPLLTDEMIAQYTSALLAGTITSGWTFGAGAALQIPFAMQMAYRFNGIGVTQNVLYENQKLIANQFNSAIGKIQDSLSSTASALGKLQDVVNQNAQALNTLVKCLSSNFGAISSVLNDILSRLDKVEAEVQIDRLITGRLQCLQTYVTQQLIRAAEIRASANLAATKMSECVLGQSKRVDFCGKGYHLMSFPQSAPHGVVFLHVTYVPAQEKNFTTAPAICHDGKAHFPREGVFVSNGTHWFVTQRNFYEPQIITTDNTFVSGNCDVVIGIVNNTVYDPLQLELDSGGGSGGGQIYEGKLTAEGLRFGIVASRFNHALVDRLVEGAIDAIVRHGGREEDITLVRVPGSWEIPVAAGELARKEDIDAVIAIGVLIRGATPHFDYIASEVSKGLADLSLELRKPITFGVITADTLEQAIERAGTKHGNKGWEAALSAIEMANLFKSLR

SEQ ID NO: 8325 - protein, 1307 aa, Artificial Sequence
  SARS-CoV-2/India/1-31/2020__EPI_ISL_413523 spike protein (1-1147)(Q965C_S1003C) LumSynth construct
MFVFLVLLPLVSSQCVNLTTRTQLPPAYTNSFTRGVYYPDKVFRSSVLHSTQDLFLPFFSNVTWFHAIHVSGTNGTKRFDNPVLPFNDGVYFASTEKSNIIRGWIFGTTLDSKTQSLLIVNNATNVVIKVCEFQFCNDPFLGVYYHKNNKSWMESEFRVYSSANNCTFEYVSQPFLMDLEGKQGNFKNLREFVFKNIDGYFKIYSKHTPINLVRDLPQGFSALEPLVDLPIGINITRFQTLLALHRSYLTPGDSSSGWTAGAAAYYVGYLQPRTFLLKYNENGTITDAVDCALDPLSETKCTLKSFTVEKGIYQTSNFRVQPTESIVRFPNITNLCPFGEVFNATRFASVYAWNRKRISNCVADYSVLYNSASFSTFKCYGVSPTKLNDLCFTNVYADSFVIRGDEVRQIAPGQTGKIADYNYKLPDDFTGCVIAWNSNNLDSKVGGNYNYLYRLFRKSNLKPFERDISTEIYQAGSTPCNGVEGFNCYFPLQSYGFQPTNGVGYQPYRVVVLSFELLHAPATVCGPKKSTNLVKNKCVNFNFNGLTGTGVLTESNKKFLPFQQFGRDIADTTDAVRDPQTLEILDITPCSFGGVSVITPGTNTSNQVAVLYQDVNCTEVPVAIHADQLTPTWRVYSTGSNVFQTRAGCLIGAEHVNNSYECDIPIGAGICASYQTQTNSPRRARSVASQSIIAYTMSLGAENSVAYSNNSIAIPTNFTISVTTEILPVSMTKTSVDCTMYICGDSTECSNLLLQYGSFCTQLNRALTGIAVEQDKNTQEVFAQVKQIYKTPPIKDFGGFNFSQILPDPSKPSKRSFIEDLLFNKVTLADAGFIKQYGDCLGDIAARDLICAQKFNGLTVLPPLLTDEMIAQYTSALLAGTITSGWTFGAGAALQIPFAMQMAYRFNGIGVTQNVLYENQKLIANQFNSVIGKIQDSLSSTASALGKLQDVVNQNAQALNTLVKCLSSNFGAISSVLNDILSRLDKVEAEVQIDRLITGRLQCLQTYVTQQLIRAAEIRASANLAATKMSECVLGQSKRVDFCGKGYHLMSFPQSAPHGVVFLHVTYVPAQEKNFTTAPAICHDGKAHFPREGVFVSNGTHWFVTQRNFYEPQIITTDNTFVSGNCDVVIGIVNNTVYDPLQPELDSGGGSGGGQIYEGKLTAEGLRFGIVASRFNHALVDRLVEGAIDAIVRHGGREEDITLVRVPGSWEIPVAAGELARKEDIDAVIAIGVLIRGATPHFDYIASEVSKGLADLSLELRKPITFGVITADTLEQAIERAGTKHGNKGWEAALSAIEMANLFKSLR

SEQ ID NO: 8326 - protein, 1307 aa, Artificial Sequence
  SARS-CoV-2/Guangdong/GD2020087-P0008/2020__EPI_ISL_413863 spike protein (1-1147)(Q965C_S1003C) LumSynth construct
MFVFLVLLPLVSSQCVNLTTRTQLPPAYTNSFTRGVYYPDKVFRSSVLHSTQDLFLPFFSNVTWFHAIHVSGTNGTKRFDNPVLPFNDGVYFASTEKSNIIRGWIFGTTLDSKTQSLLIVNNATNVVIKVCEFQFCNDPFLGVYYHKNNKSWMESEFRVYSSANNCTFEYVSQPFLMDLEGKQGNFKNLREFVFKNIDGYFKIYSKHTPINLVRDLPQGFSALEPLVDLPIGINITRFQTLLALHRSYLTPGDSSSGWTAGAAAYYVGYLQPRTFLLKYNENGTITDAVDCALDPLSETKCTLKSFTVEKGIYQTSNFRVQPTESIVRFPNITNLCPFGEVFNATRFASVYAWNRKRISNCVADYSVLYNSASFSTFKCYGVSPTKLNDLCFTNVYADSFVIRGDEVREIAPGQTGKIADYNYKLPDDFTGCVIAWNSNNLDSKVGGNYNYLYRLFRKSNLKPFERDISTEIYQAGSTPCNGVEGFNCYFPLQSYGFQPTNGVGYQPYRVVVLSFELLHAPATVCGPKKSTNLVKNKCVNFNFNGLTGTGVLTESNKKFLPFQQFGRDIADTTDAVRDPQTLEILDITPCSFGGVSVITPGTNTSNQVAVLYQDVNCTEVPVAIHADQLTPTWRVYSTGSNVFQTRAGCLIGAEHVNNSYECDIPIGAGICASYQTQTNSPRRARSVASQSIIAYTMSLGAENSVAYSNNSIAIPTNFTISVTTEILPVSMTKTSVDCTMYICGDSTECSNLLLQYGSFCTQLNRALTGIAVEQDKNTQEVFAQVKQIYKTPPIKDFGGFNFSQILPDPSKPSKRSFIEDLLFNKVTLADAGFIKQYGDCLGDIAARDLICAQKFNGLTVLPPLLTDEMIAQYTSALLAGTITSGWTFGAGAALQIPFAMQMAYRFNGIGVTQNVLYENQKLIANQFNSAIGKIQDSLSSTASALGKLQDVVNQNAQALNTLVKCLSSNFGAISSVLNDILSRLDKVEAEVQIDRLITGRLQCLQTYVTQQLIRAAEIRASANLAATKMSECVLGQSKRVDFCGKGYHLMSFPQSAPHGVVFLHVTYVPAQEKNFTTAPAICHDGKAHFPREGVFVSNGTHWFVTQRNFYEPQIITTDNTFVSGNCDVVIGIVNNTVYDPLQPELDSGGGSGGGQIYEGKLTAEGLRFGIVASRFNHALVDRLVEGAIDAIVRHGGREEDITLVRVPGSWEIPVAAGELARKEDIDAVIAIGVLIRGATPHFDYIASEVSKGLADLSLELRKPITFGVITADTLEQAIERAGTKHGNKGWEAALSAIEMANLFKSLR

SEQ ID NO: 8327 - protein, 1307 aa, Artificial Sequence
  SARS-CoV-2/Sweden/01/2020__EPI_ISL_411951 spike protein (1-1147)(Q965C_S1003C) LumSynth construct
MFVFLVLLPLVSSQCVNLTTRTQLPPAYTNSFTRGVYYPDKVFRSSVLHSTQDLFLPFFSNVTWFHAIHVSGTNGTKRFDNPVLPFNDGVYFASTEKSNIIRGWIFGTTLDSKTQSLLIVNNATNVVIKVCEFQFCNDPFLGVYYHKNNKSWMESEFRVYSSANNCTFEYVSQPFLMDLEGKQGNFKNLREFVFKNIDGYFKIYSKHTPINLVRDLPQGFSALEPLVDLPIGINITRFQTLLALHRSYLTPGDSSSGWTAGAAAYYVGYLQPRTFLLKYNENGTITDAVDCALDPLSETKCTLKSFTVEKGIYQTSNFRVQPTESIVRFPNITNLCPFGEVFNATRFASVYAWNRKRISNCVADYSVLYNSASFSTFKCYGVSPTKLNDLCFTNVYADSFVIRGDEVRQIAPGQTGKIADYNYKLPDDFTGCVIAWNSNNLDSKVGGNYNYLYRLFRKSNLKPFERDISTEIYQAGSTPCNGVEGFNCYFPLQSYGFQPTNGVGYQPYRVVVLSFELLHAPATVCGPKKSTNLVKNKCVNFNFNGLTGTGVLTESNKKFLPFQQFGRDIADTTDAVRDPQTLEILDITPCSFGGVSVITPGTNTSNQVAVLYQDVNCTEVPVAIHADQLTPTWRVYSTGSNVFQTRAGCLIGAEHVNNSYECDIPIGAGICASYQTQTNSPRRARSVASQSIIAYTMSLGAENSVAYSNNSIAIPTNFTISVTTEILPVSMTKTSVDCTMYICGDSTECSNLLLQYGSFCTQLNRALTGIAVEQDKNTQEVFAQVKQIYKTPPIKDCGGFNFSQILPDPSKPSKRSFIEDLLFNKVTLADAGFIKQYGDCLGDIAARDLICAQKFNGLTVLPPLLTDEMIAQYTSALLAGTITSGWTFGAGAALQIPFAMQMAYRFNGIGVTQNVLYENQKLIANQFNSAIGKIQDSLSSTASALGKLQDVVNQNAQALNTLVKCLSSNFGAISSVLNDILSRLDKVEAEVQIDRLITGRLQCLQTYVTQQLIRAAEIRASANLAATKMSECVLGQSKRVDFCGKGYHLMSFPQSAPHGVVFLHVTYVPAQEKNFTTAPAICHDGKAHFPREGVFVSNGTHWFVTQRNFYEPQIITTDNTFVSGNCDVVIGIVNNTVYDPLQPELDSGGGSGGGQIYEGKLTAEGLRFGIVASRFNHALVDRLVEGAIDAIVRHGGREEDITLVRVPGSWEIPVAAGELARKEDIDAVIAIGVLIRGATPHFDYIASEVSKGLADLSLELRKPITFGVITADTLEQAIERAGTKHGNKGWEAALSAIEMANLFKSLR

SEQ ID NO: 8328 - protein, 1307 aa, Artificial Sequence
  SARS-CoV-2/Tianmen/HBCDC-HB-07/2020__EPI_ISL_412983 spike protein (1-1147)(Q965C_S1003C) LumSynth construct
MFVFLVLLPLVSSQCVNLTTRTQLPPAYTNSFTRGVYYPDKVFRSSVLHSTQDLFLPFFSNVTWFHAIHVSGTNGTKRFDNPVLPFNDGVYFASTEKSNIIRGWIFGTTLDSKTQSLLIVNNATNVVIKVCEFQFCNDPFLGVYYHKNNKSWMESEFRVYSSANNCTFEYVSQPFLMDLEGKQGNFKNLREFVFKNIDGYFKIYSKHTPINLVRDLPQGFSALEPLVDLPIGINITRFQTLLALHRSYLTPGDSSSGWTAGAAAYYVGYLQPRTFLLKYNENGTITDAVDCALDPLSETKCTLKSFTVEKGIYQTSNFRVQPTESIVRFPNITNLCPFGEVFNATRFASVYAWNRKRISNCVADYSVLYNSASFSTFKCYGVSPTKLNDLCFTNVYADSFVIRGDEVRQIAPGQTGKIADYNYKLPDDFTGCVIAWNSNNLDSKVGGNYNYLYRLFRKSNLKPFERDISTEIYQAGSTPCNGVEGFNCYFPLQSYGFQPTNGVGYQPYRVVVLSFELLHAPATVCGPKKSTNLVKNKCVNFNFNGLTGTGVLTESNKKFLPFQQFGRDIADTTDAVRDPQTLEILDITPCSFGGVSVITPGTNTSNQVAVLYQDLNCTEVPVAIHADQLTPTWRVYSTGSNVFQTRAGCLIGAEHVNNSYECDIPIGAGICASYQTQTNSPRRARSVASQSIIAYTMSLGAENSVAYSNNSIAIPTNFTISVTTEILPVSMTKTSVDCTMYICGDSTECSNLLLQYGSFCTQLNRALTGIAVEQDKNTQEVFAQVKQIYKTPPIKDFGGFNFSQILPDPSKPSKRSFIEDLLFNKVTLADAGFIKQYGDCLGDIAARDLICAQKFNGLTVLPPLLTDEMIAQYTSALLAGTITSGWTFGAGAALQIPFAMQMAYRFNGIGVTQNVLYENQKLIANQFNSAIGKIQDSLSSTASALGKLQDVVNQNAQALNTLVKCLSSNFGAISSVLNDILSRLDKVEAEVQIDRLITGRLQCLQTYVTQQLIRAAEIRASANLAATKMSECVLGQSKRVDFCGKGYHLMSFPQSAPHGVVFLHVTYVPAQEKNFTTAPAICHDGKAHFPREGVFVSNGTHWFVTQRNFYEPQIITTDNTFVSGNCDVVIGIVNNTVYDPLQPELDSGGGSGGGQIYEGKLTAEGLRFGIVASRFNHALVDRLVEGAIDAIVRHGGREEDITLVRVPGSWEIPVAAGELARKEDIDAVIAIGVLIRGATPHFDYIASEVSKGLADLSLELRKPITFGVITADTLEQAIERAGTKHGNKGWEAALSAIEMANLFKSLR

SEQ ID NO: 8329 - protein, 1307 aa, Artificial Sequence
  SARS-CoV-2/Hong Kong/case42_VM20002493/2020__EPI_ISL_414527 spike protein (1-1147)(Q965C_S1003C) LumSynth construct
MFVFLVLLPLVSSQCVNLTTRTQLPPAYTNSFTRGVYYPDKVFRSSVLHSTQDLFLPFFSNVTWFHAIHVSGTNGTKRFDNPVLPFNDGVYFASTEKSNIIRGWIFGTTLDSKTQSLLIVNNATNVVIKVCEFQFCNDPFLGVYYHKNNKSWMESEFRVYSSANNCTFEYVSQPFLMDLEGKQGNFKNLREFVFKNIDGYFKIYSKHTPINLVRDLPQGFSALEPLVDLPIGINITRFQTLLALHRSYLTPGDSSSGWTAGAAAYYVGYLQPRTFLLKYNENGTITDAVDCALDPLSETKCTLKSFTVEKGIYQTSNFRVQPTESIVRFPNITNLCPFGEVFNATRFASVYAWNRKRISNCVADYSVLYNSASFSTFKCYGVSPTKLNDLCFTNVYADSFVIRGDEVRQIAPGQTGKIADYNYKLPDDFTGCVIAWNSNNLDSKVGGNYNYLYRLFRKSNLKPFERDISTEIYQAGSTPCNGVEGFNCYFPLQSYGFQPTNGVGYQPYRVVVLSFELLHAPATVCGPKKSTNLVKNKCVNFNFNGLTGTGVLTESNKKFLPFQQFGRDIADTTDAVRDPQTLEILDITPCSFGGVSVITPGTNTSNQVAVLYQDVNCTEVPVAIHADQLTPTWRVYSTGSNVFQTRAGCLIGAEHVNNSYECDIPIGAGICASYQTQTNSPRRARSVASQSIIAYTMSLGAENSVAYSNNSIAIPTNFAISVTTEILPVSMTKTSVDCTMYICGDSTECSNLLLQYGSFCTQLNRALTGIAVEQDKNTQEVFAQVKQIYKTPPIKDFGGFNFSQILPDPSKPSKRSFIEDLLFNKVTLADAGFIKQYGDCLGDIAARDLICAQKFNGLTVLPPLLTDEMIAQYTSALLAGTITSGWTFGAGAALQIPFAMQMAYRFNGIGVTQNVLYENQKLIANQFNSAIGKIQDSLSSTASALGKLQDVVNQNAQALNTLVKCLSSNFGAISSVLNDILSRLDKVEAEVQIDRLITGRLQCLQTYVTQQLIRAAEIRASANLAATKMSECVLGQSKRVDFCGKGYHLMSFPQSAPHGVVFLHVTYVPAQEKNFTTAPAICHDGKAHFPREGVFVSNGTHWFVTQRNFYEPQIITTDNTFVSGNCDVVIGIVNNTVYDPLQPELDSGGGSGGGQIYEGKLTAEGLRFGIVASRFNHALVDRLVEGAIDAIVRHGGREEDITLVRVPGSWEIPVAAGELARKEDIDAVIAIGVLIRGATPHFDYIASEVSKGLADLSLELRKPITFGVITADTLEQAIERAGTKHGNKGWEAALSAIEMANLFKSLR

SEQ ID NO: 8330 - protein, 1307 aa, Artificial Sequence
  SARS-CoV-2/USA/CruiseA-23/2020__EPI_ISL_414482 spike protein (1-1147)(Q965C_S1003C) LumSynth construct
MFVFLVLLPLVSSQCVNLTTRTQLPPAYTNSFTRGVYYPDKVFRSSVLHSTQDLFLPFFSNVTWFHAIHVSGTNGTKRFDNPVLPFNDGVYFASTEKSNIIRGWIFGTTLDSKTQSLLIVNNATNVVIKVCEFQFCNDPFLGVYYHKNNKSWMESEFRVYSSANNCTFEYVSQPFLMDLEVKQGNFKNLREFVFKNIDGYFKIYSKHTPINLVRDLPQGFSALEPLVDLPIGINITRFQTLLALHRSYLTPGDSSSGWTAGAAAYYVGYLQPRTFLLKYNENGTITDAVDCALDPLSETKCTLKSFTVEKGIYQTSNFRVQPTESIVRFPNITNLCPFGEVFNATRFASVYAWNRKRISNCVADYSVLYNSASFSTFKCYGVSPTKLNDLCFTNVYADSFVIRGDEVRQIAPGQTGKIADYNYKLPDDFTGCVIAWNSNNLDSKVGGNYNYLYRLFRKSNLKPFERDISTEIYQAGSTPCNGVEGFNCYFPLQSYGFQPTNGVGYQPYRVVVLSFELLHAPATVCGPKKSTNLVKNKCVNFNFNGLTGTGVLTESNKKFLPFQQFGRDIADTTDAVRDPQTLEILDITPCSFGGVSVITPGTNTSNQVAVLYQDVNCTEVPVAIHADQLTPTWRVYSTGSNVFQTRAGCLIGAEHVNNSYECDIPIGAGICASYQTQTNSPRRARSVASQSIIAYTMSLGAENSVAYSNNSIAIPTNFTISVTTEILPVSMTKTSVDCTMYICGDSTECSNLLLQYGSFCTQLNRALTGIAVEQDKNTQEVFAQVKQIYKTPPIKDFGGFNFSQILPDPSKPSKRSFIEDLLFNKVTLADAGFIKQYGDCLGDIAARDLICAQKFNGLTVLPPLLTDEMIAQYTSALLAGTITSGWTFGAGAALQIPFAMQMAYRFNGIGVTQNVLYENQKLIANQFNSAIGKIQDSLSSTASALGKLQDVVNQNAQALNTLVKCLSSNFGAISSVLNDILSRLDKVEAEVQIDRLITGRLQCLQTYVTQQLIRAAEIRASANLAATKMSECVLGQSKRVDFCGKGYHLMSFPQSAPHGVVFLHVTYVPAQEKNFTTAPAICHDGKAHFPREGVFVSNGTHWFVTQRNFYEPQIITTDNTFVSGNCDVVIGIVNNTVYDPLQPELDSGGGSGGGQIYEGKLTAEGLRFGIVASRFNHALVDRLVEGAIDAIVRHGGREEDITLVRVPGSWEIPVAAGELARKEDIDAVIAIGVLIRGATPHFDYIASEVSKGLADLSLELRKPITFGVITADTLEQAIERAGTKHGNKGWEAALSAIEMANLFKSLR

SEQ ID NO: 8331 - protein, 1307 aa, Artificial Sequence
  SARS-CoV-2/Hong Kong/case85_VM20002868/2020__EPI_ISL_414519 spike protein (1-1147)(Q965C_S1003C) LumSynth construct
MFVFLVLVPLVSSQCVNLTTRTQLPPAYTNSFTRGVYYPDKVFRSSVLHSTQDLFLPFFSNVTWFHAIHVSGTNGTKRFDNPVLPFNDGVYFASTEKSNIIRGWIFGTTLDSKTQSLLIVNNATNVVIKVCEFQFCNDPFLGVYYHKNNKSWMESEFRVYSSANNCTFEYVSQPFLMDLEGKQGNFKNLREFVFKNIDGYFKIYSKHTPINLVRDLPQGFSALEPLVDLPIGINITRFQTLLALHRSYLTPGDSSSGWTAGAAAYYVGYLQPRTFLLKYNENGTITDAVDCALDPLSETKCTLKSFTVEKGIYQTSNFRVQPTESIVRFPNITNLCPFGEVFNATRFASVYAWNRKRISNCVADYSVLYNSASFSTFKCYGVSPTKLNDLCFTNVYADSFVIRGDEVRQIAPGQTGKIADYNYKLPDDFTGCVIAWNSNNLDSKVGGNYNYLYRLFRKSNLKPFERDISTEIYQAGSTPCNGVEGFNCYFPLQSYGFQPTNGVGYQPYRVVVLSFELLHAPATVCGPKKSTNLVKNKCVNFNFNGLTGTGVLTESNKKFLPFQQFGRDIADTTDAVRDPQTLEILDITPCSFGGVSVITPGTNTSNQVAVLYQDVNCTEVPVAIHADQLTPTWRVYSTGSNVFQTRAGCLIGAEHVNNSYECDIPIGAGICASYQTQTNSPRRARSVASQSIIAYTMSLGAENSVAYSNNSIAIPTNFTISVTTEILPVSMTKTSVDCTMYICGDSTECSNLLLQYGSFCTQLNRALTGIAVEQDKNTQEVFAQVKQIYKTPPIKDFGGFNFSQILPDPSKPSKRSFIEDLLFNKVTLADAGFIKQYGDCLGDIAARDLICAQKFNGLTVLPPLLTDEMIAQYTSALLAGTITSGWTFGAGAALQIPFAMQMAYRFNGIGVTQNVLYENQKLIANQFNSAIGKIQDSLSSTASALGKLQDVVNQNAQALNTLVKCLSSNFGAISSVLNDILSRLDKVEAEVQIDRLITGRLQCLQTYVTQQLIRAAEIRASANLAATKMSECVLGQSKRVDFCGKGYHLMSFPQSAPHGVVFLHVTYVPAQEKNFTTAPAICHDGKAHFPREGVFVSNGTHWFVTQRNFYEPQIITTDNTFVSGNCDVVIGIVNNTVYDPLQPELDSGGGSGGGQIYEGKLTAEGLRFGIVASRFNHALVDRLVEGAIDAIVRHGGREEDITLVRVPGSWEIPVAAGELARKEDIDAVIAIGVLIRGATPHFDYIASEVSKGLADLSLELRKPITFGVITADTLEQAIERAGTKHGNKGWEAALSAIEMANLFKSLR

SEQ ID NO: 8332 - protein, 1307 aa, Artificial Sequence; identical to SEQ ID NO: 8322
  SARS-CoV-2/England/200990660/2020__EPI_ISL_414523 spike protein (1-1147)(Q965C_S1003C) LumSynth construct

SEQ ID NO: 8333 - protein, 1307 aa, Artificial Sequence
  SARS-CoV-2/Australia/NSW09/2020__EPI_ISL_413595 spike protein (1-1147)(Q965C_S1003C) LumSynth construct
MFVFLVLLPLVSSQCVNLTTRTQLPPAYTNSFTRGVYYPDKVFRSSVLHSTQDLFLPFFSNVTWFHAIHVSGTNGTKRFDNPVLPFNDGVYFASTEKSNIIRGWIFGTTLDSKTQSLLIVNNATNVVIKVCEFQFCNDPFLGVYYHKNNKSWMESEFRVYSSANNCTFEYVSQPFLMDLEGKQGNFKNLREFVFKNIDGYFKIYSKHTPINLVRDLPQGFSALEPLVDLPIGINITRFQTLLALHRSYLTPGDSSSGWTAGAAAYYVGYLQPRTFLLKYNENGTITDAVDCALDPLSETKCTLKSFTVEKGIYQTSNFRVQPTESIVRFPNITNLCPFGEVFNATRFASVYAWNRKRISNCVADYSVLYNSASFSTFKCYGVSPTKLNDLCFTNVYADSFVIRGDEVRQIAPGQTGKIADYNYKLPDDFTGCVIAWNSNNLDSKVGGNYNYLYRLFRKSNLKPFERDISTEIYQAGSTPCNGVEGFNCYFPLQSYGFQPTNGVGYQPYRVVVLSFELLHAPATVCGPKKSTNLVKNKCVNFNFNGLTGTGVLTESNKKFLPFQQFGRDIADTTDAVRDPQTLEILDITPCSFGGVSVITPGTNTSNQVAVLYQDVNCTEVPVAIHADQLTPTWRVYSTGSNVFQTRAGCLIGAEHVNNSYECDIPIGAGICASYQTQTNSPRRARSVASQSIIAYTMSLGAENSVAYSNNSIAIPTNFTISVTTEILPVSMTKTSVDCTMYICGDSTECSNLLLQYGSFCTQLNRALTGIAVEQDKNTQEVFAQVKQIYKTPPIKDFGGFNFSQILPDPSKPSKRSFIEDLLFNKVTLADAGFIKQYGDCLGDIAARDLICAQKFNGLTVLPPLLTDEMIAQYTSALLAGTITSGWTFGAGAALQIPFAMQMAYRFNGIGVTQNVLYENQKLIANQFNSAIGKIQDSLSFTASALGKLQDVVNQNAQALNTLVKCLSSNFGAISSVLNDILSRLDKVEAEVQIDRLITGRLQCLQTYVTQQLIRAAEIRASANLAATKMSECVLGQSKRVDFCGKGYHLMSFPQSAPHGVVFLHVTYVPAQEKNFTTAPAICHDGKAHFPREGVFVSNGTHWFVTQRNFYEPQIITTDNTFVSGNCDVVIGIVNNTVYDPLQPELDSGGGSGGGQIYEGKLTAEGLRFGIVASRFNHALVDRLVEGAIDAIVRHGGREEDITLVRVPGSWEIPVAAGELARKEDIDAVIAIGVLIRGATPHFDYIASEVSKGLADLSLELRKPITFGVITADTLEQAIERAGTKHGNKGWEAALSAIEMANLFKSLR

SEQ ID NO: 8334 - protein, 1307 aa, Artificial Sequence; identical to SEQ ID NO: 8314
  SARS-CoV-2/Australia/NSW10/2020__EPI_ISL_413596 spike protein (1-1147)(Q965C_S1003C) LumSynth construct

SEQ ID NO: 8335 - protein, 1307 aa, Artificial Sequence
  SARS-CoV-2/Switzerland/1000477797/2020__EPI_ISL_413023 spike protein (1-1147)(Q965C_S1003C) LumSynth construct
MFVFLVLLPLVSSQCVNLTTRTQLPPAYTNSFTRGVYYPDKVFRSSVLHSTQDLFLPFFSNVTWFHAIHVSGTNGTKRFDNPVLPFNDGVYFASTEKSNIIRGWIFGTTLDSKTQSLLIVNNATNVVIKVCEFQFCNDPFLGVYYHKNNKSWMESEFRVYSSANNCTFEYVSQPFLMDLEGKQGNFKNLREFVFKNIDGYFNIYSKHTPINLVRDLPQGFSALEPLVDLPIGINITRFQTLLALHRSYLTPGDSSSGWTAGAAAYYVGYLQPRTFLLKYNENGTITDAVDCALDPLSETKCTLKSFTVEKGIYQTSNFRVQPTESIVRFPNITNLCPFGEVFNATRFASVYAWNRKRISNCVADYSVLYNSASFSTFKCYGVSPTKLNDLCFTNVYADSFVIRGDEVRQIAPGQTGKIADYNYKLPDDFTGCVIAWNSNNLDSKVGGNYNYLYRLFRKSNLKPFERDISTEIYQAGSTPCNGVEGFNCYFPLQSYGFQPTNGVGYQPYRVVVLSFELLHAPATVCGPKKSTNLVKNKCVNFNFNGLTGTGVLTESNKKFLPFQQFGRDIADTTDAVRDPQTLEILDITPCSFGGVSVITPGTNTSNQVAVLYQGVNCTEVPVAIHADQLTPTWRVYSTGSNVFQTRAGCLIGAEHVNNSYECDIPIGAGICASYQTQTNSPRRARSVASQSIIAYTMSLGAENSVAYSNNSIAIPTNFTISVTTEILPVSMTKTSVDCTMYICGDSTECSNLLLQYGSFCTQLNRALTGIAVEQDKNTQEVFAQVKQIYKTPPIKDFGGFNFSQILPDPSKPSKRSFIEDLLFNKVTLADAGFIKQYGDCLGDIAARDLICAQKFNGLTVLPPLLTDEMIAQYTSALLAGTITSGWTFGAGAALQIPFAMQMAYRFNGIGVTQNVLYENQKLIANQFNSAIGKIQDSLSSTASALGKLQDVVNQNAQALNTLVKCLSSNFGAISSVLNDILSRLDKVEAEVQIDRLITGRLQCLQTYVTQQLIRAAEIRASANLAATKMSECVLGQSKRVDFCGKGYHLMSFPQSAPHGVVFLHVTYVPAQEKNFTTAPAICHDGKAHFPREGVFVSNGTHWFVTQRNFYEPQIITTDNTFVSGNCDVVIGIVNNTVYDPLQPELDSGGGSGGGQIYEGKLTAEGLRFGIVASRFNHALVDRLVEGAIDAIVRHGGREEDITLVRVPGSWEIPVAAGELARKEDIDAVIAIGVLIRGATPHFDYIASEVSKGLADLSLELRKPITFGVITADTLEQAIERAGTKHGNKGWEAALSAIEMANLFKSLR

SEQ ID NO: 8336 - protein, 1307 aa, Artificial Sequence
  SARS-CoV-2/Belgium/BA-02291/2020__EPI_ISL_415159 spike protein (1-1147)(Q965C_S1003C) LumSynth construct
MFVFLVLLPLVSSQCVNLTTRTQLPPAYTNSFTRGVYYPDKVFRSSVLHSTQDLFLPFFSNVTWFHAIHVSGTNGTKRFDNPVLPFNDGVYFASTEKSNIIRGWIFGTTLDSKTQSLLIVNNATNVVIKVCEFQFCNDPFLGVYYHKNNKSWMESEFRVYSSANNCTFEYVSQPFLMDLEGKQGNFKNLREFVFKNIDGYFKIYSKHTPINLVRDLPQGFSALEPLVDLPIGINITRFQTLLALHRSYLTPGDSSSGWTAGAAAYYVGYLQPRTFLLKYNENGTITDAVDCALDPLSETKCTLKSFTVEKGIYQTSNFRVQPTESIVRFPNITNLCPFGEVFNATRFASVYAWNRKRISNCVADYSVLYNSASFSTFKCYGVSPTKLNDLCFTNVYADSFVIRGDEVRQIAPGQTGKIADYNYKLPDDFTGCVIAWNSNNLDSKVGGNYNYLYRLFRRSNLKPFERDISTEIYQAGSTPCNGVEGFNCYFPLQSYGFQPTNGVGYQPYRVVVLSFELLPAPATVCGPKKSTNLVKNKCVNFNFNGLTGTGVLTESNKKFLPFQQFGRDIADTTDAVRDPQTLEILDITPCSFGGVSVITPGTNTSNQVAVLYQGVNCTEVPVAIHADQLTPTWRVYSTGSNVFQTRAGCLIGAEHVNNSYECDIPIGAGICASYQTQTNSPRRARSVASQSIIAYTMSLGAENSVAYSNNSIAIPTNFTISVTTEILPVSMTKTSVDCTMYICGDSTECSNLLLQYGSFCTQLNRALTGIAVEQDKNTQEVFAQVKQIYKTPPIKDFGGFNFSQILPDPSKPSKRSFIEDLLFNKVTLADAGFIKQYGDCLGDIAARDLICAQKFNGLTVLPPLLTDEMIAQYTSALLAGTITSGWTFGAGAALQIPFAMQMAYRFNGIGVTQNVLYENQKLIANQFNSAIGKIQDSLSSAAPALGKLQDVVNQNAQALNTLVKCLSSNFGAISSVLNDILSRLDKVEAEVQIDRLITGRLQCLQTYVTQQLIRAAEIRASANLAATKMSECVLGQSKRVDFCGKGYHLMSFPQSAPHGVVFLHVTYVPAQEKNFTTAPAICHDGKAHFPREGVFVSNGTHWFVTQRNFYEPQIITTDNTFVSGNCDVVIGIVNNTVYDPLQPELDSGGGSGGGQIYEGKLTAEGLRFGIVASRFNHALVDRLVEGAIDAIVRHGGREEDITLVRVPGSWEIPVAAGELARKEDIDAVIAIGVLIRGATPHFDYIASEVSKGLADLSLELRKPITFGVITADTLEQAIERAGTKHGNKGWEAALSAIEMANLFKSLR

SEQ ID NO: 8337 - protein, 1307 aa, Artificial Sequence
  SARS-CoV-2/USA/WA8-UW5/2020__EPI_ISL_413486 spike protein (1-1147)(Q965C_S1003C) LumSynth construct
MFVFLVLLPLVSSQCVNLTTRTQLPPAYTNSFTRGVYYPDKVFRSSVLHSTQDLFLPFFSNVTWFHAIHVSGTNGTKRFDNPVLPFNDGVYFASTEKSNIIRGWIFGTTLDSKTQSLLIVNNATNVVIKVCEFQFCNDPFLGVYYHKNNKSWMESEFRVYSSANNCTFEYVSQPFLMDLEGKQGNFKNLREFVFKNIDGYFKIYSKHTPINLVRDLPQGFSALEPLVDLPIGINITRFQTLLALHRSYLTPGDSSSGWTAGAAAYYVGYLQPRTFLLKYNENGTITDAVDCALDPLSETKCTLKSFTVEKGIYQTSNFRVQPTESIVRFPNITNLCPFGEVFNATRFASVYAWNRKRISNCVADYSVLYNSASFSTFKCYGVSPTKLNDLCFTNVYADSFVIRGDEVRQIAPGQTGKIADYNYKLPDDFTGCVIAWNSNNLDSKVGGNYNYLYRLFRKSNLKPFERDISTEIYQAGSTPCNGVEGFNCYFPLQSYGFQPTNGVGYQPYRVVVLSFELLHAPATVCGPKKSTNLVKNKCVNFNFNGLTGTGVLTESNKKFLPFQQFGRDIADTTDAVRDPQTLEILDITPCSFGGVSVITPGTNTSNQVAVLYQDVNCTEVPVAIHADQLTPTWRVYSTGSNVFQTRAGCLIGAEYVNNSYECDIPIGAGICASYQTQTNSPRRARSVASQSIIAYTMSLGAENSVAYSNNSIAIPTNFTISVTTEILPVSMTKTSVDCTMYICGDSTECSNLLLQYGSFCTQLNRALTGIAVEQDKNTQEVFAQVKQIYKTPPIKDFGGFNFSQILPDPSKPSKRSFIEDLLFNKVTLADAGFIKQYGDCLGDIAARDLICAQKFNGLTVLPPLLTDEMIAQYTSALLAGTITSGWTFGAGAALQIPFAMQMAYRFNGIGVTQNVLYENQKLIANQFNSAIGKIQDSLSSTASALGKLQDVVNQNAQALNTLVKCLSSNFGAISSVLNDILSRLDKVEAEVQIDRLITGRLQCLQTYVTQQLIRAAEIRASANLAATKMSECVLGQSKRVDFCGKGYHLMSFPQSAPHGVVFLHVTYVPAQEKNFTTAPAICHDGKAHFPREGVFVSNGTHWFVTQRNFYEPQIITTDNTFVSGNCDVVIGIVNNTVYDPLQPELDSGGGSGGGQIYEGKLTAEGLRFGIVASRFNHALVDRLVEGAIDAIVRHGGREEDITLVRVPGSWEIPVAAGELARKEDIDAVIAIGVLIRGATPHFDYIASEVSKGLADLSLELRKPITFGVITADTLEQAIERAGTKHGNKGWEAALSAIEMANLFKSLR

SEQ ID NO: 8338 - protein, 1307 aa, Artificial Sequence
  SARS-CoV-2/England/20102000506/2020__EPI_ISL_415147 spike protein (1-1147)(Q965C_S1003C) LumSynth construct
MFVFLVLLPLVSSQCVNLTTRTQLPPAYTNSFTRGVYYPDKVFRSSVLHSTQDLFLPFFSNVTWFHAIHVSGTNGTKRFDNPVLPFNDGVYFASTEKSNIIRGWIFGTTLDSKTQSLLIVNNATNVVIKVCEFQFCNDPFLGVYYHKNNKSWMESEFRVYSSANNCTFEYVSQPFLMDLEGKQGNFKNLREFVFKNIDGYFKIYSKHTPINLVRDLPQGFSALEPLVDLPIGINITRFQTLLALHRSYLTPGDSSSGWTAGAAAYYVGYLQPRTFLLKYNENGTITDAVDCALDPLSETKCTLKSFTVEKGIYQTSNFRVQPTESIVRFPNITNLCPFGEVFNATRFASVYAWNRKRISNCVADYSVLYNSASFSTFKCYGVSPTKLNDLCFTNVYADSFVIRGDEVRQIAPGQTGKIADYNYKLPDDFTGCVIAWNSNNLDSKVGGNYNYLYRLFRKSNLKPFERDISTEIYQAGSTPCNGVEGFNCYFPLQSYGFQPTNGVGYQPYRVVVLSFELLHAPATVCGPKKSTNLVKNKCVNFNFNGLTGTGVLTESNKKFLPFQQFGRDIADTTDAVRDPQTLEILDITPCSFGGVSVITPGTNTSNQVAVLYQGVNCTEVPVAIHADQLTPTWRVYSTGSNVFQTRAGCLIGAEHVNNSYECDIPIGAGICASYQTQTNSPRRARSVASQSIIAYTMSLGAENSVAYSNNSIAIPTNFTISVTTEILPVSMTKTSVDCTMYICGDSTECSNLLLQYGSFCTQLNRALTGIAVEQDKNTQEVFAQVKQIYKTPPIKDFGGFNFSQILPDPSKPSKRSFIEDLLFNKVTLADAGFIKQYGYCLGDIAARDLICAQKFNGLTVLPPLLTDEMIAQYTSALLAGTITSGWTFGAGAALQIPFAMQMAYRFNGIGVTQNVLYENQKLIANQFNSAIGKIQDSLSSTASALGKLQDVVNQNAQALNTLVKCLSSNFGAISSVLNDILSRLDKVEAEVQIDRLITGRLQCLQTYVTQQLIRAAEIRASANLAATKMSECVLGQSKRVDFCGKGYHLMSFPQSAPHGVVFLHVTYVPAQEKNFTTAPAICHDGKAHFPREGVFVSNGTHWFVTQRNFYEPQIITTDNTFVSGNCDVVIGIVNNTVYDPLQPELDSGGGSGGGQIYEGKLTAEGLRFGIVASRFNHALVDRLVEGAIDAIVRHGGREEDITLVRVPGSWEIPVAAGELARKEDIDAVIAIGVLIRGATPHFDYIASEVSKGLADLSLELRKPITFGVITADTLEQAIERAGTKHGNKGWEAALSAIEMANLFKSLR

SEQ ID NO: 8339 - protein, 1307 aa, Artificial Sequence
  SARS-CoV-2/Belgium/VAG-03013/2020__EPI_ISL_415155 spike protein (1-1147)(Q965C_S1003C) LumSynth construct
MFVFLVLLPLVSSQCVNLTTRTQLPPAYTNSFTRGVYYPDKVFRSSVLHSTQDLFLPFFSNVTWFHAIHVSGTNGTKRFDNPVLPFNDGVYFASTEKSNIIRGWIFGTTLDSKTQSLLIVNNATNVVIKVCEFQFCNDPFLGVYYHKNNKSWMESEFRVYSSANNCTFEYVSQPFLMDLEGKQGNFKNLREFVFKNIDGYFKIYSKHTPINLVRDLPQGFSALEPLVDLPIGINITRFQTLLALHRSYLTPGDSSSGWTAGAAAYYVGYLQPRTFLLKYNENGTITDAVDCALDPLSETKCTLKSFTVEKGIYQTSNFRVQPTESIVRFPNITNLCPFGEVFNATRFASVYAWNRKRISNCVADYSVLYNSASFSTFKCYGVSPTKLNDLCFTNVYADSFVIRGDEVRQIAPGQTGKIADYNYKLPDDFTGCVIAWNSNNLDSKVGGNYNYLYRLFRKSNLKPFERDISTEIYQAGSTPCNGVEGFNCYFPLQSYGFQPTNGVGYQPYRVVVLSFELLHAPATVCGPKKSTNLVKNKCVNFNFNGLTGTGVLTESNKKFLPFQQFGRDIADTTDAVRDPQTLEILDITPCSFGGVSVITPGTNTSNQVAVLYQGVNCTEVPVAIHADQLTPTWRVYSTGSNVFQTRAGCLIGAEHVNNSYECDIPIGAGICASYQTQTNSPRRARSVASQSIIAYTMSLGAENSVAYSNNSIAIPTNFTISVTTEILPVSMTKTSVDCTMYICGDSTECSNLLLQYGSFCTQLNRALTGIAVEQDKNTQEVFAQVKQIYKTPPIKDFGGFNFSQILPDPSKPSKRSFIEDLLFNKVTLADAGFIKQYGDCLGDIAARDLICAQKFNGLTVLPPLLTDEMIAQYTSALLAGTITSGWTFGAGAALQIPFAMQMAYRFNGIGVTQNVLYENQKLIANQFNSAIGKIQDSLSSTATALGKLQDVVNQNAQALNTLVKCLSSNFGAISSVLNDILSRLDKVEAEVQIDRLITGRLQCLQTYVTQQLIRAAEIRASANLAATKMSECVLGQSKRVDFCGKGYHLMSFPQSAPHGVVFLHVTYVPAQEKNFTTAPAICHDGKAHFPREGVFVSNGTHWFVTQRNFYEPQIITTDNTFVSGNCDVVIGIVNNTVYDPLQPELDSGGGSGGGQIYEGKLTAEGLRFGIVASRFNHALVDRLVEGAIDAIVRHGGREEDITLVRVPGSWEIPVAAGELARKEDIDAVIAIGVLIRGATPHFDYIASEVSKGLADLSLELRKPITFGVITADTLEQAIERAGTKHGNKGWEAALSAIEMANLFKSLR

SEQ ID NO: 8340 - protein, 1307 aa, Artificial Sequence
  SARS-CoV-2/Belgium/BC-03016/2020__EPI_ISL_415157 spike protein (1-1147)(Q965C_S1003C) LumSynth construct
MFVFLVLLPLVSSQCVNLTTRTQLPPAYTNSFTRGVYYPDKVFRSSVLHSTQDLFLPFFSNVTWFHAIHVSGTNGTKRFDNPVLPFNDGVYFASTEKSNIIRGWIFGTTLDSKTQSLLIVNNATNVVIKVCEFQFCNDPFLGVYYHKNNKSWMESEFRVYSSANNCTFEYVSQPFLMDLEGKQGNFKNLREFVFKNIDGYFKIYSKHTPINLVRDLPQGFSALEPLVDLPIGINITRFQTLLALHRSYLTPGDSSSGWTAGAAAYYVGYLQPRTFLLKYNENGTITDAVDCALDPLSETKCTLKSFTVEKGIYQTSNFRVQPTESIVRFPNITNLCPFGEVFNATRFASVYAWNRKRISNCVADYSVLYNSASFSTFKCYGVSPTKLNDLCFTNVYADSFVIRGDEVRQIAPGQTGKIADYNYKLPDDFTGCVIAWNSNNLDSKVGGNYNYLYRLFRKSNLKPFERDISTEIYQAGSTPCNGVEGFNCYFPLQSYGFQPTNGVGYQPYRVVVLSFELLHAPATVCGPKKSTNLVKNKCVNFNFNGLTGTGVLTESNKKFLPFQQFGRDIADTTDAVRDPQTLEILDITPCSFGGVSVITPGTNTSNQVAVLYQGVNCTEVPVAIHADQLTPTWRVYSTGSNVFQTRAGCLIGAEHVNNSYECDIPIGAGICASYQTQTNSPRRARSVASQSIIAYTMSLGAENSVAYSNNSIAIPTNFTISVTTEILPVSMTKTSVDCTMYICGDSTECSNLLLQYGSFCTQLNRALTGIAVEQDKNTQEVFAQVKQIYKTPPIKDFGGFNFSQILPDPSKPSKRSFIEDLLFNKVTLADAGFIKQYGDCLGDIAARDLICAQKFNGLTVLPPLLTDEMIAQYTSALLAGTITSGWTFGAGAALQIPFAMQMAYRFNGIGVTQNVLYENQKLIANQFNSAIGKIQDSLSSTAPALGKLQDVVNQNAQALNTLVKCLSSNFGAISSVLNDILSRLDKVEAEVQIDRLITGRLQCLQTYVTQQLIRAAEIRASANLAATKMSECVLGQSKRVDFCGKGYHLMSFPQSAPHGVVFLHVTYVPAQEKNFTTAPAICHDGKAHFPREGVFVSNGTHWFVTQRNFYEPQIITTDNTFVSGNCDVVIGIVNNTVYDPLQPELDSGGGSGGGQIYEGKLTAEGLRFGIVASRFNHALVDRLVEGAIDAIVRHGGREEDITLVRVPGSWEIPVAAGELARKEDIDAVIAIGVLIRGATPHFDYIASEVSKGLADLSLELRKPITFGVITADTLEQAIERAGTKHGNKGWEAALSAIEMANLFKSLR

SEQ ID NO: 8341 - protein, 1307 aa, Artificial Sequence
  SARS-CoV-2/Germany/BavPat3/2020__EPI_ISL_414521 spike protein (1-1147)(Q965C_S1003C) LumSynth construct
MFVFLVLLPLVSSQCVNLTTRTQLPPAYTNSFTRGVYYPDKVFRSSVLHSTQDLFLPFFSNVTWFHAIHVSGTNGTKRFDNPVLPFNDGVYFASTEKSNIIRGWIFGTTLDSKTQSLLIVNNATNVVIKVCEFQFCNDPFLGVYYHKNNKSWMESEFRVYSSANNCTFEYVSQPFLMDLEGKQGNFKNLREFVFKNIDGYFKIYSKHTPINLVRDLPQGFSALEPLVDLPIGINITRFQTLLALHRSYLTPGDSSSGWTAGAAAYYVGYLQPRTFLLKYNENGTITDAVDCALDPLSETKCTLKSFTVEKGIYQTSNFRVQPTESIVRFPNITNLCPFGEVFNATRFASVYAWNRKRISNCVADYSVLYNSASFSTFKCYGVSPTKLNDLCFTNVYADSFVIRGDEVRQIAPGQTGKIADYNYKLPDDFTGCVIAWNSNNLDSKVGGNYNYLYRLFRKSNLKPFERDISTEIYQAGSTPCNGVEGFNCYFPLQSYGFQPTNGVGYQPYRVVVLSFELLHAPATVCGPKKSTNLVKNKCVNFNFNGLTGTGVLTESNKKFLPFQQFGRDIADTTDAVRDPQTLEILDITPCSFGGVSVITPGTNTSNQVAVLYQDVNCTEVPVAIHADQLTPTWRVYSTGSNVFQTRAGCLIGAEHVNNSYECDIPIGAGICASYQTQTNSPRRARSVASQSIIAYTMSLGAENSVAYSNNSIAIPTNFTISVTTEILPVSMTKTSVDCTMYICGDSTECSNLLLQYGSFCTQLNRALTGIAVEQDKNTQQVFAQVKQIYKTPPIKDFGGFNFSQILPDPSKPSKRSFIEDLLFNKVTLADAGFIKQYGDCLGDIAARDLICAQKFNGLTVLPPLLTDEMIAQYTSALLAGTITSGWTFGAGAALQIPFAMQMAYRFNGIGVTQNVLYENQKLIANQFNSAIGKIQDSLSSTASALGKLQDVVNQNAQALNTLVKCLSSNFGAISSVLNDILSRLDKVEAEVQIDRLITGRLQCLQTYVTQQLIRAAEIRASANLAATKMSECVLGQSKRVDFCGKGYHLMSFPQSAPHGVVFLHVTYVPAQEKNFTTAPAICHDGKAHFPREGVFVSNGTHWFVTQRNFYEPQIITTDNTFVSGNCDVVIGIVNNTVYDPLQPELDSGGGSGGGQIYEGKLTAEGLRFGIVASRFNHALVDRLVEGAIDAIVRHGGREEDITLVRVPGSWEIPVAAGELARKEDIDAVIAIGVLIRGATPHFDYIASEVSKGLADLSLELRKPITFGVITADTLEQAIERAGTKHGNKGWEAALSAIEMANLFKSLR

SEQ ID NO: 8342 - protein, 1307 aa, Artificial Sequence
  SARS-CoV-2/France/HF1805/2020__EPI_ISL_414628 spike protein (1-1147)(Q965C_S1003C) LumSynth construct
MFVFLVLLPLVSSQCVNLTTRTQLPPAYTNSFTRGVYYPDKVFRSSVLHSTQDLFLPFFSNVTWFHAIHVSGTNGTKRFDNPVLPFNDGVYFASTEKSNIIRGWIFGTTLDSKTQSLLIVNNATNVVIKVCEFQFCNDPFLGVYYHKNNKSWMESEFRVYSSANNCTFEYVSQPFLMDLEGKQGNFKNLREFVFKNIDGYFKIYSKHTPINLVRDLPQGFSALEPLVDLPIGINITRFQTLLALHRSYLTPGDSSSGWTAGAAAYYVGYLQPRTFLLKYNENGTITDAVDCALDPLSETKCTLKSFTVEKGIYQTSNFRVQPTESIVRFPNITNLCPFGEVFNATRFASVYAWNRKRISNCVADYSVLYNSASFSTFKCYGVSPTKLNDLCFTNVYADSFVIRGDEVRQIAPGQTGKIADYNYKLPDDFTGCVIAWNSNNLDSKVGGNYNYLYRLFRKSNLKPFERDISTEIYQAGSTPCNGVEGFNCYFPLQSYGFQPTNGVGYQPYRVVVLSFELLHAPATVCGPKKSTNLVKNKCVNFNFNGLTGTGVLTESNKKFLPFQQFGRDIADTTDAVRDPQTLEILDITPCSFGGVSVITPGTNTSNQVAVLYQGVNCTEVPVAIHADQLTPTWRVYSTGSNVFQTRAGCLIGAEHVNNSYECDIPIGAGICASYQTQTNSPRRARSVASQSIIAYTMSLGAENSVAYSNNSIAIPTNFTISVTTEILPVSMTKTSVDCTMYICGDSTECSNLLLQYGSFCTQLNRALTGIAVEQDKNTQEVFAQVKQIYKTPPIKDFGGFNFSQILPDPSKPSKRSFIEDLLFNKVTLADAGFIKQYGDCLGDIAARDLICAQKFNGLTVLPPLLTDEMIAQYTSALLAGTITSGWTFGAGAALQIPFAMQMAYRFNGIGVTQNVLYENQKLIANQFNSAIGKIQDSLSSTASALGKLQDVVNQNAQALNTLVKCLSSNFGAISSVLNDILSRLDKVEAEVQIDRLITGRLQCLQTYVTQQLIRAAEIRASANLAATKMSECVLGQSKRVDFCGKGYHLMSFPQSAPHGVVFLHVTYVPAQEKNFTTAPAICHDGKAHFPREGVFVSNGTHWFVTQRNFYEPQIITTDNTFVSGNCDVVIGVVNNTVYDPLQPELDSGGGSGGGQIYEGKLTAEGLRFGIVASRFNHALVDRLVEGAIDAIVRHGGREEDITLVRVPGSWEIPVAAGELARKEDIDAVIAIGVLIRGATPHFDYIASEVSKGLADLSLELRKPITFGVITADTLEQAIERAGTKHGNKGWEAALSAIEMANLFKSLR

SEQ ID NO: 8343 - protein, 1307 aa, Artificial Sequence
  SARS-CoV-2/Netherlands/ZuidHolland_9/2020__EPI_ISL_414445 spike protein (1-1147)(Q965C_S1003C) LumSynth construct
MFVFLVLLPLVSSQCVNLTTRTQLPPAYTNSFTRGVYYPDKVFRSSVLHSTQDLFLPFFSNVTWFHAIHVSGTNGTKRFDNPVLPFNDGVYFASTEKSNIIRGWIFGTTLDSKTQSLLIVNNATNVVIKVCEFQFCNDPFLGVYYHKNNKSWMESEFRVYSSANNCTFEYVSQPFLMDLEGKQGNFKNLREFVFKNIDGYFKIYSKHTPINLVRDLPQGFSALEPLVDLPIGINITRFQTLLALHRSYLTPGDSSSGWTAGAAAYYVGYLQPRTFLLKYNENGTITDAVDCALDPLSETKCTLKSFTVEKGIYQTSNFRVQPTESIVRFPNITNLCPFGEVFNATRFASVYAWNRKRISNCVADYSVLYNSASFSTFKCYGVSPTKLNDLCFTNVYADSFVIRGDEVRQIAPGQTGKIADYNYKLPDDFTGCVIAWNSNNLDSKVGGNYNYLYRLFRKSNLKPFERDISTEIYQAGSTPCNGVEGFNCYFPLQSYGFQPTNGVGYQPYRVVVLSFELLHAPATVCGPKKSTNLVKNKCVNFNFNGLTGTGVLTESNKKFLPFQQFGRDIADTTDAVRDPQTLEILDITPCSFGGVSVITPGTNTSNQVAVLYQGVNCTEVPVAIHADQLTPTWRVYSTGSNVFQTRAGCLIGAEHVNNSYECDIPIGAGICASYQTQTNSPRRARSVASQSIIAYTMSLGAENSVAYSNNSIAIPTNFTISVTTEILPVSMTKTSVDCTMYICGDSTECSNLLLQYGSFCTQLNRALTGIAVEQDKNTQEVFAQVKQIYKTPPIKDFGGFNFSQILPDPSKPSKRSFIEDLLFNKVTLADAGFIKQYGDCLGDIAARDLICVQKFNGLTVLPPLLTDEMIAQYTSALLAGTITSGWTFGAGAALQIPFAMQMAYRFNGIGVTQNVLYENQKLIANQFNSAIGKIQDSLSSTASALGKLQDVVNQNAQALNTLVKCLSSNFGAISSVLNDILSRLDKVEAEVQIDRLITGRLQCLQTYVTQQLIRAAEIRASANLAATKMSECVLGQSKRVDFCGKGYHLMSFPQSAPHGVVFLHVTYVPAQEKNFTTAPAICHDGKAHFPREGVFVSNGTHWFVTQRNFYEPQIITTDNTFVSGNCDVVIGIVNNTVYDPLQPELDSGGGSGGGQIYEGKLTAEGLRFGIVASRFNHALVDRLVEGAIDAIVRHGGREEDITLVRVPGSWEIPVAAGELARKEDIDAVIAIGVLIRGATPHFDYIASEVSKGLADLSLELRKPITFGVITADTLEQAIERAGTKHGNKGWEAALSAIEMANLFKSLR

SEQ ID NO: 8344 - protein, 1307 aa, Artificial Sequence
  SARS-CoV-2/Finland/FIN03032020A/2020__EPI_ISL_413602 spike protein (1-1147)(Q965C_S1003C) LumSynth construct
MFVFLVLLPLVSSQCVNLTTRTQLPPAYTNSFTRGVYYPDKVFRSSVLHSTQDLFLPFFSNVTWFHAIHVSGTNGTKRFDNPVLPFNDGVYFASTEKSNIIRGWIFGTTLDSKTQSLLIVNNATNVVIKVCEFQFCNDPFLGVYYHKNNKSWMESEFRVYSSANNCTFEYVSQPFLMDLEGKQGNFKNLREFVFKNIDGYFKIYSKHTPINLVRDLPQGFSALEPLVDLPIGINITRFQTLLALHRSYLTPGDSSSGWTAGAAAYYVGYLQPRTFLLKYNENGTITDAVDCALDPLSETKCTLKSFTVEKGIYQTSNFRVQPTESIVRFPNITNLCPFGEVFNATRFASVYAWNRKRISNCVADYSVLYNSASFSTFKCYGVSPTKLNDLCFTNVYADSFVIRGDEVRQIAPGQTGKIADYNYKLPDDFTGCVISWNSNNLDSKVGGNYNYLYRLFRKSNLKPFERDISTEIYQAGSTPCNGVEGFNCYFPLQSYGFQPTNGVGYQPYRVVVLSFELLHAPATVCGPKKSTNLVKNKCVNFNFNGLTGTGVLTESNKKFLPFQQFGRDIADTTDAVRDPQTLEILDITPCSFGGVSVITPGTNTSNQVAVLYQGVNCTEVPVAIHADQLTPTWRVYSTGSNVFQTRAGCLIGAEHVNNSYECDIPIGAGICASYQTQTNSPRRARSVASQSIIAYTMSLGAENSVAYSNNSIAIPTNFTISVTTEILPVSMTKTSVDCTMYICGDSTECSNLLLQYGSFCTQLNRALTGIAVEQDKNTQEVFAQVKQIYKTPPIKDFGGFNFSQILPDPSKPSKRSFIEDLLFNKVTLADAGFIKQYGDCLGDIAARDLICAQKFNGLTVLPPLLTDEMIAQYTSALLAGTITSGWTFGAGAALQIPFAMQMAYRFNGIGVTQNVLYENQKLIANQFNSAIGKIQDSLSSTASALGKLQDVVNQNAQALNTLVKCLSSNFGAISSVLNDILSRLDKVEAEVQIDRLITGRLQCLQTYVTQQLIRAAEIRASANLAATKMSECVLGQSKRVDFCGKGYHLMSFPQSAPHGVVFLHVTYVPAQEKNFTTAPAICHDGKAHFPREGVFVSNGTHWFVTQRNFYEPQIITTDNTFVSGNCDVVIGIVNNTVYDPLQPELDSGGGSGGGQIYEGKLTAEGLRFGIVASRFNHALVDRLVEGAIDAIVRHGGREEDITLVRVPGSWEIPVAAGELARKEDIDAVIAIGVLIRGATPHFDYIASEVSKGLADLSLELRKPITFGVITADTLEQAIERAGTKHGNKGWEAALSAIEMANLFKSLR

SEQ ID NO: 8345 - protein, 1307 aa, Artificial Sequence
  SARS-CoV-2/France/GE1977/2020__EPI_ISL_414632 spike protein (1-1147)(Q965C_S1003C) LumSynth construct
MFVFLVLLPLVSSQCVNLTTRTQLPPAYTNSFTRGVYYPDKVFRSSVLHSTQDLFLPFFSNVTWFHAIHVSGTNGTKRFDNPVLPFNDGVYFASTEKSNIIRGWIFGTTLDSKTQSLLIVNNATNVVIKVCEFQFCNDPFLGVYYHKNNKSWMESEFRVYSSANNCTFEYVSQPFLMDLEGKQGNFKNLREFVFKNIDGYFKIYSKHTPINLVRDLPQGFSALEPLVDLPIGINITRFQTLLALHRSYLTPGDSSSGWTAGAAAYYVGYLQPRTFLLKYNENGTITDAVDCALDPLSETKCTLKSFTVEKGIYQTSNFRVQPTESIVRFPNITNLCPFGEVFNATRFASVYAWNRKRISNCVADYSVLYNSASFSTFKCYGVSPTKLNDLCFTNVYADSFVIRGDEVRQIAPGQTGKIADYNYKLPDDFTGCVIAWNSNNLDSKVGGNYNYLYRLFRKSNLKPFERDISTEIYQAGSTPCNGVEGFNCYFPLQSYGFQPTNGVGYQPYRVVVLSFELLHAPATVCGPKKSTNLVKNKCVNFNFNGLTGTGVLTESNKKFLPFQQFGRDIADTTDAVRDPQTLEILDITPCSFGGVSVITPGTNTSNQVAVLYQGVNCTEVPVAIHADQLTPTWRVYSTGSNVFQTRAGCLIGAEHVNNSYECDIPIGAGICASYQTQTNSPRRARSVASQSIIAYTMSLGAENSVAYSNNSIAIPTNFTISVTTEILPVSMTKTSVDCTMYICGDSTECSNLLLQYGSFCTQLNRALTGIAVEQDKNTQEVFAQVKQIYKTPPIKDFGGFNFSQILPDPSKPSKRSFIEDLLFNKVTLADAGFIKQYGDCLGDIAARDLICAQKFNGLTVLPPLLTDEMIAQYTSALLAGTITSGWTFGAGAALQIPFAMQMAYRFNGIGVTQNVLYENQKLIANQFNSAIGKIQDSLFSTASALGKLQDVVNQNAQALNTLVKCLSSNFGAISSVLNDILSRLDKVEAEVQIDRLITGRLQCLQTYVTQQLIRAAEIRASANLAATKMSECVLGQSKRVDFCGKGYHLMSFPQSAPHGVVFLHVTYVPAQEKNFTTAPAICHDGKAHFPREGVFVSNGTHWFVTQRNFYEPQIITTDNTFVSGNCDVVIGIVNNTVYDPLQPELDSGGGSGGGQIYEGKLTAEGLRFGIVASRFNHALVDRLVEGAIDAIVRHGGREEDITLVRVPGSWEIPVAAGELARKEDIDAVIAIGVLIRGATPHFDYIASEVSKGLADLSLELRKPITFGVITADTLEQAIERAGTKHGNKGWEAALSAIEMANLFKSLR

SEQ ID NO: 8346 - protein, 1307 aa, Artificial Sequence
  SARS-CoV-2/Finland/FIN-313/2020__EPI_ISL_414641 spike protein (1-1147)(Q965C_S1003C) LumSynth construct
MFVFLVLLPLVSSQCVNLTTRTQLPPAYTNSFTRGVYYPDKVFRSSVLHSTQDLFLPFFSNVTWFHAIHVSGTNGTKRFDNPVLPFNDGVYFASTEKSNIIRGWIFGTTLDSKTQSLLIVNNATNVVIKVCEFQFCNDPFLGVYYHKNNKSWMESEFRVYSSANNCTFEYVSQPFLMDLEGKQGNFKNLREFVFKNIDGYFKIYSKHTPINLVRDLPQGFSALEPLVDLPIGINITRFKTLLALHRSYLTPGDSSSGWTAGAAAYYVGYLQPRTFLLKYNENGTITDAVDCALDPLSETKCTLKSFTVEKGIYQTSNFRVQPTESIVRFPNITNLCPFGEVFNATRFASVYAWNRKRISNCVADYSVLYNSASFSTFKCYGVSPTKLNDLCFTNVYADSFVIRGDEVRQIAPGQTGKIADYNYKLPDDFTGCVIAWNSNNLDSKVGGNYNYLYRLFRKSNLKPFERDISTEIYQAGSTPCNGVEGFNCYFPLQSYGFQPTNGVGYQPYRVVVLSFELLHAPATVCGPKKSTNLVKNKCVNFNFNGLTGTGVLTESNKKFLPFQQFGRDIADTTDAVRDPQTLEILDITPCSFGGVSVITPGTNTSNQVAVLYQGVNCTEVPVAIHADQLTPTWRVYSTGSNVFQTRAGCLIGAEHVNNSYECDIPIGAGICASYQTQTNSPRRARSVASQSIIAYTMSLGAENSVAYSNNSIAIPTNFTISVTTEILPVSMTKTSVDCTMYICGDSTECSNLLLQYGSFCTQLNRALTGIAVEQDKNTQEVFAQVKQIYKTPPIKDFGGFNFSQILPDPSKPSKRSFIEDLLFNKVTLADAGFIKQYGDCLGDIAARDLICAQKFNGLTVLPPLLTDEMIAQYTSALLAGTITSGWTFGAGAALQIPFAMQMAYRFNGIGVTQNVLYENQKLIANQFNSAIGKIQDSLSSTASALGKLQDVVNQNAQALNTLVKCLSSNFGAISSVLNDILSRLDKVEAEVQIDRLITGRLQCLQTYVTQQLIRAAEIRASANLAATKMSECVLGQSKRVDFCGKGYHLMSFPQSAPHGVVFLHVTYVPAQEKNFTTAPAICHDGKAHFPREGVFVSNGTHWFVTQRNFYEPQIITTDNTFVSGNCDVVIGIVNNTVYDPLQPELDSGGGSGGGQIYEGKLTAEGLRFGIVASRFNHALVDRLVEGAIDAIVRHGGREEDITLVRVPGSWEIPVAAGELARKEDIDAVIAIGVLIRGATPHFDYIASEVSKGLADLSLELRKPITFGVITADTLEQAIERAGTKHGNKGWEAALSAIEMANLFKSLR

SEQ ID NO: 8347 - protein, 1307 aa, Artificial Sequence
  SARS-CoV-2/Netherlands/ZuidHolland_2/2020__EPI_ISL_414556 spike protein (1-1147)(Q965C_S1003C) LumSynth construct
MFVFLVLLPLVSSQCVNLTTRTQLPPAYTNSFTRGVYYPDKVFRSSVLHSTQDLFLPFFSNVTWFHAIHVSGTNGTKRFDNPVLPFNDGVYFASTEKSNIIRGWIFGTTLDSKTQSLLIVNNATNVVIKVCEFQFCNDPFLGVYYHKNNKSWMESEFRVYSSANNCTFEYVSQPFLMDLEGKQGNFKNLREFVFKNIDGYFKIYSKHTPINLVRDLPQGFSALEPLVDLPIGINITRFQTLLALHRSYLTPGDSSSGWTAGAAAYYVGYLQPRTFLLKYNENGTITDAVDCALDPLSETKCTLKSFTVEKGIYQTSNFRVQPTESIVRFPNITNLCPFGEVFNATRFASVYAWNRKRISNCVADYSVLYNSASFSTFKCYGVSPTKLNDLCFTNVYADSFVIRGDEVRQIAPGQTGKIADYNYKLPDDFTGCVIAWNSNNLDSKVGGNYNYLYRLFRKSNLKPFERDISTEIYQAGSTPCNGVEGFNCYFPLQSYGFQPTNGVGYQPYRVVVLSFELLHAPATVCGPKKSTNLVKNKCVNFNFNGLTGTGVLTESNKKFLPFQQFGRDIADTTDAVRDPQTLEILDITPCSFGGVSVITPGTNTSNQVAVLYQGVNCTEVPVAIHADQLTPTWRVYSTGSNVFQTRAGCLIGAEHVNNSYECDIPIGAGICASYQTQTNSPRRARSVASQSIIAYTMSLGAENSVAYSNNSIAIPTNFTISVTTEILPVSMTKTSVDCTMYICGDSTECSNLLLQYGSFCTQLNRALTGIALEQDKNTQEVFAQVKQIYKTPPIKDFGGFNFSQILPDPSKPSKRSFIEDLLFNKVTLADAGFIKQYGDCLGDIAARDLICAQKFNGLTVLPPLLTDEMIAQYTSALLAGTITSGWTFGAGAALQIPFAMQMAYRFNGIGVTQNVLYENQKLIANQFNSAIGKIQDSLSSTASALGKLQDVVNQNAQALNTLVKCLSSNFGAISSVLNDILSRLDKVEAEVQIDRLITGRLQCLQTYVTQQLIRAAEIRASANLAATKMSECVLGQSKRVDFCGKGYHLMSFPQSAPHGVVFLHVTYVPAQEKNFTTAPAICHDGKAHFPREGVFVSNGTHWFVTQRNFYEPQIITTDNTFVSGNCDVVIGIVNNTVYDPLQPELDSGGGSGGGQIYEGKLTAEGLRFGIVASRFNHALVDRLVEGAIDAIVRHGGREEDITLVRVPGSWEIPVAAGELARKEDIDAVIAIGVLIRGATPHFDYIASEVSKGLADLSLELRKPITFGVITADTLEQAIERAGTKHGNKGWEAALSAIEMANLFKSLR

SEQ ID NO: 8348 - protein, 1307 aa, Artificial Sequence
  SARS-CoV-2/USA/WA-UW31/2020__EPI_ISL_414618 spike protein (1-1147)(Q965C_S1003C) LumSynth construct
MFVFLVLLPLVSSQCVNLTTRTQLPPAYTNSFTRGVYYPDKVFRSSVLHSTQDLFLPFFSNVTWFHAIHVSGTNGTKRFDNPVLPFNDGVYFASTEKSNIIRGWIFGTTLDSKTQSLLIVNNATNVVIKVCEFQFCNDPFLGVYYHKNNKSWMESEFRVYSSANNCTFEYVSQPFLMDLEGKQGNFKNLREFVFKNIDGYFKIYSKHTPINLVRDLPQGFSALEPLVDLPIGINITRFQTLLALHRSYLTPGDSSSGWTAGAAAYYVGYLQPRTFLLKYNENGTITDAVDCALDPLSETKCTLKSFTVEKGIYQTSNFRVQPTESIVRFPNITNLCPFGEVFNATRFASVYAWNRKRISNCVADYSVLYNSASFSTFKCYGVSPTKLNDLCFTNVYADSFVIRGDEVRQIAPGQTGKIADYNYKLPDDFTGCVIAWNSNNLDSKVGGNYNYLYRLFRKSNLKPFERDISTEIYQAGSTPCNGAEGFNCYFPLQSYGFQPTNGVGYQPYRVVVLSFELLHAPATVCGPKKSTNLVKNKCVNFNFNGLTGTGVLTESNKKFLPFQQFGRDIADTTDAVRDPQTLEILDITPCSFGGVSVITPGTNTSNQVAVLYQDVNCTEVPVAIHADQLTPTWRVYSTGSNVFQTRAGCLIGAEHVNNSYECDIPIGAGICASYQTQTNSPRRARSVASQSIIAYTMSLGAENSVAYSNNSIAIPTNFTISVTTEILPVSMTKTSVDCTMYICGDSTECSNLLLQYGSFCTQLNRALTGIAVEQDKNTQEVFAQVKQIYKTPPIKDFGGFNFSQILPDPSKPSKRSFIEDLLFNKVTLADAGFIKQYGDCLGDIAARDLICAQKFNGLTVLPPLLTDEMIAQYTSALLAGTITSGWTFGAGAALQIPFAMQMAYRFNGIGVTQNVLYENQKLIANQFNSAIGKIQDSLSSTASALGKLQDVVNQNAQALNTLVKCLSSNFGAISSVLNDILSRLDKVEAEVQIDRLITGRLQCLQTYVTQQLIRAAEIRASANLAATKMSECVLGQSKRVDFCGKGYHLMSFPQSAPHGVVFLHVTYVPAQEKNFTTAPAICHDGKAHFPREGVFVSNGTHWFVTQRNFYEPQIITTDNTFVSGNCDVVIGIVNNTVYDPLQPELDSGGGSGGGQIYEGKLTAEGLRFGIVASRFNHALVDRLVEGAIDAIVRHGGREEDITLVRVPGSWEIPVAAGELARKEDIDAVIAIGVLIRGATPHFDYIASEVSKGLADLSLELRKPITFGVITADTLEQAIERAGTKHGNKGWEAALSAIEMANLFKSLR

SEQ ID NO: 8349 - protein, 1307 aa, Artificial Sequence
  SARS-CoV-2/South Korea/SNU01/2020__EPI_ISL_411929 spike protein (1-1147)(Q965C_S1003C) LumSynth construct
MFVFLVLLPLVSSQCVNLTTRTQLPPAYTNSFTRGVYYPDKVFRSSVLHSTQDLFLPFFSNVTWFHAIHVSGTNGTKRFDNPVLPFNDGVYFASTEKSNIIRGWIFGTTLDSKTQSLLIVNNATNVVIKVCEFQFCNDPFLGVYYHKNNKSWMESEFRVYSSANNCTFEYVSQPFLMDLEGKQGNFKNLREFVFKNIDGYFKIYSKHTPINLVRDLPQGFWALEPLVDLPIGINITRFQTLLALHRSYLTPGDSSSGWTAGAAAYYVGYLQPRTFLLKYNENGTITDAVDCALDPLSETKCTLKSFTVEKGIYQTSNFRVQPTESIVRFPNITNLCPFGEVFNATRFASVYAWNRKRISNCVADYSVLYNSASFSTFKCYGVSPTKLNDLCFTNVYADSFVIRGDEVRQIAPGQTGKIADYNYKLPDDFTGCVIAWNSNNLDSKVGGNYNYLYRLFRKSNLKPFERDISTEIYQAGSTPCNGVEGFNCYFPLQSYGFQPTNGVGYQPYRVVVLSFELLHAPATVCGPKKSTNLVKNKCVNFNFNGLTGTGVLTESNKKFLPFQQFGRDIADTTDAVRDPQTLEILDITPCSFGGVSVITPGTNTSNQVAVLYQDVNCTEVPVAIHADQLTPTWRVYSTGSNVFQTRAGCLIGAEHVNNSYECDIPIGAGICASYQTQTNSPRRARSVASQSIIAYTMSLGAENSVAYSNNSIAIPTNFTISVTTEILPVSMTKTSVDCTMYICGDSTECSNLLLQYGSFCTQLNRALTGIAVEQDKNTQEVFAQVKQIYKTPPIKDFGGFNFSQILPDPSKPSKRSFIEDLLFNKVTLADAGFIKQYGDCLGDIAARDLICAQKFNGLTVLPPLLTDEMIAQYTSALLAGTITSGWTFGAGAALQIPFAMQMAYRFNGIGVTQNVLYENQKLIANQFNSAIGKIQDSLSSTASALGKLQDVVNQNAQALNTLVKCLSSNFGAISSVLNDILSRLDKVEAEVQIDRLITGRLQCLQTYVTQQLIRAAEIRASANLAATKMSECVLGQSKRVDFCGKGYHLMSFPQSAPHGVVFLHVTYVPAQEKNFTTAPAICHDGKAHFPREGVFVSNGTHWFVTQRNFYEPQIITTDNTFVSGNCDVVIGIVNNTVYDPLQPELDSGGGSGGGQIYEGKLTAEGLRFGIVASRFNHALVDRLVEGAIDAIVRHGGREEDITLVRVPGSWEIPVAAGELARKEDIDAVIAIGVLIRGATPHFDYIASEVSKGLADLSLELRKPITFGVITADTLEQAIERAGTKHGNKGWEAALSAIEMANLFKSLR

SEQ ID NO: 8350 - protein, 1307 aa, Artificial Sequence
  SARS-CoV-2/China/WF0004/2020__EPI_ISL_413694 spike protein (1-1147)(Q965C_S1003C) LumSynth construct
MFVFLVLLPLVSSQCVNLTTRTQLPPAYTNSFTRGVYYPDKVFRSSVLHSTQDLFLPFFSNVTWFHAIHVSGTNGTKRFDNPVLPFNDGVYFASTEKSNIIRGWIFGTTLDSKTQSLLIVNNATNVVIKVCEFQFCNDPFLGVYYHKNNKSWTESEFRVYSSANNCTFEYVSQPFLMDLEGKQGNFKNLREFVFKNIDGYFKIYSKHTPINLVRDLPQGFSALEPLVDLPIGINITRFQTLLALHRSYLTPGDSSSGWTAGAAAYYVGYLQPRTFLLKYNENGTITDAVDCALDPLSETKCTLKSFTVEKGIYQTSNFRVQPTESIVRFPNITNLCPFGEVFNATRFASVYAWNRKRISNCVADYSVLYNSASFSTFKCYGVSPTKLNDLCFTNVYADSFVIRGDEVRQIAPGQTGKIADYNYKLPDDFTGCVIAWNSNNLDSKVGGNYNYLYRLFRKSNLKPFERDISTEIYQAGSTPCNGVEGFNCYFPLQSYGFQPTNGVGYQPYRVVVLSFELLHAPATVCGPKKSTNLVKNKCVNFNFNGLTGTGVLTESNKKFLPFQQFGRDIADTTDAVRDPQTLEILDITPCSFGGVSVITPGTNTSNQVAVLYQDVNCTEVPVAIHADQLTPTWRVYSTGSNVFQTRAGCLIGAEHVNNSYECDIPIGAGICASYQTQTNSPRRARSVASQSIIAYTMSLGAENSVAYSNNSIAIPTNFTISVTTEILPVSMTKTSVDCTMYICGDSTECSNLLLQYGSFCTQLNRALTGIAVEQDKNTQEVFAQVKQIYKTPPIKDFGGFNFSQILPDPSKPSKRSFIEDLLFNKVTLADAGFIKQYGDCLGDIAARDLICAQKFNGLTVLPPLLTDEMIAQYTSALLAGTITSGWTFGAGAALQIPFAMQMAYRFNGIGVTQNVLYENQKLIANQFNSAIGKIQDSLSSTASALGKLQDVVNQNAQALNTLVKCLSSNFGAISSVLNDILSRLDKVEAEVQIDRLITGRLQCLQTYVTQQLIRAAEIRASANLAATKMSECVLGQSKRFDFCGKGYHLMSFPQSAPHGVVFLHVTYVPAQEKNFTTAPAICHDGKAHFPREGVFVSNGTHWFVTQRNFYEPQIITTDNTFVSGNCDVVIGIVNNTVYDPLQPELDSGGGSGGGQIYEGKLTAEGLRFGIVASRFNHALVDRLVEGAIDAIVRHGGREEDITLVRVPGSWEIPVAAGELARKEDIDAVIAIGVLIRGATPHFDYIASEVSKGLADLSLELRKPITFGVITADTLEQAIERAGTKHGNKGWEAALSAIEMANLFKSLR

SEQ ID NO: 8351 - protein, 1307 aa, Artificial Sequence
  SARS-CoV-2/China/WF0028/2020__EPI_ISL_413791 spike protein (1-1147)(Q965C_S1003C) LumSynth construct
MFVFLVLLPLVSSQCVNLTTRTQLPPAYTNSFTRGVYYPDKVFRSSVLHSTQDLFLPFFSNVTWFHAIHVSGTNGTKRFDNPVLPFNDGVYFASTEKSNIIRGWIFGTTLDSKTQSLLIVNNATNVVIKVCEFQFCNDPFLGVYYHKNNKSWMESEFRVYSSANNCTFEYVSQPFLMDLEGKQGNFKNLREFVFKNIDGYFKIYSKHTPINLVRDLPQGFSALEPLVDLPIGINITRFQTLLALHRSYLTPGDSSSGWTAGAAAYYVGYLQPRTFLLKYNENGTITDAVDCALDPLSETKCTLKSFTVEKGIYQTSNFRVQPTESIVRFPNITNLCPFGEVFNATRFASVYAWNRKRISNCVADYSVLYNSASFSTFKCYGVSPTKLNDLCFTNVYADSFVIRGDEVRQIAPGQTGKIADYNYKLPDDFTGCVIAWNSNNLDSKVGGNYNYLYRLFRKSNLKPFERDISTEIYQAGSTPCNGVEGFNCYFPLQSYGFQPTNGVGYQPYRVVVLSFELLHAPATVCGPKKSTNLVKNKCVNFNFNGLTGTGVLTESNKKFLPFQQFGRDIADTTDAVRDPQTLEILDITPCSFGGVSVITPGTNTSNQVAVLYQDVNCTEVPVAIHADQLTPTWRVYSTGSNVFQTRAGCLIGAEHVNNSYECDIPIGAGICASYQTQTNSPRRARSVASQSIIAYTMSLGAENSVAYSNNSIAIPTNFTISVTTEILPVSMTKTSVDCTMYICGDSTECSNLLLQYGSFCTQLNRALTGIAVEQDKNTQEVFAQVKQIYKTPPIKDFGGFNFSQILPDPSKPSKRSFIEDLLFNKVTLADAGFIKQYGDCLGDIAARDLICAQKFNGLTVLPPLLTDEMIAQYTSALLAGTITSGWTFGAGAALQIPFAMQMAYRFNGIGVTQNVLYENQKLIANQFNSAIGKIQDSLSSTASALGKLQDVVNQNAQALNTLVKCLSSNFGAISSVLNDILSRLDKVEAEVQIDRLITGRLQCLQTYVTQQLIRAAEIRASANLAATKMSECVLGQSKRVDFCGKGYHLMSFPQSAPHGVVFLHVTYVPAQEKNFTTAPAICHDGKAHFPREGVFVSNGTHWFVTQRNFYEPQIITTDNTFVSGNCDVVIGIVNNTVYDPLQPELESGGGSGGGQIYEGKLTAEGLRFGIVASRFNHALVDRLVEGAIDAIVRHGGREEDITLVRVPGSWEIPVAAGELARKEDIDAVIAIGVLIRGATPHFDYIASEVSKGLADLSLELRKPITFGVITADTLEQAIERAGTKHGNKGWEAALSAIEMANLFKSLR

SEQ ID NO: 8352 - protein, 1307 aa, Artificial Sequence
  SARS-CoV-2/2019-nCoV/USA-CruiseA-18/2020__MT159716.1 spike protein (1-1147)(Q965C_S1003C) LumSynth construct
MFVFLVLLPLVSSQCVNLTTRTQLPPAYTNSFTRGVYYPDKVFRSSVLHSTQDLFLPFFSNVTWFHAIHVSGTNGTKRFDNPVLPFNDGVYFASTEKSNIIRGWIFGTTLDSKTQSLLIVNNATNVVIKVCEFQFCNDPFLGVYYHKNNKSWMESELRVYSSANNCTFEYVSQPFLMDLEGKQGNFKNLREFVFKNIDGYFKIYSKHTPINLVRDLPQGFSALEPLVDLPIGINITRFQTLLALHRSYLTPGDSSSGWTAGAAAYYVGYLQPRTFLLKYNENGTITDAVDCALDPLSETKCTLKSFTVEKGIYQTSNFRVQPTESIVRFPNITNLCPFGEVFNATRFASVYAWNRKRISNCVADYSVLYNSASFSTFKCYGVSPTKLNDLCFTNVYADSFVIRGDEVRQIAPGQTGKIADYNYKLPDDFTGCVIAWNSNNLDSKVGGNYNYLYRLFRKSNLKPFERDISTEIYQAGSTPCNGVEGFNCYFPLQSYGFQPTNGVGYQPYRVVVLSFELLHAPATVCGPKKSTNLVKNKCVNFNFNGLTGTGVLTESNKKFLPFQQFGRDIADTTDAVRDPQTLEILDITPCSFGGVSVITPGTNTSNQVAVLYQDVNCTEVPVAIHADQLTPTWRVYSTGSNVFQTRAGCLIGAEHVNNSYECDIPIGAGICASYQTQTNSPRRARSVASQSIIAYTMSLGAENSVAYSNNSIAIPTNFTISVTTEILPVSMTKTSVDCTMYICGDSTECSNLLLQYGSFCTQLNRALTGIAVEQDKNTQEVFAQVKQIYKTPPIKDFGGFNFSQILPDPSKPSKRSFIEDLLFNKVTLADAGFIKQYGDCLGDIAARDLICAQKFNGLTVLPPLLTDEMIAQYTSALLAGTITSGWTFGAGAALQIPFAMQMAYRFNGIGVTQNVLYENQKLIANQFNSAIGKIQDSLSSTASALGKLQDVVNQNAQALNTLVKCLSSNFGAISSVLNDILSRLDKVEAEVQIDRLITGRLQCLQTYVTQQLIRAAEIRASANLAATKMSECVLGQSKRVDFCGKGYHLMSFPQSAPHGVVFLHVTYVPAQEKNFTTAPAICHDGKAHFPREGVFVSNGTHWFVTQRNFYEPQIITTDNTFVSGNCDVVIGIVNNTVYDPLQPELDSGGGSGGGQIYEGKLTAEGLRFGIVASRFNHALVDRLVEGAIDAIVRHGGREEDITLVRVPGSWEIPVAAGELARKEDIDAVIAIGVLIRGATPHFDYIASEVSKGLADLSLELRKPITFGVITADTLEQAIERAGTKHGNKGWEAALSAIEMANLFKSLR

SEQ ID NO: 8353 - protein, 1307 aa, Artificial Sequence
  SARS-CoV-2/SARS-CoV-2/Yunnan-01/human/2020/CHN__MT049951.1 spike protein (1-1147)(Q965C_S1003C) LumSynth construct
MFVFLVLLPLVSSQCVNLTTRTQLPPANTNSFTRGVYYPDKVFRSSVLHSTQDLFLPFFSNVTWFHAIHVSGTNGTKRFDNPVLPFNDGVYFASTEKSNIIRGWIFGTTLDSKTQSLLIVNNATNVVIKVCEFQFCNDPFLGVYYHKNNKSWMESEFRVYSSANNCTFEYVSQPFLMDLEGKQGNFKNLREFVFKNIDGYFKIYSKHTPINLVRDLPQGFSALEPLVDLPIGINITRFQTLLALHRSYLTPGDSSSGWTAGAAAYYVGYLQPRTFLLKYNENGTITDAVDCALDPLSETKCTLKSFTVEKGIYQTSNFRVQPTESIVRFPNITNLCPFGEVFNATRFASVYAWNRKRISNCVADYSVLYNSASFSTFKCYGVSPTKLNDLCFTNVYADSFVIRGDEVRQIAPGQTGKIADYNYKLPDDFTGCVIAWNSNNLDSKVGGNYNYLYRLFRKSNLKPFERDISTEIYQAGSTPCNGVEGFNCYFPLQSYGFQPTNGVGYQPYRVVVLSFELLHAPATVCGPKKSTNLVKNKCVNFNFNGLTGTGVLTESNKKFLPFQQFGRDIADTTDAVRDPQTLEILDITPCSFGGVSVITPGTNTSNQVAVLYQDVNCTEVPVAIHADQLTPTWRVYSTGSNVFQTRAGCLIGAEHVNNSYECDIPIGAGICASYQTQTNSPRRARSVASQSIIAYTMSLGAENSVAYSNNSIAIPTNFTISVTTEILPVSMTKTSVDCTMYICGDSTECSNLLLQYGSFCTQLNRALTGIAVEQDKNTQEVFAQVKQIYKTPPIKDFGGFNFSQILPDPSKPSKRSFIEDLLFNKVTLADAGFIKQYGDCLGDIAARDLICAQKFNGLTVLPPLLTDEMIAQYTSALLAGTITSGWTFGAGAALQIPFAMQMAYRFNGIGVTQNVLYENQKLIANQFNSAIGKIQDSLSSTASALGKLQDVVNQNAQALNTLVKCLSSNFGAISSVLNDILSRLDKVEAEVQIDRLITGRLQCLQTYVTQQLIRAAEIRASANLAATKMSECVLGQSKRVDFCGKGYHLMSFPQSAPHGVVFLHVTYVPAQEKNFTTAPAICHDGKAHFPREGVFVSNGTHWFVTQRNFYEPQIITTDNTFVSGNCDVVIGIVNNTVYDPLQPELDSGGGSGGGQIYEGKLTAEGLRFGIVASRFNHALVDRLVEGAIDAIVRHGGREEDITLVRVPGSWEIPVAAGELARKEDIDAVIAIGVLIRGATPHFDYIASEVSKGLADLSLELRKPITFGVITADTLEQAIERAGTKHGNKGWEAALSAIEMANLFKSLR

SEQ ID NO: 8354 - protein, 1307 aa, Artificial Sequence
  SARS-CoV-2/USA/WA-UW292/2020__EPI_ISL_418077 spike protein (1-1147)(Q965C_S1003C) LumSynth construct
MFVFLVLLPLVSSQCVNLTTRTQLPPAYTNSFTRGVYYPDKVFRSSVLHSTQDLFLPFFSNVTWFHAIHVSGTNGTKRFDNPVLPFNDGVYFASTEKSNIIRGWIFGTTLDSKTQSLLIVNNATNVVIKVCEFQFCNDPFLGVYYHKNNKSWMESEFRVYSSANNCTFEYVSQPFLMDLEGKQGNFKNLREFVFKNIDGYFKIYSKHTPINLVRDLPQGFSALEPLVDLPIGINITRFQTLLALHRSYLTPGDSSSGWTAGAAAYYVGYLQPRTFLLKYNENGTITDAVDCALDPLSETKCTLKSFTVEKGIYQTSNFRVQPTESIVRFPNITNLCPFGEVFNATRFASVYAWNRKRISNCVADYSVLYNSASFSTFKCYGVSPTKLNDLCFTNVYADSFVIRGDEVRQIAPGQTGKIADYNYKLPDDFTGCVIAWNSNNLDSKVGGNYNYLYRLFRKSNLKPFERDISTEIYQASSTPCNGVEGFNCYFPLQSYGFQPTNGVGYQPYRVVVLSFELLHAPATVCGPKKSTNLVKNKCVNFNFNGLTGTGVLTESNKKFLPFQQFGRDIADTTDAVRDPQTLEILDITPCSFGGVSVITPGTNTSNQVAVLYQDVNCTEVPVAIHADQLTPTWRVYSTGSNVFQTRAGCLIGAEHVNNSYECDIPIGAGICASYQTQTNSPRRARSVASQSIIAYTMSLGAENSVAYSNNSIAIPTNFTISVTTEILPVSMTKTSVDCTMYICGDSTECSNLLLQYGSFCTQLNRALTGIAVEQDKNTQEVFAQVKQIYKTPPIKDFGGFNFSQILPDPSKPSKRSFIEDLLFNKVTLADAGFIKQYGDCLGDIAARDLICAQKFNGLTVLPPLLTDEMIAQYTSALLAGTITSGWTFGAGAALQIPFAMQMAYRFNGIGVTQNVLYENQKLIANQFNSAIGKIQDSLSSTASALGKLQDVVNQNAQALNTLVKCLSSNFGAISSVLNDILSRLDKVEAEVQIDRLITGRLQCLQTYVTQQLIRAAEIRASANLAATKMSECVLGQSKRVDFCGKGYHLMSFPQSAPHGVVFLHVTYVPAQEKNFTTAPAICHDGKAHFPREGVFVSNGTHWFVTQRNFYEPQIITTDNTFVSGNCDVVIGIVNNTVYDPLQPELDSGGGSGGGQIYEGKLTAEGLRFGIVASRFNHALVDRLVEGAIDAIVRHGGREEDITLVRVPGSWEIPVAAGELARKEDIDAVIAIGVLIRGATPHFDYIASEVSKGLADLSLELRKPITFGVITADTLEQAIERAGTKHGNKGWEAALSAIEMANLFKSLR

SEQ ID NO: 8355 - protein, 1307 aa, Artificial Sequence
  SARS-CoV-2/Iceland/192/2020__EPI_ISL_417819 spike protein (1-1147)(Q965C_S1003C) LumSynth construct
MFVFFVLLPLVSSQCVNLTTRTQLPPAYTNSFTRGVYYPDKVFRSSVLHSTQDLFLPFFSNVTWFHAIHVSGTNGTKRFDNPVLPFNDGVYFASTEKSNIIRGWIFGTTLDSKTQSLLIVNNATNVVIKVCEFQFCNDPFLGVYYHKNNKSWMESEFRVYSSANNCTFEYVSQPFLMDLEGKQGNFKNLREFVFKNIDGYFKIYSKHTPINLVRDLPQGFSALEPLVDLPIGINITRFQTLLALHRSYLTPGDSSSGWTAGAAAYYVGYLQPRTFLLKYNENGTITDAVDCALDPLSETKCTLKSFTVEKGIYQTSNFRVQPTESIVRFPNITNLCPFGEVFNATRFASVYAWNRKRISNCVADYSVLYNSASFSTFKCYGVSPTKLNDLCFTNVYADSFVIRGDEVRQIAPGQTGKIADYNYKLPDDFTGCVIAWNSNNLDSKVGGNYNYLYRLFRKSNLKPFERDISTEIYQAGSTPCNGVEGFNCYFPLQSYGFQPTNGVGYQPYRVVVLSFELLHAPATVCGPKKSTNLVKNKCVNFNFNGLTGTGVLTESNKKFLPFQQFGRDIADTTDAVRDPQTLEILDITPCSFGGVSVITPGTNTSNQVAVLYQGVNCTEVPVAIHADQLTPTWRVYSTGSNVFQTRAGCLIGAEHVNNSYECDIPIGAGICASYQTQTNSPRRARSVASQSIIAYTMSLGAENSVAYSNNSIAIPTNFTISVTTEILPVSMTKTSVDCTMYICGDSTECSNLLLQYGSFCTQLNRALTGIAVEQDKNTQEVFAQVKQIYKTPPIKDFGGFNFSQILPDPSKPSKRSFIEDLLFNKVTLADAGFIKQYGDCLGDIAARDLICAQKFNGLTVLPPLLTDEMIAQYTSALLAGTITSGWTFGAGAALQIPFAMQMAYRFNGIGVTQNVLYENQKLIANQFNSAIGKIQDSLSSTASALGKLQDVVNQNAQALNTLVKCLSSNFGAISSVLNDILSRLDKVEAEVQIDRLITGRLQCLQTYVTQQLIRAAEIRASANLAATKMSECVLGQSKRVDFCGKGYHLMSFPQSAPHGVVFLHVTYVPAQEKNFTTAPAICHDGKAHFPREGVFVSNGTHWFVTQRNFYEPQIITTDNTFVSGNCDVVIGIVNNTVYDPLQPELDSGGGSGGGQIYEGKLTAEGLRFGIVASRFNHALVDRLVEGAIDAIVRHGGREEDITLVRVPGSWEIPVAAGELARKEDIDAVIAIGVLIRGATPHFDYIASEVSKGLADLSLELRKPITFGVITADTLEQAIERAGTKHGNKGWEAALSAIEMANLFKSLR

SEQ ID NO: 8356 - protein, 1307 aa, Artificial Sequence
  SARS-CoV-2/Belgium/ULG-6939/2020__EPI_ISL_417020 spike protein (1-1147)(Q965C_S1003C) LumSynth construct
MFVFLVLLPLVSSQCVNLTTRTQLPPAYTNSFTRGVYYPDKVFRSSVLHSTQDLFLPFFSNVTWFHAIHVSGTNGTKRFDNPVLPFNDGVYFASTEKSNIIRGWIFGTTLDSKTQSLLIVNNATNVVIKVCEFQFCNDPFLGVYYHKNNKSWMESEFRVYSSANNCTFEYVSQPFLMDLEGKQGNFKNLREFVFKNIDGYFKIYSKHTPINLVRDLPQGFSALEPLVDLPIGINITRFQTLLALHRSYLTPGDSSSGWTAGAAAYYVGYLQPRTFLLKYNENGTITDAVDCALDPLSETKCTLKSFTVEKGIYQTSNFRVQPTESIVRFPNITNLCPFGEVFNATRFASVYAWNRKRISNCVADYSVLYNSASFSTFKCYGVSPTKLNDLCFTNVYADSFVIRGDEVRQIAPGQTGKIADYNYKLPDDFTGCVIAWNSNNLDSKVGGNYNYLYRLFRKSNLKPFERDISTEIYQAGSTPCNGVEGFNCYFPLQSYGFQPTNGVGYQPYRVVVLSFELLHAPATVCGPKKSTNLVKNKCVNFNFNGLTGTGVLTESNKKFLPFQQFGRDIADTTDAVRDPQTLEILDITPCSFGGVSVITPGTNTSNQVAVLYQGVNCTEVPVAIHADQLTPTWRVYSTGSNVFQTRAGCLIGAEHVNNSYECDIPIGAGICASYQTQTNSPRRARSVASQSIIAYTMSLGAENSVVYSNNSIAIPTNFTISVTTEILPVSMTKTSVDCTMYICGDSTECSNLLLQYGSFCTQLNRALTGIAVEQDKNTQEVFAQVKQIYKTPPIKDFGGFNFSQILPDPSKPSKRSFIEDLLFNKVTLADAGFIKQYGDCLGDIAARDLICAQKFNGLTVLPPLLTDEMIAQYTSALLAGTITSGWTFGAGAALQIPFAMQMAYRFNGIGVTQNVLYENQKLIANQFNSAIGKIQDSLSSTASALGKLQDVVNQNAQALNTLVKCLSSNFGAISSVLNDILSRLDKVEAEVQIDRLITGRLQCLQTYVTQQLIRAAEIRASANLAATKMSECVLGQSKRVDFCGKGYHLMSFPQSAPHGVVFLHVTYVPAQEKNFTTAPAICHDGKAHFPREGVFVSNGTHWFVTQRNFYEPQIITTDNTFVSGNCDVVIGIVNNTVYDPLQPELDSGGGSGGGQIYEGKLTAEGLRFGIVASRFNHALVDRLVEGAIDAIVRHGGREEDITLVRVPGSWEIPVAAGELARKEDIDAVIAIGVLIRGATPHFDYIASEVSKGLADLSLELRKPITFGVITADTLEQAIERAGTKHGNKGWEAALSAIEMANLFKSLR

SEQ ID NO: 8357 - protein, 1307 aa, Artificial Sequence
  SARS-CoV-2/France/HF2496/2020__EPI_ISL_418231 spike protein (1-1147)(Q965C_S1003C) LumSynth construct
MFVFLVLLPLVSSQCVNLTTRTQLPPAYTNSFTRGVYYPDKVFRSSVLHSTQDLFLPFFSNVTWFHAIHVSGTNGTKRFDNPVLPFNDGVYFASTEKSNIIRGWIFGTTLDSKTQSLLIVNNATNVVIKVCEFQFCNDPFLGVYYHKNNKSWMESEFRVYSSANNCTFEYVSQPFLMDLEGKQGNFKNLREFVFKNIDGYFKIYSKHTPINLVRDLPQGFSALEPLVDLPIGINITRFQTLLALHRSYLTPGDSSSGWTAGAAAYYVGYLQPRTFLLKYNENGTITDAVDCALDPLSETKCTLKSFTVEKGIYQTSNFRVQPTESIVRFPNITNLCPFGEVFNATRFASVYAWNRKRISNCVADYSVLYNSASFSTFKCYGVSPTKLNDLCFTNVYADSFVIRGDEVRQIAPGQTGKIADYNYKLPDDFTGCVIAWNSNNLDSKVGGNYNYLYRLFRKSNLKPFERDISTEIYQAGSTPCNGVEGFNCYFPLQSYGFQPTNGVGYQPYRVVVLSFELLHAPATVCGPKKSTNLVKNKCVNFNFNGLTGTGVLTESNKKFLPFQQFGRDIADTTDAVRDPQTLEILDITPCSFGGVSVITPGTNTSNQVAVLYQGVNCTEVPVAIHADQLTPTWRVYSTGSNVFQTRAGCLIGAEHVNNSYECDIPIGAGICASYQTQTNSPRRARSVASQSIIAYTMSLGAENSVAYSNNSIAIPTNFTISVTTEILPVSMTKTSVDCTMYICGDSTECSNLLLQYGSFCTQLNRALTGIAVEQDKNTQEVFAQVKQIYKTPPIKDFGGFNFSQILPDPSKPSKRSFIEDLLFNKVTLADAGFIKQYGDCLGDIVARDLICAQKFNGLTVLPPLLTDEMIAQYTSALLAGTITSGWTFGAGAALQIPFAMQMAYRFNGIGVTQNVLYENQKLIANQFNSAIGKIQDSLSSTASALGKLQDVVNQNAQALNTLVKCLSSNFGAISSVLNDILSRLDKVEAEVQIDRLITGRLQCLQTYVTQQLIRAAEIRASANLAATKMSECVLGQSKRVDFCGKGYHLMSFPQSAPHGVVFLHVTYVPAQEKNFTTAPAICHDGKAHFPREGVFVSNGTHWFVTQRNFYEPQIITTDNTFVSGNCDVVIGIVNNTVYDPLQPELDSGGGSGGGQIYEGKLTAEGLRFGIVASRFNHALVDRLVEGAIDAIVRHGGREEDITLVRVPGSWEIPVAAGELARKEDIDAVIAIGVLIRGATPHFDYIASEVSKGLADLSLELRKPITFGVITADTLEQAIERAGTKHGNKGWEAALSAIEMANLFKSLR

SEQ ID NO: 8358 - protein, 1307 aa, Artificial Sequence
  SARS-CoV-2/USA/WA-UW291/2020__EPI_ISL_418076 spike protein (1-1147)(Q965C_S1003C) LumSynth construct
MFVFLVLLPLVSSQCVNLTTRTQLPPAYTNSFTRGVYYPDKVFRSSVLHSTQDLFLPFFSNVTWFHAIHVSGTNGTKRFDNPVLPFNDGVYFASTEKSNIIRGWIFGTTLDSKTQSLLIVNNATNVVIKVCEFQFCNDPFLGVYYHKNNKSWMESEFRVYSSANNCTFEYVSQPFLMDLEGKQGNFKNLREFVFKNIDGYFKIYSKHTPINLVRDLPQGFSALEPLVDLPIGINITRFQTLLALHRSYLTPGDSSSGWTAGAAAYYVGYLQPRTFLLKYNENGTITDAVDCALDPLSETKCTLKSFTVEKGIYQTSNFRVQPTESIVRFPNITNLCPFGEVFNATRFASVYAWNRKRISNCVADYSVLYNSASFSTFKCYGVSPTKLNDLCFTNVYADSFVIRGDEVRQIAPGQTGKIADYNYKLPDDFTGCVIAWNSNNLDSKVGGNYNYLYRLFRKSNLKPFERDISTEIYQAGSTPCNGVEGFNCYFPLQSYGFQPTNGVGYQPYRVVVLSFELLHAPATVCGPKKSTNLVKNKCVNFNFNGLTGTGVLTESNKKFLPFQQFGRDIADTTDAVRDPQTLEILDITPCSFGGVSVITPGTNTSNQVAVLYQGVNCTEVPVAIHADQLTPTWRVYSTGSNVFQTRAGCLIGAEHVNNSYECDIPIGAGICASYQTQTNSPRRARSVASQSIIAYTMSLGAENSVAYSNNSIAIPTNFTISVTTEILPVSMTKTSVDCTMYICGDSTECSNLLLQYGSFCTQLNRALTGIAVEQDKNTQEVFAQVKQIYKTPPIKDFGGFNFSQILPDPSKPSKRSFIEDLLFNKVTLADAGFIKQYGDCLGDIAARDLICAQKFNGLTVLPPLLTDEMIAQYTSALLAGTITSGWTFGAGAALQIPFAMQMAYRFNGIGVTQNVLYENQKLIANQFNSAIGKIQYSLSSTASALGKLQDVVNQNAQALNTLVKCLSSNFGAISSVLNDILSRLDKVEAEVQIDRLITGRLQCLQTYVTQQLIRAAEIRASANLAATKMSECVLGQSKRVDFCGKGYHLMSFPQSAPHGVVFLHVTYVPAQEKNFTTAPAICHDGKAHFPREGVFVSNGTHWFVTQRNFYEPQIITTDNTFVSGNCDVVIGIVNNTVYDPLQPELDSGGGSGGGQIYEGKLTAEGLRFGIVASRFNHALVDRLVEGAIDAIVRHGGREEDITLVRVPGSWEIPVAAGELARKEDIDAVIAIGVLIRGATPHFDYIASEVSKGLADLSLELRKPITFGVITADTLEQAIERAGTKHGNKGWEAALSAIEMANLFKSLR

SEQ ID NO: 8359 - protein, 1307 aa, Artificial Sequence; identical to SEQ ID NO: 8322
  SARS-CoV-2/Portugal/PT0034/2020__EPI_ISL_418019 spike protein (1-1147)(Q965C_S1003C) LumSynth construct

SEQ ID NO: 8360 - protein, 1307 aa, Artificial Sequence; identical to SEQ ID NO: 8314
  SARS-CoV-2/Iceland/202/2020__EPI_ISL_417750 spike protein (1-1147)(Q965C_S1003C) LumSynth construct

SEQ ID NO: 8361 - protein, 1307 aa, Artificial Sequence
  SARS-CoV-2/USA/WA-UW261/2020__EPI_ISL_418046 spike protein (1-1147)(Q965C_S1003C) LumSynth construct
MFVFLVLLPLVSSQCVNLTTRTQLPPAYTNSFTRGVYYPDKVFRSSVLHSTQDLFLPFFSNVTWFHAIHVSGTNGTKRFDNPVLPFNDGVYFASTEKSNIIRGWIFGTTLDSKTQSLLIVNNATNVVIKVCEFQFCNDPFLGVYYHKNNKSWMESEFRVYSSANNCTFEYVSQPFLMDLEGKQGNFKNLREFVFKNIDGYFKIYSKHTPINLVRDLPQGFSALEPLVDLPIGINITRFQTLLALHRSYLTPGDSSSGWTAGAAAYYVGYLQPRTFLLKYNENGTITDAVDCALDPLSETKCTLKSFTVEKGIYQTSNFRVQPTESIVRFPNITNLCPFGEVFNATRFTSVYAWNRKRISNCVADYSVLYNSASFSTFKCYGVSPTKLNDLCFTNVYADSFVIRGDEVRQIAPGQTGKIADYNYKLPDDFTGCVIAWNSNNLDSKVGGNYNYLYRLFRKSNLKPFERDISTEIYQAGSTPCNGVEGFNCYFPLQSYGFQPTNGVGYQPYRVVVLSFELLHAPATVCGPKKSTNLVKNKCVNFNFNGLTGTGVLTESNKKFLPFQQFGRDIADTTDAVRDPQTLEILDITPCSFGGVSVITPGTNTSNQVAVLYQDVNCTEVPVAIHADQLTPTWRVYSTGSNVFQTRAGCLIGAEHVNNSYECDIPIGAGICASYQTQTNSPRRARSVASQSIIAYTMSLGAENSVAYSNNSIAIPTNFTISVTTEILPVSMTKTSVDCTMYICGDSTECSNLLLQYGSFCTQLNRALTGIAVEQDKNTQEVFAQVKQIYKTPPIKDFGGFNFSQILPDPSKPSKRSFIEDLLFNKVTLADAGFIKQYGDCLGDIAARDLICAQKFNGLTVLPPLLTDEMIAQYTSALLAGTITSGWTFGAGAALQIPFAMQMAYRFNGIGVTQNVLYENQKLIANQFNSAIGKIQDSLSSTASALGKLQDVVNQNAQALNTLVKCLSSNFGAISSVLNDILSRLDKVEAEVQIDRLITGRLQCLQTYVTQQLIRAAEIRASANLAATKMSECVLGQSKRVDFCGKGYHLMSFPQSAPHGVVFLHVTYVPAQEKNFTTAPAICHDGKAHFPREGVFVSNGTHWFVTQRNFYEPQIITTDNTFVSGNCDVVIGIVNNTVYDPLQPELDSGGGSGGGQIYEGKLTAEGLRFGIVASRFNHALVDRLVEGAIDAIVRHGGREEDITLVRVPGSWEIPVAAGELARKEDIDAVIAIGVLIRGATPHFDYIASEVSKGLADLSLELRKPITFGVITADTLEQAIERAGTKHGNKGWEAALSAIEMANLFKSLR

SEQ ID NO: 8362 - protein, 1307 aa, Artificial Sequence
  SARS-CoV-2/Portugal/PT0035/2020__EPI_ISL_418020 spike protein (1-1147)(Q965C_S1003C) LumSynth construct
MFVFLVLLPLVSSQCVNLTTRTQLPPAYTNSFTRGVYYPDKVFRSSVLHSTQDLFLPFFSNVTWFHAIHVSGTNGTKRFDNPVLPFNDGVYFASTEKSNIIRGWIFGTTLDSKTQSLLIVNNATNVVIKVCEFQFCNDPFLGVYYHKNNKSWMESEFRVYSSANNCTFEYVSQPFLMDLEGKQGNFKNLREFVFKNIDGYFKIYSKHTPINLVRDLPQGFSALEPLVDLPIGINITRFQTLLALHRSYLTPGDSSSGWTAGAAAYYVGYLQPRTFLLKYNENGTITDAVDCALDPLSETKCTLKSFTVEKGIYQTSNFRVQPTESIVRFPNITNLCPFGEVFNATRFASVYAWNRKRISNCVADYSVLYNSASFSTFKCYGVSPTKLNDLCFTNVYADSFVIRGDEVRQIAPGQTGKIADYNYKLPDDFTGCVIAWNSNNLDSKVGGNYNYLYRLFRKSNLKPFERDISTEIYQAGSTPCNGVEGFNCYFPLQSYGFQPTNGVGYQPYRVVVLSFELLHAPATVCGPKKSTNLVKNKCVNFNFNGLTGTGVLTESNKKFLPFQQFGRDIADTTDAVRDPQTLEILDITPCSFGGVSVITPGTNTSNQVAVLYQDVNCTEVPVAIHADQLTPTWRVYSTGSNVFQTRAGCLIGAEHVNNSYECDIPIGAGICASYQTQTNSPRRARSVASQSIIAYTMSLGAENSVAYSNNSIAIPTNFTISVTTEILPVSMTKTSVDCTMYICGDSTECSNLLLQYGSFCTQLNRALTGIAVEQDKNTQEVFAQVKQIYKTPPIKDFGGFNFSQILPDPSKPSKRSFIEDLLFNKVTLADAGFIKQYGDCLGDISARDLICAQKFNGLTVLPPLLTDEMIAQYTSALLAGTITSGWTFGAGAALQIPFAMQMAYRFNGIGVTQNVLYENQKLIANQFNSAIGKIQDSLSSTASALGKLQDVVNQNAQALNTLVKCLSSNFGAISSVLNDILSRLDKVEAEVQIDRLITGRLQCLQTYVTQQLIRAAEIRASANLAATKMSECVLGQSKRVDFCGKGYHLMSFPQSAPHGVVFLHVTYVPAQEKNFTTAPAICHDGKAHFPREGVFVSNGTHWFVTQRNFYEPQIITTDNTFVSGNCDVVIGIVNNTVYDPLQPELDSGGGSGGGQIYEGKLTAEGLRFGIVASRFNHALVDRLVEGAIDAIVRHGGREEDITLVRVPGSWEIPVAAGELARKEDIDAVIAIGVLIRGATPHFDYIASEVSKGLADLSLELRKPITFGVITADTLEQAIERAGTKHGNKGWEAALSAIEMANLFKSLR

SEQ ID NO: 8363 - protein, 1307 aa, Artificial Sequence
  SARS-CoV-2/USA/NY-NYUMC7/2020__EPI_ISL_418192 spike protein (1-1147)(Q965C_S1003C) LumSynth construct
MFVFLVLLPLVSSQCVNLTTRTQLPPAYTNSFTRGVYYPDKVFRSSVLHSTQDLFLPFFSNVTWFHAIHVSGTNGTKRFDNPVLPFNDGVYFASTEKSNIIRGWIFGTTLDSKTQSLLIVNNATNVVIKVCEFQFCNDPFLGVYHHKNNKSWMESEFRVYSSANNCTFEYVSQPFLMDLEGKQGNFKNLREFVFKNIDGYFKIYSKHTPINLVRDLPQGFSALEPLVDLPIGINITRFQTLLALHRSYLTPGDSSSGWTAGAAAYYVGYLQPRTFLLKYNENGTITDAVDCALDPLSETKCTLKSFTVEKGIYQTSNFRVQPTESIVRFPNITNLCPFGEVFNATRFASVYAWNRKRISNCVADYSVLYNSASFSTFKCYGVSPTKLNDLCFTNVYADSFVIRGDEVRQIAPGQTGKIADYNYKLPDDFTGCVIAWNSNNLDSKVGGNYNYLYRLFRKSNLKPFERDISTEIYQAGSTPCNGVEGFNCYFPLQSYGFQPTNGVGYQPYRVVVLSFELLHAPATVCGPKKSTNLVKNKCVNFNFNGLTGTGVLTESNKKFLPFQQFGRDIADTTDAVRDPQTLEILDITPCSFGGVSVITPGTNTSNQVAVLYQGVNCTEVPVAIHADQLTPTWRVYSTGSNVFQTRAGCLIGAEHVNNSYECDIPIGAGICASYQTQTNSPRRARSVASQSIIAYTMSLGAENSVAYSNNSIAIPTNFTISVTTEILPVSMTKTSVDCTMYICGDSTECSNLLLQYGSFCTQLNRALTGIAVEQDKNTQEVFAQVKQIYKTPPIKDFGGFNFSQILPDPSKPSKRSFIEDLLFNKVTLADAGFIKQYGDCLGDIAARDLICAQKFNGLTVLPPLLTDEMIAQYTSALLAGTITSGWTFGAGAALQIPFAMQMAYRFNGIGVTQNVLYENQKLIANQFNSAIGKIQDSLSSTASALGKLQDVVNQNAQALNTLVKCLSSNFGAISSVLNDILSRLDKVEAEVQIDRLITGRLQCLQTYVTQQLIRAAEIRASANLAATKMSECVLGQSKRVDFCGKGYHLMSFPQSAPHGVVFLHVTYVPAQEKNFTTAPAICHDGKAHFPREGVFVSNGTHWFVTQRNFYEPQIITTDNTFVSGNCDVVIGIVNNTVYDPLQPELDSGGGSGGGQIYEGKLTAEGLRFGIVASRFNHALVDRLVEGAIDAIVRHGGREEDITLVRVPGSWEIPVAAGELARKEDIDAVIAIGVLIRGATPHFDYIASEVSKGLADLSLELRKPITFGVITADTLEQAIERAGTKHGNKGWEAALSAIEMANLFKSLR

SEQ ID NO: 8364 - protein, 1307 aa, Artificial Sequence
  SARS-CoV-2/Iceland/189/2020__EPI_ISL_417709 spike protein (1-1147)(Q965C_S1003C) LumSynth construct
MFVFLVLLPLVSSQCVNLTTRTQLPPAYTNSFTRGVYYPDKVFRSSVLHSTQDLFLPFFSNVTWFHAIHVSGTNGTKRFDNPVLPFNDGVYFASTEKSNIIRGWIFGTTLDSKTQSLLIVNNATNVVIKVCEFQFCNDPFLGVYYHKNNKSWMESEFRVYSSANNCTFEYVSQPFLMDLEGKQGNFKNLREFVFKNIDGYFKIYSKHTPINLVRDLPQGFSALEPLVDLPIGINITRFQTLLALHRSYLTPGDSSSGWTAGAAAYYVGYLQPRTFLLKYNENGTITDAVDCALDPLSETKCTLKSFTVEKGIYQTSNFRVQPTESIVRFPNITNLCPFGEVFNATRFASVYAWNRKRISNCVADYSVLYNSASFSTFKCYGVSPTKLNDLCFTNVYADSFVIRGDEVRQIAPGQTGKIADYNYKLPDDFTGCVIAWNSNNLDSKVGGNYNYLYRLFRKSNLKPFERDISTEIYQAGSTPCNGVEGFNCYFPLQSYGFQPTNGVGYQPYRVVVLSFELLHAPATVCGPKKSTNLVKNKCVNFNFNGLTGTGVLTESNKKFLPFQQFGRDIADTTDAVRDPQTLEILDITPCSFGGVSVITPGTNTSNQVAVLYQGVNCTEVPVAIHADQLTPTWRVYSTGSNVFQTRAGCLIGAEHVNNSYECDIPIGAGICASYQTQTNSPRRARSVASQSIIAYTMSLGAENSVAYSNNSIAIPTNFTISVTTEILPVSMTKTSVDCTMYICGDSTECSNLLLQYGSFCTQLNRALTGIAVEQDKNTQEVFAQVKQIYKTPPIKDFGGFNFSQILPDPSKPSKRSFIEDLLFNKVTLADAGFTKQYGDCLGDIAARDLICAQKFNGLTVLPPLLTDEMIAQYTSALLAGTITSGWTFGAGAALQIPFAMQMAYRFNGIGVTQNVLYENQKLIANQFNSAIGKIQDSLSSTASALGKLQDVVNQNAQALNTLVKCLSSNFGAISSVLNDILSRLDKVEAEVQIDRLITGRLQCLQTYVTQQLIRAAEIRASANLAATKMSECVLGQSKRVDFCGKGYHLMSFPQSAPHGVVFLHVTYVPAQEKNFTTAPAICHDGKAHFPREGVFVSNGTHWFVTQRNFYEPQIITTDNTFVSGNCDVVIGIVNNTVYDPLQPELDSGGGSGGGQIYEGKLTAEGLRFGIVASRFNHALVDRLVEGAIDAIVRHGGREEDITLVRVPGSWEIPVAAGELARKEDIDAVIAIGVLIRGATPHFDYIASEVSKGLADLSLELRKPITFGVITADTLEQAIERAGTKHGNKGWEAALSAIEMANLFKSLR

SEQ ID NO: 8365 - protein, 1307 aa, Artificial Sequence
  SARS-CoV-2/Australia/NSW56/2020__EPI_ISL_417408 spike protein (1-1147)(Q965C_S1003C) LumSynth construct
MFVFLVLLPLVSSQCVNLTTRTQLPPAYTNSFTRGVYYPDKVFRSSVLHSTQDLFLPFFSNVTWFHAIHVSGTNGTKRFDNPVLPFNDGVYFASTEKSNIIRGWIFGTTLDSKTQSLLIVNNATNVVIKVCEFQFCNDPFLGVYYHKNNKSWMESEFRVYSSANNCTFEYVSQPFLMDLEGKQGNFKNLREFVFKNIDGYFKIYSKHTPINLVRDLPQGFSALEPLVDLPIGINITRFQTLLALHRSYLTPGDSSSGWTAGAAAYYVGYLQPRTFLLKYNENGTITDAVDCALDPLSETKCTLKSFTVEKGIYQTSNFRVQPTESIVRFPNITNLCPFGEVFNATRFASVYAWNRKRISNCVADYSVLYNSASFSTFKCYGVSPTKLNDLCFTNVYADSFVIRGDEVRQIAPGQTGKIADYNYKLPDDFTGCVIAWNSNNLDSKVGGNYNYLYRLFRKSNLKPFERDISTEIYQAGSTPCNGVEGFNCYFPLQSYGFQPTNGVGYQPYRVVVLSFELLHAPATVCGPKKSTNLVKNKCVNFNFNGLTGTGVLTESNKKFLPFQQFGRDIADTTDAVRDPQTLEILDITPCSFGGVSVITPGTNTSNQVAVLYQDVNCTEVPVAIHADQLTPTWRVYSTGSNVFQTRAGCLIGAEHVNNSYECDIPIGAGICASYQTQTNSPRRARSVASQSIIAYTMSLGAENSVAYSNNSIAIPTNFTISVTTEILPVSMTKTSVDCTMYICGDSTECSNLLLQYGSFCTQLNRALTGIAVEQDKNTQEVFAQVKQIYKTPPIKDFGGFNFSQILPDSSKPSKRSFIEDLLFNKVTLADAGFIKQYGDCLGDIAARDLICAQKFNGLTVLPPLLTDEMIAQYTSALLAGTITSGWTFGAGAALQIPFAMQMAYRFNGIGVTQNVLYENQKLIANQFNSAIGKIQDSLSSTASALGKLQDVVNQNAQALNTLVKCLSSNFGAISSVLNDILSRLDKVEAEVQIDRLITGRLQCLQTYVTQQLIRAAEIRASANLAATKMSECVLGQSKRVDFCGKGYHLMSFPQSAPHGVVFLHVTYVPAQEKNFTTAPAICHDGKAHFPREGVFVSNGTHWFVTQRNFYEPQIITTDNTFVSGNCDVVIGIVNNTVYDPLQPELDSGGGSGGGQIYEGKLTAEGLRFGIVASRFNHALVDRLVEGAIDAIVRHGGREEDITLVRVPGSWEIPVAAGELARKEDIDAVIAIGVLIRGATPHFDYIASEVSKGLADLSLELRKPITFGVITADTLEQAIERAGTKHGNKGWEAALSAIEMANLFKSLR

SEQ ID NO: 8366 - protein, 1307 aa, Artificial Sequence
  SARS-CoV-2/Iceland/280/2020__EPI_ISL_417608 spike protein (1-1147)(Q965C_S1003C) LumSynth construct
MFVFLVLLPLVSSQCVNLTTRTQLPPAYTNSFTRGVYYPDKVFRSSVLHSTQDLFLPFFSNVTWFHAIHVSGTNGTKRFDNPVLPFNDGVYFASTEKSNIIRGWIFGTTLDSKTQSLLIVNNATNVVIKVCEFQFCNDPFLGVYYHKNNKSWMESEFRVYSSANNCTFEYVSQPFLMDLEGKQGNFKNLREFVFKNIDGYFKIYSKHTPINLVRDLPQGFSALEPLVDLPIGINITRFQTLLALHRSYLTPGDSSSGWTAGAAAYYVGYLQPRTFLLKYNENGTITDAVDCALDPLSETKCTLKSFTVEKGIYQTSNFRVQPTESIVRFPNITNLCPFGEVFNATRFASVYAWNRKRISNCVADYSVLYNSASFSTFKCYGVSPTKLNDLCFTNVYADSFVIRGDEVRQIAPGQTGKIADYNYKLPDDFTGCVIAWNSNNLDSKVGGNYNYLYRLFRKSNLKPFERDISTEIYQAGSTPCNGVEGFNCYFPLQSYGFQPTNGVGYQPYRVVVLSFELLHAPATVCGPKKSTNLVKNKCVNFNFNGLTGTGVLTESNKKFLPFQQFGRDIADTTDAVRDPQTLEILDITPCSFGGVSVITPGTNTSNQVAVLYQGVNCTEVPVAIHADQLTPTWRVYSTGSNVFQTRAGCLIGAEHVNNSYECDIPIGAGICASYHTQTNSPRRARSVASQSIIAYTMSLGAENSVAYSNNSIAIPTNFTISVTTEILPVSMTKTSVDCTMYICGDSTECSNLLLQYGSFCTQLNRALTGIAVEQDKNTQEVFAQVKQIYKTPPIKDFGGFNFSQILPDPSKPSKRSFIEDLLFNKVTLADAGFIKQYGDCLGDIAARDLICAQKFNGLTVLPPLLTDEMIAQYTSALLAGTITSGWTFGAGAALQIPFAMQMAYRFNGIGVTQNVLYENQKLIANQFNSAIGKIQDSLSSTASALGKLQDVVNQNAQALNTLVKCLSSNFGAISSVLNDILSRLDKVEAEVQIDRLITGRLQCLQTYVTQQLIRAAEIRASANLAATKMSECVLGQSKRVDFCGKGYHLMSFPQSAPHGVVFLHVTYVPAQEKNFTTAPAICHDGKAHFPREGVFVSNGTHWFVTQRNFYEPQIITTDNTFVSGNCDVVIGIVNNTVYDPLQPELDSGGGSGGGQIYEGKLTAEGLRFGIVASRFNHALVDRLVEGAIDAIVRHGGREEDITLVRVPGSWEIPVAAGELARKEDIDAVIAIGVLIRGATPHFDYIASEVSKGLADLSLELRKPITFGVITADTLEQAIERAGTKHGNKGWEAALSAIEMANLFKSLR

SEQ ID NO: 8367 - protein, 1307 aa, Artificial Sequence; identical to SEQ ID NO: 8322
  SARS-CoV-2/Iceland/247/2020__EPI_ISL_417575 spike protein (1-1147)(Q965C_S1003C) LumSynth construct

SEQ ID NO: 8368 - protein, 1307 aa, Artificial Sequence
  SARS-CoV-2/Iceland/238/2020__EPI_ISL_417566 spike protein (1-1147)(Q965C_S1003C) LumSynth construct
MFVFLVLLPLVSSQCVNLTTRTQLPPAYTNSFTRGVYYPDKVFRSSVLHSTQDLFLPFFSNVTWFHAIHVSGTNGTKRFDNPVLPFNDGVYFASTEKSNIIRGWIFGTTLDSKTQSLLIVNNATNVVIKVCEFQFCNDPFLGVYYHKNNKSWMESEFRVYSSANNCTFEYVSQPFLMDLEGKQGNFKNLREFVFKNIDGYFKIYSKHTPINLVRDLPQGFSALEPLVDLPIGINITRFQTLLALHRSYLTPGDSSSGWTAGAAAYYVGYLQPRTFLLKYNENGTITDAVDCALDPLSETKCTLKSFTVEKGIYQTSNFRVQPTESIVRFPNITNLCPFGEVFNATRFASVYAWNRKRISNCVADYSVLYNSASFSTFKCYGVSPTKLNDLCFTNVYADSFVIRGDEVRQIAPGQTGKIADYNYKLPDDFTGCVIAWNSNNLDSKVGGNYNYLYRLFRKSNLKPFERDISTEIYQAGSTPCNGVEGFNCYFPLQSYGFQPTNGVGYQPYRVVVLSFELLHAPATVCGPKKSTNLVKNKCVNFNFNGLTGTGVLTESNKKFLPFQQFGRDIADTTDAVRDPQTLEILDITPCSFGGVSVITPGTNTSNQVAVLYQGVNCTEVPVAIHADQLTPTWRVYSTGSNVFQTRAGCLIGAEHVNNSYECDIPIGAGICASYQTQTNSPRRARSVASQSIIAYTMSLGAENSVAYSNNSIAIPTNFTISVTTEILPVSMTKTSVDCTMYICGDSTECSNLLLQYGSFCTQLNRALTGIAVEQDKNTQEVFAQVKQIYKTPPIKDFGGFNFSQILPDPSKPSKRSFIEDLLFNKVTLADVGFIKQYGDCLGDIAARDLICAQKFNGLTVLPPLLTDEMIAQYTSALLAGTITSGWTFGAGAALQIPFAMQMAYRFNGIGVTQNVLYENQKLIANQFNSAIGKIQDSLSSTASALGKLQDVVNQNAQALNTLVKCLSSNFGAISSVLNDILSRLDKVEAEVQIDRLITGRLQCLQTYVTQQLIRAAEIRASANLAATKMSECVLGQSKRVDFCGKGYHLMSFPQSAPHGVVFLHVTYVPAQEKNFTTAPAICHDGKAHFPREGVFVSNGTHWFVTQRNFYEPQIITTDNTFVSGNCDVVIGIVNNTVYDPLQPELDSGGGSGGGQIYEGKLTAEGLRFGIVASRFNHALVDRLVEGAIDAIVRHGGREEDITLVRVPGSWEIPVAAGELARKEDIDAVIAIGVLIRGATPHFDYIASEVSKGLADLSLELRKPITFGVITADTLEQAIERAGTKHGNKGWEAALSAIEMANLFKSLR

SEQ ID NO: 8369 - protein, 1307 aa, Artificial Sequence
  SARS-CoV-2/Greece/16/2020__EPI_ISL_418265 spike protein (1-1147)(Q965C_S1003C) LumSynth construct
MFVFLVLLPLVSSQCVNLTTRTQLPPAYTNSFTRGVYYPDKVFRSSVLHSTQDLFLPFFSNVTWFHAIHVSGTNGTKRFDNPVLPFNDGVYFASTEKSNIIRGWIFGTTLDSKTQSLLIVNNATNVVIKVCEFQFCNDPFLGVYYHKNNKSWMESEFRVYSSANNCTFEYVSQPFLMDLEGKQGNFKNLREFVFKNVDGYFKIYSKHTPINLVRDLPQGFSALEPLVDLPIGINITRFQTLLALHRSYLTPGDSSSGWTAGAAAYYVGYLQPRTFLLKYNENGTITDAVDCALDPLSETKCTLKSFTVEKGIYQTSNFRVQPTESIVRFPNITNLCPFGEVFNATRFASVYAWNRKRISNCVADYSVLYNSASFSTFKCYGVSPTKLNDLCFTNVYADSFVIRGDEVRQIAPGQTGKIADYNYKLPDDFTGCVIAWNSNNLDSKVGGNYNYLYRLFRKSNLKPFERDISTEIYQAGSTPCNGVEGFNCYFPLQSYGFQPTNGVGYQPYRVVVLSFELLHAPATVCGPKKSTNLVKNKCVNFNFNGLTGTGVLTESNKKFLPFQQFGRDIADTTDAVRDPQTLEILDITPCSFGGVSVITPGTNTSNQVAVLYQDVNCTEVPVAIHADQLTPTWRVYSTGSNVFQTRAGCLIGAEHVNNSYECDIPIGAGICASYQTQTNSPRRARSVASQSIIAYTMSLGAENSVAYSNNSIAIPTNFTISVTTEILPVSMTKTSVDCTMYICGDSTECSNLLLQYGSFCTQLNRALTGIAVEQDKNTQEVFAQVKQIYKTPPIKDFGGFNFSQILPDPSKPSKRSFIEDLLFNKVTLADAGFIKQYGDCLGDIAARDLICAQKFNGLTVLPPLLTDEMIAQYTSALLAGTITSGWTFGAGAALQIPFAMQMAYRFNGIGVTQNVLYENQKLIANQFNSAIGKIQDSLSSTASALGKLQDVVNQNAQALNTLVKCLSSNFGAISSVLNDILSRLDKVEAEVQIDRLITGRLQCLQTYVTQQLIRAAEIRASANLAATKMSECVLGQSKRVDFCGKGYHLMSFPQSAPHGVVFLHVTYVPAQEKNFTTAPAICHDGKAHFPREGVFVSNGTHWFVTQRNFYEPQIITTDNTFVSGNCDVVIGIVNNTVYDPLQPELDSGGGSGGGQIYEGKLTAEGLRFGIVASRFNHALVDRLVEGAIDAIVRHGGREEDITLVRVPGSWEIPVAAGELARKEDIDAVIAIGVLIRGATPHFDYIASEVSKGLADLSLELRKPITFGVITADTLEQAIERAGTKHGNKGWEAALSAIEMANLFKSLR

SEQ ID NO: 8370 - protein, 1307 aa, Artificial Sequence
  SARS-CoV-2/Iceland/319/2020__EPI_ISL_417648 spike protein (1-1147)(Q965C_S1003C) LumSynth construct
MFVFLVLLPLVSSQCVNLTTRTQLPPAYTNSFTRGVYYPDKVFRSSVLHSTQDLFLPFFSNVTWFHAIHVSGTNGTKRFDNPVLPFNDGVYFASTEKSNIIRGWIFGTTLDSKTQSLLIVNNATNVVIKVCEFQFCNDPFLGVYYHKNNKSWMESEFRVYSSANNCTFEYVSQPFLIDLEGKQGNFKNLREFVFKNIDGYFKIYSKHTPINLVRDLPQGFSALEPLVDLPIGINITRFQTLLALHRSYLTPGDSSSGWTAGAAAYYVGYLQPRTFLLKYNENGTITDAVDCALDPLSETKCTLKSFTVEKGIYQTSNFRVQPTESIVRFPNITNLCPFGEVFNATRFASVYAWNRKRISNCVADYSVLYNSASFSTFKCYGVSPTKLNDLCFTNVYADSFVIRGDEVRQIAPGQTGKIADYNYKLPDDFTGCVIAWNSNNLDSKVGGNYNYLYRLFRKSNLKPFERDISTEIYQAGSTPCNGVEGFNCYFPLQSYGFQPTNGVGYQPYRVVVLSFELLHAPATVCGPKKSTNLVKNKCVNFNFNGLTGTGVLTESNKKFLPFQQFGRDIADTTDAVRDPQTLEILDITPCSFGGVSVITPGTNTSNQVAVLYQGVNCTEVPVAIHADQLTPTWRVYSTGSNVFQTRAGCLIGAEHVNNSYECDIPIGAGICASYQTQTNSPRRARSVASQSIIAYTMSLGAENSVAYSNNSIAIPTNFTISVTTEILPVSMTKTSVDCTMYICGDSTECSNLLLQYGSFCTQLNRALTGIAVEQDKNTQEVFAQVKQIYKTPPIKDFGGFNFSQILPDPSKPSKRSFIEDLLFNKVTLADAGFIKQYGDCLGDIAARDLICAQKFNGLTVLPPLLTDEMIAQYTSALLAGTITSGWTFGAGAALQIPFAMQMAYRFNGIGVTQNVLYENQKLIANQFNSAIGKIQDSLSSTASALGKLQDVVNQNAQALNTLVKCLSSNFGAISSVLNDILSRLDKVEAEVQIDRLITGRLQCLQTYVTQQLIRAAEIRASANLAATKMSECVLGQSKRVDFCGKGYHLMSFPQSAPHGVVFLHVTYVPAQEKNFTTAPAICHDGKAHFPREGVFVSNGTHWFVTQRNFYEPQIITTDNTFVSGNCDVVIGIVNNTVYDPLQPELDSGGGSGGGQIYEGKLTAEGLRFGIVASRFNHALVDRLVEGAIDAIVRHGGREEDITLVRVPGSWEIPVAAGELARKEDIDAVIAIGVLIRGATPHFDYIASEVSKGLADLSLELRKPITFGVITADTLEQAIERAGTKHGNKGWEAALSAIEMANLFKSLR

SEQ ID NO: 8371 - protein, 1307 aa, Artificial Sequence
  SARS-CoV-2/Congo/94/2020__EPI_ISL_417947 spike protein (1-1147)(Q965C_S1003C) LumSynth construct
MFVFLVLLPLVSSQCVNLTTRTQLPPAYTNSFTRGVYYPDKVFRSSVLHSTQDLFLPFFSNVTWFHAIHVSGTNGTKRFDNPVLPFNDGVYFASTEKSNIIRGWIFGTTLDSKTQSLLIVNNATNVVIKVCEFQFCNDPFLGVYYHKNNKSWMESEFRVYSSANNCTFEYVSQPFLMDLEGKQGNFKNLREFVFKNIDGYFKIYSKHTPINLVRDLPQGFSALEPLVDLPIGINITRFQTLLALHRSYLTPGDSSSGWTAGAAAYYVGYLQPRTFLLKYNENGTITDAVDCALDPLSETKCTLKSFTVEKGIYQTSNFRVQPTESIVRFPNITNLCPFGEVFNATRFASVYAWNRKRISNCVADYSVLYNSASFSTFKCYGVSPTKLNDLCFTNVYADSFVIRGDEVRQIAPGQTGKIADYNYKLPDDFTGCVIAWNSNNLDSKVGGNYNYLYRLFRKSNLKPFERDISTEIYQAGSTPCNGVEGFNCYFPLQSYGFQPTNGVGYQPYRVVVLSFELLHAPATVCGPKKSTNLVKNKCVNFNFNGLTGTGVLTESNKKFLPFQQFGRDIADTTDAVRDPQTLEILDITPCSFGGVSVITPGTNTSNQVAVLYQGVNCTEVPVAIHADQLTPTWRVYSTGSNVFQTRAGCLIGAEHVNNSYECDIPIGAGICASYQTQTNSPRRARSVASQSIIAYTMSLGAENSVAYSNNSIAIPTNFTISVTTEILPVSMTKTSVDCTMYICGDSTECSNLLLQYGSFCTQLNRALTGIAVEQDKNTQEVFAQVKQIYKTPPIKDFGGFNFSQILPDPSKPSKRSFIEDILFNKVTLADAGFIKQYGDCLGDIAARDLICAQKFNGLTVLPPLLTDEMIAQYTSALLAGTITSGWTFGAGAALQIPFAMQMAYRFNGIGVTQNVLYENQKLIANQFNSAIGKIQDSLSSTASALGKLQDVVNQNAQALNTLVKCLSSNFGAISSVLNDILSRLDKVEAEVQIDRLITGRLQCLQTYVTQQLIRAAEIRASANLAATKMSECVLGQSKRVDFCGKGYHLMSFPQSAPHGVVFLHVTYVPAQEKNFTTAPAICHDGKAHFPREGVFVSNGTHWFVTQRNFYEPQIITTDNTFVSGNCDVVIGIVNNTVYDPLQPELDSGGGSGGGQIYEGKLTAEGLRFGIVASRFNHALVDRLVEGAIDAIVRHGGREEDITLVRVPGSWEIPVAAGELARKEDIDAVIAIGVLIRGATPHFDYIASEVSKGLADLSLELRKPITFGVITADTLEQAIERAGTKHGNKGWEAALSAIEMANLFKSLR

SEQ ID NO: 8372 - protein, 1307 aa, Artificial Sequence
  SARS-CoV-2/Congo/158/2020__EPI_ISL_417950 spike protein (1-1147)(Q965C_S1003C) LumSynth construct
MFVFLVLLPLVSSQCVNLTTRTQLPPAYTNSFTRGVYYPDKVFRSSVLHSTQDLFLPFFSNVTWFHAIHVSGTNGTKRFDNPVLPFNDGVYFASTEKSNIIRGWIFGTTLDSKTQSLLIVNNATNVVIKVCEFQFCNDPFLGVYYHKNNKSWMESEFRVYSSANNCTFEYVSQPFLMDLEGKQGNFKNLREFVFKNIDGYFKIYSKHTPINLVRDLPQGFSALEPLVDLPIGINITRFQTLLALHRSYLTPGDSSSGWTAGAAAYYVGYLQPRTFLLKYNENGTITDAVDCALDPLSETKCTLKSFTVEKGIYQTSNFRVQPTESIVRFPNITNLCPFGEVFNATRFASVYAWNRKRISNCVADYSVLYNSASFSTFKCYGVSPTKLNDLCFTNVYADSFVIRGDEVRQIAPGQTGKIADYNYKLPDDFTGCVIAWNSNNLDSKVGGNYNYLYRLFRKSNLKPFERDISTEIYQAGSTPCNGVEGFNCYFPLQSYGFQPTNGVGYQPYRVVVLSFELLHAPATVCGPKKSTNLVKNKCVNFNFNGLTGTGVLTESNKKFLPFQQFGRDIADTTDAVRDPQTLEILDITPCSFGGVSVITPGTNTSNQVAVLYQDVNCTEVPVAIHADQLTPTWRVYSTGSNVFQTRAGCLIGAEHVNNSYECDIPIGAGICASYQTQTNSPRRARSVASQSIIAYTMSLGAENSVAYSNNSIAIPTNFTISVTTEILPVSMTKTSVDCTMYICGDSTECSNLLLQYGSFCTQLNRALTGIAVEQDKNTQEVFAQVKQIYKTPPIKDFGGFNFSQILPDPSKPSKRSFIEDLLFNKVTLADAGFIKQYGDCLGDIAARDLICAQKFNGLTVLPPLLTDEMIAQYTSALLAGTITSGWTFGAGAALQIPFAMQMAYRFNGIGVTQNVLYENQKLIANQFNSAIGKIQDSLSSTASALGKLQDVVNQNAQALNTLVKCLSSNFGAISSVLNDILSRLDKVEAEVQIDRLITGRLQCLQTYVTQQLIRAAEIRASANLAATKMSECVLGQSKRVDFCGKGYHLMSFPQSAPHGVVFLHVTYVPAQEKNFTTAPAICHDGKAHFPREGVFVSNGTHWFVTQRNFYEPQIITTDNTFLSGNCDVVIGIVNNTVYDPLQPELDSGGGSGGGQIYEGKLTAEGLRFGIVASRFNHALVDRLVEGAIDAIVRHGGREEDITLVRVPGSWEIPVAAGELARKEDIDAVIAIGVLIRGATPHFDYIASEVSKGLADLSLELRKPITFGVITADTLEQAIERAGTKHGNKGWEAALSAIEMANLFKSLR

SEQ ID NO: 8373 - protein, 1307 aa, Artificial Sequence
  SARS-CoV-2/USA/UT-00034/2020__EPI_ISL_417977 spike protein (1-1147)(Q965C_S1003C) LumSynth construct
MFVFLVLLPLVSSQCVNLTTRTQLPPAYTNSFTRGVYYPDKVFRSSVLHSTQDLFLPFFSNVTWFHAIHVSGTNGTKRFDNPVLPFNDGVYFASTEKSNIIRGWIFGTTLDSKTQSLLIVNNATNVVIKVCEFQFCNDPFLGVYYYKNNKSWMESEFRVYSSANNCTFEYVSQPFLMDLEGKQGNFKNLREFVFKNIDGYFKIYSKHTPINLVRDLPQGFSALEPLVDLPIGINITRFQTLLALHRSYLTPGDSSSGWTAGAAAYYVGYLQPRTFLLKYNENGTITDAVDCALDPLSETKCTLKSFTVEKGIYQTSNFRVQPTESIVRFPNITNLCPFGEVFNATRFASVYAWNRKRISNCVADYSVLYNSASFSTFKCYGVSPTKLNDLCFTNVYADSFVIRGDEVRQIAPGQTGKIADYNYKLPDDFTGCVIAWNSNNLDSKVGGNYNYLYRLFRKSNLKPFERDISTEIYQAGSTPCNGVEGFNCYFPLQSYGFQPTNGVGYQPYRVVVLSFELLHAPATVCGPKKSTNLVKNKCVNFNFNGLTGTGVLTESNKKFLPFQQFGRDIADTTDAVRDPQTLEILDITPCSFGGVSVITPGTNTSNQVAVLYQGVNCTEVPVAIHADQLTPTWRVYSTGSNVFQTRAGCLIGAEHVNNSYECDIPIGAGICASYQTQTNSPRRARSVASQSIIAYTMSLGAENSVAYSNNSIAIPTNFTISVTTEILPVSMTKTSVDCTMYICGDSTECSNLLLQYGSFCTQLNRALTGIAVEQDKNTQEVFAQVKQIYKTPPIKDFGGFNFSQILPDPSKPSKRSFIEDLLFNKVTLADAGFIKQYGDCLGDIAARDLICAQKFNGLTVLPPLLTDEMIAQYTSALLAGTITSGWTFGAGAALQIPFAMQMAYRFNGIGVTQNVLYENQKLIANQFNSAIGKIQDSLSSTASALGKLQDVVNQNAQALNTLVKCLSSNFGAISSVLNDILSRLDKVEAEVQIDRLITGRLQCLQTYVTQQLIRAAEIRASANLAATKMSECVLGQSKRVDFCGKGYHLMSFPQSAPHGVVFLHVTYVPAQEKNFTTAPAICHDGKAHFPREGVFVSNGTHWFVTQRNFYEPQIITTDNTFVSGNCDVVIGIVNNTVYDPLQPELDSGGGSGGGQIYEGKLTAEGLRFGIVASRFNHALVDRLVEGAIDAIVRHGGREEDITLVRVPGSWEIPVAAGELARKEDIDAVIAIGVLIRGATPHFDYIASEVSKGLADLSLELRKPITFGVITADTLEQAIERAGTKHGNKGWEAALSAIEMANLFKSLR

SEQ ID NO: 8374 - protein, 1307 aa, Artificial Sequence
  SARS-CoV-2/USA/UT-00033/2020__EPI_ISL_417976 spike protein (1-1147)(Q965C_S1003C) LumSynth construct
MFVFLVLLPLVSSQCVNLTTRTQLPPAYTNSFTRGVYYPDKVFRSSVLHSTQDLFLPFFSNVTWFHAIHVSGTNGTKRFDNPVLPFNDGVYFASTEKSNIIRGWIFGTTLDSKTQSLLIVNNATNVVIKVCEFQFCNDPFLGVYYHKNNKSWMESEFRVYSSANNCTFEYVSQPFLMDLEGKQGNFKNLREFVFKNIDGYFKIYSKHTPINLVRDLPQGFSALEPLVDLPIGINITRFQTLLALHRSYLTPGDSSSGLTAGAAAYYVGYLQPRTFLLKYNENGTITDAVDCALDPLSETKCTLKSFTVEKGIYQTSNFRVQPTESIVRFPNITNLCPFGEVFNATRFASVYAWNRKRISNCVADYSVLYNSASFSTFKCYGVSPTKLNDLCFTNVYADSFVIRGDEVRQIAPGQTGKIADYNYKLPDDFTGCVIAWNSNNLDSKVGGNYNYLYRLFRKSNLKPFERDISTEIYQAGSTPCNGVEGFNCYFPLQSYGFQPTNGVGYQPYRVVVLSFELLHAPATVCGPKKSTNLVKNKCVNFNFNGLTGTGVLTESNKKFLPFQQFGRDIADTTDAVRDPQTLEILDITPCSFGGVSVITPGTNTSNQVAVLYQGVNCTEVPVAIHADQLTPTWRVYSTGSNVFQTRAGCLIGAEHVNNSYECDIPIGAGICASYQTQTNSPRRARSVASQSIIAYTMSLGAENSVAYSNNSIAIPTNFTISVTTEILPVSMTKTSVDCTMYICGDSTECSNLLLQYGSFCTQLNRALTGIAVEQDKNTQEVFAQVKQIYKTPPIKDFGGFNFSQILPDPSKPSKRSFIEDLLFNKVTLADAGFIKQYGDCLGDIAARDLICAQKFNGLTVLPPLLTDEMIAQYTSALLAGTITSGWTFGAGAALQIPFAMQMAYRFNGIGVTQNVLYENQKLIANQFNSAIGKIQDSLSSTASALGKLQDVVNQNAQALNTLVKCLSSNFGAISSVLNDILSRLDKVEAEVQIDRLITGRLQCLQTYVTQQLIRAAEIRASANLAATKMSECVLGQSKRVDFCGKGYHLMSFPQSAPHGVVFLHVTYVPAQEKNFTTAPAICHDGKAHFPREGVFVSNGTHWFVTQRNFYEPQIITTDNTFVSGNCDVVIGIVNNTVYDPLQPELDSGGGSGGGQIYEGKLTAEGLRFGIVASRFNHALVDRLVEGAIDAIVRHGGREEDITLVRVPGSWEIPVAAGELARKEDIDAVIAIGVLIRGATPHFDYIASEVSKGLADLSLELRKPITFGVITADTLEQAIERAGTKHGNKGWEAALSAIEMANLFKSLR

SEQ ID NO: 8375 - protein, 1307 aa, Artificial Sequence
  SARS-CoV-2/USA/WI-13/2020__EPI_ISL_417516 spike protein (1-1147)(Q965C_S1003C) LumSynth construct
MFVFLVLLPLVSSQCVNLTTRTQLPPAYTNSFTRGVYYPDKVFRSSVLHSTQDLFLPFFSNVTWFHAIHVSGTNGTKRFDNPVLPFNDGVYFASTEKSNIIRGWIFGTTLDSKTQSLLIVNNATNVVIKVCEFQFCNDPFLGVYYHKNNKSWMESEFRVYSSANNCTFEYVSQPFLMDLEGKQGNFKNLREFVFKNIDGYFKIYSKHTPINLVRDLPQGFSALEPLVDLPIGINITRFQTLLALHRSYLTPGDSSSGWTAGAAAYYVGYLQPRTFLLKYNENGTITDAVDCALDPLSETKCTLKSFTVEKGIYQTSNFRVLPTESIVRFPNITNLCPFGEVFNATRFASVYAWNRKRISNCVADYSVLYNSASFSTFKCYGVSPTKLNDLCFTNVYADSFVIRGDEVRQIAPGQTGKIADYNYKLPDDFTGCVIAWNSNNLDSKVGGNYNYLYRLFRKSNLKPFERDISTEIYQAGSTPCNGVEGFNCYFPLQSYGFQPTNGVGYQPYRVVVLSFELLHAPATVCGPKKSTNLVKNKCVNFNFNGLTGTGVLTESNKKFLPFQQFGRDIADTTDAVRDPQTLEILDITPCSFGGVSVITPGTNTSNQVAVLYQGVNCTEVPVAIHADQLTPTWRVYSTGSNVFQTRAGCLIGAEHVNNSYECDIPIGAGICASYQTQTNSPRRARSVASQSIIAYTMSLGAENSVAYSNNSIAIPTNFTISVTTEILPVSMTKTSVDCTMYICGDSTECSNLLLQYGSFCTQLNRALTGIAVEQDKNTQEVFAQVKQIYKTPPIKDFGGFNFSQILPDPSKPSKRSFIEDLLFNKVTLADAGFIKQYGDCLGDIAARDLICAQKFNGLTVLPPLLTDEMIAQYTSALLAGTITSGWTFGAGAALQIPFAMQMAYRFNGIGVTQNVLYENQKLIANQFNSAIGKIQDSLSSTASALGKLQDVVNQNAQALNTLVKCLSSNFGAISSVLNDILSRLDKVEAEVQIDRLITGRLQCLQTYVTQQLIRAAEIRASANLAATKMSECVLGQSKRVDFCGKGYHLMSFPQSAPHGVVFLHVTYVPAQEKNFTTAPAICHDGKAHFPREGVFVSNGTHWFVTQRNFYEPQIITTDNTFVSGNCDVVIGIVNNTVYDPLQPELDSGGGSGGGQIYEGKLTAEGLRFGIVASRFNHALVDRLVEGAIDAIVRHGGREEDITLVRVPGSWEIPVAAGELARKEDIDAVIAIGVLIRGATPHFDYIASEVSKGLADLSLELRKPITFGVITADTLEQAIERAGTKHGNKGWEAALSAIEMANLFKSLR

SEQ ID NO: 8376 - protein, 1306 aa, Artificial Sequence
  SARS-CoV-2/India/1-27/2020__EPI_ISL_413522 spike protein (1-1146)(Q964C_S1002C) LumSynth construct
MFVFLVLLPLVSSQCVNLTTRTQLPPAYTNSFTRGVYYPDKVFRSSVLHSTQDLFLPFFSNVTWFHAIHVSGTNGTKRFDNPVLPFNDGVYFASTEKSNIIRGWIFGTTLDSKTQSLLIVNNATNVVIKVCEFQFCNDPFLGVYHKNNKSWMESEFRVYSSANNCTFEYVSQPFLMDLEGKQGNFKNLREFVFKNIDGYFKIYSKHTPINLVRDLPQGFSALEPLVDLPIGINITRFQTLLALHRSYLTPGDSSSGWTAGAAAYYVGYLQPRTFLLKYNENGTITDAVDCALDPLSETKCTLKSFTVEKGIYQTSNFRVQPTESIVRFPNITNLCPFGEVFNATRFASVYAWNRKRISNCVADYSVLYNSASFSTFKCYGVSPTKLNDLCFTNVYADSFVIRGDEVIQIAPGQTGKIADYNYKLPDDFTGCVIAWNSNNLDSKVGGNYNYLYRLFRKSNLKPFERDISTEIYQAGSTPCNGVEGFNCYFPLQSYGFQPTNGVGYQPYRVVVLSFELLHAPATVCGPKKSTNLVKNKCVNFNFNGLTGTGVLTESNKKFLPFQQFGRDIADTTDAVRDPQTLEILDITPCSFGGVSVITPGTNTSNQVAVLYQDVNCTEVPVAIHADQLTPTWRVYSTGSNVFQTRAGCLIGAEHVNNSYECDIPIGAGICASYQTQTNSPRRARSVASQSIIAYTMSLGAENSVAYSNNSIAIPTNFTISVTTEILPVSMTKTSVDCTMYICGDSTECSNLLLQYGSFCTQLNRALTGIAVEQDKNTQEVFAQVKQIYKTPPIKDFGGFNFSQILPDPSKPSKRSFIEDLLFNKVTLADAGFIKQYGDCLGDIAARDLICAQKFNGLTVLPPLLTDEMIAQYTSALLAGTITSGWTFGAGAALQIPFAMQMAYRFNGIGVTQNVLYENQKLIANQFNSAIGKIQDSLSSTASALGKLQDVVNQNAQALNTLVKCLSSNFGAISSVLNDILSRLDKVEAEVQIDRLITGRLQCLQTYVTQQLIRAAEIRASANLAATKMSECVLGQSKRVDFCGKGYHLMSFPQSAPHGVVFLHVTYVPAQEKNFTTAPAICHDGKAHFPREGVFVSNGTHWFVTQRNFYEPQIITTDNTFVSGNCDVVIGIVNNTVYDPLQPELDSGGGSGGGQIYEGKLTAEGLRFGIVASRFNHALVDRLVEGAIDAIVRHGGREEDITLVRVPGSWEIPVAAGELARKEDIDAVIAIGVLIRGATPHFDYIASEVSKGLADLSLELRKPITFGVITADTLEQAIERAGTKHGNKGWEAALSAIEMANLFKSLR

SEQ ID NO: 8377 - protein, 1301 aa, Artificial Sequence
  SARS-CoV-2/pangolin/Guangxi/P4L/2017__EPI_ISL_410538 spike protein (1-1141)(Q959C_S997C) LumSynth construct
MFVFLFVLPLVSSQCVNLTTRTGIPPGYTNSSTRGVYYPDKVFRSSILHLTQDLFLPFFSNVTWFNTINYQGGFKKFDNPVLPFNDGVYFASTEKSNIIRGWIFGTTLDARTQSLLIVNNATNVVIKVCEFQFCTDPFLGVYYHNNNKTWVENEFRVYSSANNCTFEYISQPFLMDLEGKQGNFKNLREFVFKNVDGYFKIYSKHTPIDLVRDLPRGFAALEPLVDLPIGINITRFQTLLALHRSYLTPGNLESGWTTGAAAYYVGYLQQRTFLLSYNQNGTITDAVDCSLDPLSETKCTLKSLTVEKGIYQTSNFRVQPTISIVRFPNITNLCPFGEVFNASKFASVYAWNRKRISNCVADYSVLYNSTSFSTFKCYGVSPTKLNDLCFTNVYADSFVVKGDEVRQIAPGQTGVIADYNYKLPDDFTGCVIAWNSVKQDALTGGNYGYLYRLFRKSKLKPFERDISTEIYQAGSTPCNGQVGLNCYYPLERYGFHPTTGVNYQPFRVVVLSFELLNGPATVCGPKLSTTLVKDKCVNFNFNGLTGTGVLTTSKKQFLPFQQFGRDISDTTDAVRDPQTLEILDITPCSFGGVSVITPGTNTSNQVAVLYQDVNCTEVPMAIHAEQLTPAWRVYSAGANVFQTRAGCLVGAEHVNNSYECDIPVGAGICASYHSMSSLRSVNQRSIIAYTMSLGAENSVAYSNNSIAIPTNFTISVTTEILPVSMTKTSVDCTMYICGDSIECSNLLLQYGSFCTQLNRALTGIAVEQDKNTQEVFAQVKQIYKTPPIKDFGGFNFSQILPDPSKPSKRSFIEDLLFNKVTLADAGFIKQYGDCLGDIAARDLICAQKFNGLTVLPPLLTDEMIAQYTSALLAGTITSGWTFGAGAALQIPFAMQMAYRFNGIGVTQNVLYENQKLIANQFNSAIGKIQDSLSSTASALGKLQDVVNQNAQALNTLVKCLSSNFGAISSVLNDILSRLDKVEAEVQIDRLITGRLQCLQTYVTQQLIRAAEIRASANLAATKMSECVLGQSKRVDFCGKGYHLMSFPQSAPHGVVFLHVTYVPAQEKNFTTAPAICHEGKAHFPREGVFVSNGTHWFITQRNFYEPQIITTDNTFVSGSCDVVIGIVNNTVYDPLQPELDSGGGSGGGQIYEGKLTAEGLRFGIVASRFNHALVDRLVEGAIDAIVRHGGREEDITLVRVPGSWEIPVAAGELARKEDIDAVIAIGVLIRGATPHFDYIASEVSKGLADLSLELRKPITFGVITADTLEQAIERAGTKHGNKGWEAALSAIEMANLFKSLR

SEQ ID NO: 8378 - protein, 1301 aa, Artificial Sequence
  SARS-CoV-2/pangolin/Guangxi/P5L/2017__EPI_ISL_410540 spike protein (1-1141)(Q959C_S997C) LumSynth construct
MFVFLFVLPLVSSQCVNLTTRTGIPPGYTNSSTRGVYYPDKVFRSSILHLTQDLFLPFFSNVTWFNTINYQGGFKKFDNPVLPFNDGVYFASTEKSNIIRGWIFGTTLDARTQSLLIVNNATNVVIKVCEFQFCTDPFLGVYYHNNNKTWVENEFRVYSSANNCTFEYISQPFLMDLEGKQGNFKNLREFVFKNVDGYFKIYSKHTPIDLVRDLPRGFAALEPLVDLPIGINITRFQTLLALHRSYLTPGKLESGWTTGAAAYYVGYLQQRTFLLSYNQNGTITDAVDCSLDPLSETKCTLKSLTVEKGIYQTSNFRVQPTISIVRFPNITNLCPFGEVFNASKFASVYAWNRKRISNCVADYSVLYNSTSFSTFKCYGVSPTKLNDLCFTNVYADSFVVKGDEVRQIAPGQTGVIADYNYKLPDDFTGCVIAWNSVKQDALTGGNYGYLYRLFRKSKLKPFERDISTEIYQAGSTPCNGQVGLNCYYPLERYGFHPTTGVNYQPFRVVVLSFELLNGPATVCGPKLSTTLVKDKCVNFNFNGLTGTGVLTTSKKQFLPFQQFGRDISDTTDAVRDPQTLEILDITPCSFGGVSVITPGTNTSNQVAVLYQDVNCTEVPMAIHAEQLTPAWRVYSAGANVFQTRAGCLVGAEHVNNSYECDIPVGAGICASYHSMSSFRSVNQRSIIAYTMSLGAENSVAYSNNSIAIPTNFTISVTTEILPVSMTKTSVDCTMYICGDSIECSNLLLQYGSFCTQLNRALTGIAVEQDKNTQEVFAQVKQIYKTPPIKDFGGFNFSQILPDPSKPSKRSFIEDLLFNKVTLADAGFIKQYGDCLGDIAARDLICAQKFNGLTVLPPLLTDEMIAQYTSALLAGTITSGWTFGAGAALQIPFAMQMAYRFNGIGVTQNVLYENQKLIANQFNSAIGKIQDSLSSTASALGKLQDVVNQNAQALNTLVKCLSSNFGAISSVLNDILSRLDKVEAEVQIDRLITGRLQCLQTYVTQQLIRAAEIRASANLAATKMSECVLGQSKRVDFCGKGYHLMSFPQSAPHGVVFLHVTYVPAQEKNFTTAPAICHEGKAHFPREGVFVSNGTHWFITQRNFYEPQIITTDNTFVSGSCDVVIGIVNNTVYDPLQPELDSGGGSGGGQIYEGKLTAEGLRFGIVASRFNHALVDRLVEGAIDAIVRHGGREEDITLVRVPGSWEIPVAAGELARKEDIDAVIAIGVLIRGATPHFDYIASEVSKGLADLSLELRKPITFGVITADTLEQAIERAGTKHGNKGWEAALSAIEMANLFKSLR

SEQ ID NO: 8379 - protein, 1301 aa, Artificial Sequence
  SARS-CoV-2/pangolin/Guangxi/P5E/2017__EPI_ISL_410541 spike protein (1-1141)(Q959C_S997C) LumSynth construct
MFVFLFVLPLVSSQCVNLTTRTGIPPGYTNSSTRGVYYPDKVFRSSILHLTQDLFLPFFSNVTWFNTITYQGGSKKFDNPVLPFNDGVYFASTEKSNIIRGWIFGTTLDARTQSLLIVNNATNVVIKVCEFQFCTDPFLGVYYHNNNKTWVENEFRVYSSANNCTFEYISQPFLMDLEGKQGNFKNLREFVFKNVDGYFKIYSKHTPIDLVRDLPRGFAALEPLVDLPIGINITRFQTLLALHRSYLTPGKLESGWTTGAAAYYVGYLQQRTFLLSYNQNGTITDAVDCSLDPLSETKCTLKSLTVEKGIYQTSNFRVQPTISIVRFPNITNLCPFGEVFNASKFASVYAWNRKRISNCVADYSVLYNSTSFSTFKCYGVSPTKLNDLCFTNVYADSFVVKGDEVRQIAPGQTGVIADYNYKLPDDFTGCVIAWNSVKQDALTGDNYGYLYRLFRKSKLKPFERDISTEIYQAGSTPCNGQVGLNCYYPLERYGFHPTTGVNYQPFRVVVLSFELLNGPATVCGPKLSTTLVKDKCVNFNFNGLTGTGVLTTSKKQFLPFQQFGRDISDTTDAVRDPQTLEILDITPCSFGGVSVITPGTNTSNQVAVLYQDVNCTEVPMAIHAEQLTPAWRVYSAGANVFQTRAGCLVGAEHVNNSYECDIPVGAGICASYHSMSSFRSVNQRSIIAYTMSLGAENSVAYSNNSIAIPTNFTISVTTEILPVSMTKTSVDCTMYICGDSIECSNLLLQYGSFCTQLNRALTGIAVEQDKNTQEVFAQVKQIYKTPPIKDFGGFNFSQILPDPSKPSKRSFIEDLLFNKVTLADAGFIKQYGDCLGDIAARDLICAQKFNGLTVLPPLLTDEMIAQYTSALLAGTITSGWTFGAGAALQIPFAMQMAYRFNGIGVTQNVLYENQKLIANQFNSAIGKIQDSLSSTASALGKLQDVVNQNAQALNTLVKCLSSNFGAISSVLNDILSRLDKVEAEVQIDRLITGRLQCLQTYVTQQLIRAAEIRASANLAATKMSECVLGQSKRVDFCGKGYHLMSFPQSAPHGVVFLHVTYVPAQEKNFTTAPAICHEGKAHFPREGVFVSNGTHWFITQRNFYEPQIITTDNTFVSGSCDVVIGIVNNTVYDPLQPELDSGGGSGGGQIYEGKLTAEGLRFGIVASRFNHALVDRLVEGAIDAIVRHGGREEDITLVRVPGSWEIPVAAGELARKEDIDAVIAIGVLIRGATPHFDYIASEVSKGLADLSLELRKPITFGVITADTLEQAIERAGTKHGNKGWEAALSAIEMANLFKSLR

SEQ ID NO: 8380 - protein, 1299 aa, Artificial Sequence
  SARS-CoV-2/pangolin/Guangxi/P1E/2017__EPI_ISL_410539 spike protein (1-1139)(Q957C_S995C) LumSynth construct
MFVFLFVLPLVSSQCVNLTTRTGIQPGYTNSSTRGVYYPDKVFRSSILHLTQDLFLPFFSNVTWFNTINYQGGFKKFDNPVLPFNDGVYFASTEKSNIIRGWIFGTTLDARTQSLLIVNNATNVVIKVCEFQFCTDPFLGVYYHNNNKTWVENEFRVYSSANNCTFEYISQPFLMDLEGKQGNFKNLREFVFKNVDGYFKIYSKHTPIDLVRDLPRGFAALEPLVDLPIGINITRFQTLLALHRSYLTPGKLESGWTTGAAAYYVGYLQQRTFLLSYNQNGTITDAVDCSLDPLSETKCTLKSLTVEKGIYQTSNFRVQPTISIVRFPNITNLCPFGEVFNASKFASVYAWNRKRISNCVADYSVLYNSTSFSTFKCYGVSPTKLNDLCFTNVYADSFVVKGDEVRQIAPGQTGVIADYNYKLPDDFTGCVIAWNSVKQDALTGGNYLYRLFRKSKLKPFERDISTEIYQAGSTPCNGQVGLNCYYPLERYGFHPTTGVNYQPFRVVVLSFELLNGPATVCGPKLSTTLVKDKCVNFNFNGLTGTGVLTTSKKQFLPFQQFGRDISDTTDAVRDPQTLEILDITPCSFGGVSVITPGTNTSNQVAVLYQDVNCTEVPMAIHAEQLTPAWRVYSAGANVFQTRAGCLVGAEHVNNSYECDIPVGAGICASYHSMSSLRSVNQRSIIAYTMSLGAENSVAYSNNSIAIPTNFTISVTTEILPVSMTKTSVDCTMYICGDSIECSNLLLQYGSFCTQLNRALTGIAVEQDKNTQEVFAQVKQIYKTPPIKDFGGFNFSQILPDPSKPSKRSFIEDLLFNKVTLADAGFIKQYGDCLGDIAARDLICAQKFNGLTVLPPLLTDEMIAQYTSALLAGTITSGWTFGAGAALQIPFAMQMAYRFNGIGVTQNVLYENQKLIANQFNSAIGKIQDSLSSTASALGKLQDVVNQNAQALNTLVKCLSSNFGAISSVLNDILSRLDKVEAEVQIDRLITGRLQCLQTYVTQQLIRAAEIRASANLAATKMSECVLGQSKRVDFCGKGYHLMSFPQSAPHGVVFLHVTYVPAQEKNFTTAPAICHEGKAHFPREGVFVSNGTHWFITQRNFYEPQIITTDNTFVSGSCDVVIGIVNNTVYDPLQPELDSGGGSGGGQIYEGKLTAEGLRFGIVASRFNHALVDRLVEGAIDAIVRHGGREEDITLVRVPGSWEIPVAAGELARKEDIDAVIAIGVLIRGATPHFDYIASEVSKGLADLSLELRKPITFGVITADTLEQAIERAGTKHGNKGWEAALSAIEMANLFKSLR

SEQ ID NO: 8381 - protein, 1307 aa, Artificial Sequence
  SARS-CoV-2/Wuhan/WIV05/2019__EPI_ISL_402128 spike protein (1-1147)(F970C_G999C) LumSynth construct
MFVFLVLLPLVSSQCVNLTTRTQLPPAYTNSFTRGVYYPDKVFRSSVLHSTQDLFLPFFSNVTWFHAIHVSGTNGTKRFDNPVLPFNDGVYFASTEKSNIIRGWIFGTTLDSKTQSLLIVNNATNVVIKVCEFQFCNDPFLGVYYHKNNKSWMESEFRVYSSANNCTFEYVSQPFLMDLEGKQGNFKNLREFVFKNIDGYFKIYSKHTPINLVRDLPQGFSALEPLVDLPIGINITRFQTLLALHRSYLTPGDSSSGWTAGAAAYYVGYLQPRTFLLKYNENGTITDAVDCALDPLSETKCTLKSFTVEKGIYQTSNFRVQPTESIVRFPNITNLCPFGEVFNATRFASVYAWNRKRISNCVADYSVLYNSASFSTFKCYGVSPTKLNDLCFTNVYADSFVIRGDEVRQIAPGQTGKIADYNYKLPDDFTGCVIAWNSNNLDSKVGGNYNYLYRLFRKSNLKPFERDISTEIYQAGSTPCNGVEGFNCYFPLQSYGFQPTNGVGYQPYRVVVLSFELLHAPATVCGPKKSTNLVKNKCVNFNFNGLTGTGVLTESNKKFLPFQQFGRDIADTTDAVRDPQTLEILDITPCSFGGVSVITPGTNTSNQVAVLYQDVNCTEVPVAIHADQLTPTWRVYSTGSNVFQTRAGCLIGAEHVNNSYECDIPIGAGICASYQTQTNSPRRARSVASQSIIAYTMSLGAENSVAYSNNSIAIPTNFTISVTTEILPVSMTKTSVDCTMYICGDSTECSNLLLQYGSFCTQLNRALTGIAVEQDKNTQEVFAQVKQIYKTPPIKDFGGFNFSQILPDPSKPSKRSFIEDLLFNKVTLADAGFIKQYGDCLGDIAARDLICAQKFNGLTVLPPLLTDEMIAQYTSALLAGTITSGWTFGAGAALQIPFAMQMAYRFNGIGVTQNVLYENQKLIANQFNSAIGKIQDSLSSTASALGKLQDVVNQNAQALNTLVKQLSSNCGAISSVLNDILSRLDKVEAEVQIDRLITCRLQSLQTYVTQQLIRAAEIRASANLAATKMSECVLGQSKRVDFCGKGYHLMSFPQSAPHGVVFLHVTYVPAQEKNFTTAPAICHDGKAHFPREGVFVSNGTHWFVTQRNFYEPQIITTDNTFVSGNCDVVIGIVNNTVYDPLQPELDSGGGSGGGQIYEGKLTAEGLRFGIVASRFNHALVDRLVEGAIDAIVRHGGREEDITLVRVPGSWEIPVAAGELARKEDIDAVIAIGVLIRGATPHFDYIASEVSKGLADLSLELRKPITFGVITADTLEQAIERAGTKHGNKGWEAALSAIEMANLFKSLR

SEQ ID NO: 8382 - protein, 1303 aa, Artificial Sequence
  SARS-CoV-2/bat/Yunnan/RaTG13/2013__EPI_ISL_402131 spike protein (1-1143)(F966C_G995C) LumSynth construct
MFVFLVLLPLVSSQCVNLTTRTQLPPAYTNSSTRGVYYPDKVFRSSVLHLTQDLFLPFFSNVTWFHAIHVSGTNGIKRFDNPVLPFNDGVYFASTEKSNIIRGWIFGTTLDSKTQSLLIVNNATNVVIKVCEFQFCNDPFLGVYYHKNNKSWMESEFRVYSSANNCTFEYVSQPFLMDLEGKQGNFKNLREFVFKNIDGYFKIYSKHTPINLVRDLPPGFSALEPLVDLPIGINITRFQTLLALHRSYLTPGDSSSGWTAGAAAYYVGYLQPRTFLLKYNENGTITDAVDCALDPLSETKCTLKSFTVEKGIYQTSNFRVQPTDSIVRFPNITNLCPFGEVFNATTFASVYAWNRKRISNCVADYSVLYNSTSFSTFKCYGVSPTKLNDLCFTNVYADSFVITGDEVRQIAPGQTGKIADYNYKLPDDFTGCVIAWNSKHIDAKEGGNFNYLYRLFRKANLKPFERDISTEIYQAGSKPCNGQTGLNCYYPLYRYGFYPTDGVGHQPYRVVVLSFELLNAPATVCGPKKSTNLVKNKCVNFNFNGLTGTGVLTESNKKFLPFQQFGRDIADTTDAVRDPQTLEILDITPCSFGGVSVITPGTNASNQVAVLYQDVNCTEVPVAIHADQLTPTWRVYSTGSNVFQTRAGCLIGAEHVNNSYECDIPIGAGICASYQTQTNSRSVASQSIIAYTMSLGAENSVAYSNNSIAIPTNFTISVTTEILPVSMTKTSVDCTMYICGDSTECSNLLLQYGSFCTQLNRALTGIAVEQDKNTQEVFAQVKQIYKTPPIKDFGGFNFSQILPDPSKPSKRSFIEDLLFNKVTLADAGFIKQYGDCLGDIAARDLICAQKFNGLTVLPPLLTDEMIAQYTSALLAGTITSGWTFGAGAALQIPFAMQMAYRFNGIGVTQNVLYENQKLIANQFNSAIGKIQDSLSSTASALGKLQDVVNQNAQALNTLVKQLSSNCGAISSVLNDILSRLDKVEAEVQIDRLITCRLQSLQTYVTQQLIRAAEIRASANLAATKMSECVLGQSKRVDFCGKGYHLMSFPQSAPHGVVFLHVTYVPAQEKNFTTAPAICHDGKAHFPREGVFVSNGTHWFVTQRNFYEPQIITTDNTFVSGSCDVVIGIVNNTVYDPLQPELDSGGGSGGGQIYEGKLTAEGLRFGIVASRFNHALVDRLVEGAIDAIVRHGGREEDITLVRVPGSWEIPVAAGELARKEDIDAVIAIGVLIRGATPHFDYIASEVSKGLADLSLELRKPITFGVITADTLEQAIERAGTKHGNKGWEAALSAIEMANLFKSLR

SEQ ID NO: 8383 - protein, 1307 aa, Artificial Sequence
  SARS-CoV-2/Wuhan/HBCDC-HB-01/2019__EPI_ISL_402132 spike protein (1-1147)(F970C_G999C) LumSynth construct
MFVFLVLLPLVSSQCVNLTTRTQLPPAYTNSITRGVYYPDKVFRSSVLHSTQDLFLPFFSNVTWFHAIHVSGTNGTKRFDNPVLPFNDGVYFASTEKSNIIRGWIFGTTLDSKTQSLLIVNNATNVVIKVCEFQFCNDPFLGVYYHKNNKSWMESEFRVYSSANNCTFEYVSQPFLMDLEGKQGNFKNLREFVFKNIDGYFKIYSKHTPINLVRDLPQGFSALEPLVDLPIGINITRFQTLLALHRSYLTPGDSSSGWTAGAAAYYVGYLQPRTFLLKYNENGTITDAVDCALDPLSETKCTLKSFTVEKGIYQTSNFRVQPTESIVRFPNITNLCPFGEVFNATRFASVYAWNRKRISNCVADYSVLYNSASFSTFKCYGVSPTKLNDLCFTNVYADSFVIRGDEVRQIAPGQTGKIADYNYKLPDDFTGCVIAWNSNNLDSKVGGNYNYLYRLFRKSNLKPFERDISTEIYQAGSTPCNGVEGFNCYFPLQSYGFQPTNGVGYQPYRVVVLSFELLHAPATVCGPKKSTNLVKNKCVNFNFNGLTGTGVLTESNKKFLPFQQFGRDIADTTDAVRDPQTLEILDITPCSFGGVSVITPGTNTSNQVAVLYQDVNCTEVPVAIHADQLTPTWRVYSTGSNVFQTRAGCLIGAEHVNNSYECDIPIGAGICASYQTQTNSPRRARSVASQSIIAYTMSLGAENSVAYSNNSIAIPTNFTISVTTEILPVSMTKTSVDCTMYICGDSTECSNLLLQYGSFCTQLNRALTGIAVEQDKNTQEVFAQVKQIYKTPPIKDFGGFNFSQILPDPSKPSKRSFIEDLLFNKVTLADAGFIKQYGDCLGDIAARDLICAQKFNGLTVLPPLLTDEMIAQYTSALLAGTITSGWTFGAGAALQIPFAMQMAYRFNGIGVTQNVLYENQKLIANQFNSAIGKIQDSLSSTASALGKLQDVVNQNAQALNTLVKQLSSNCGAISSVLNDILSRLDKVEAEVQIDRLITCRLQSLQTYVTQQLIRAAEIRASANLAATKMSECVLGQSKRVDFCGKGYHLMSFPQSAPHGVVFLHVTYVPAQEKNFTTAPAICHDGKAHFPREGVFVSNGTHWFVTQRNFYEPQIITTDNTFVSGNCDVVIGIVNNTVYDPLQPELDSGGGSGGGQIYEGKLTAEGLRFGIVASRFNHALVDRLVEGAIDAIVRHGGREEDITLVRVPGSWEIPVAAGELARKEDIDAVIAIGVLIRGATPHFDYIASEVSKGLADLSLELRKPITFGVITADTLEQAIERAGTKHGNKGWEAALSAIEMANLFKSLR

SEQ ID NO: 8384 - protein, 1307 aa, Artificial Sequence
  SARS-CoV-2/Guangdong/20SF028/2020__EPI_ISL_403936 spike protein (1-1147)(F970C_G999C) LumSynth construct
MFVFLVLLPLVSSQCVNLTTRTQLPPAYTNSFTRGVYYPDKVFRSSVLYSTQDLFLPFFSNVTWFHAIHVSGTNGTKRFDNPVLPFNDGVYFASTEKSNIIRGWIFGTTLDSKTQSLLIVNNATNVVIKVCEFQFCNDPFLGVYYHKNNKSWMESEFRVYSSANNCTFEYVSQPFLMDLEGKQGNFKNLREFVFKNIDGYFKIYSKHTPINLVRDLPQGFSALEPLVDLPIGINITRFQTLLALHRSYLTPGDSSSGWTAGAAAYYVGYLQPRTFLLKYNENGTITDAVDCALDPLSETKCTLKSFTVEKGIYQTSNFRVQPTESIVRFPNITNLCPFGEVFNATRFASVYAWNRKRISNCVADYSVLYNSASFSTFKCYGVSPTKLNDLCFTNVYADSFVIRGDEVRQIAPGQTGKIADYNYKLPDDFTGCVIAWNSNNLDSKVGGNYNYLYRLFRKSNLKPFERDISTEIYQAGSTPCNGVEGFNCYFPLQSYGFQPTNGVGYQPYRVVVLSFELLHAPATVCGPKKSTNLVKNKCVNFNFNGLTGTGVLTESNKKFLPFQQFGRDIADTTDAVRDPQTLEILDITPCSFGGVSVITPGTNTSNQVAVLYQDVNCTEVPVAIHADQLTPTWRVYSTGSNVFQTRAGCLIGAEHVNNSYECDIPIGAGICASYQTQTNSPRRARSVASQSIIAYTMSLGAENSVAYSNNSIAIPTNFTISVTTEILPVSMTKTSVDCTMYICGDSTECSNLLLQYGSFCTQLNRALTGIAVEQDKNTQEVFAQVKQIYKTPPIKDFGGFNFSQILPDPSKPSKRSFIEDLLFNKVTLADAGFIKQYGDCLGDIAARDLICAQKFNGLTVLPPLLTDEMIAQYTSALLAGTITSGWTFGAGAALQIPFAMQMAYRFNGIGVTQNVLYENQKLIANQFNSAIGKIQDSLSSTASALGKLQDVVNQNAQALNTLVKQLSSNCGAISSVLNDILSRLDKVEAEVQIDRLITCRLQSLQTYVTQQLIRAAEIRASANLAATKMSECVLGQSKRVDFCGKGYHLMSFPQSAPHGVVFLHVTYVPAQEKNFTTAPAICHDGKAHFPREGVFVSNGTHWFVTQRNFYEPQIITTDNTFVSGNCDVVIGIVNNTVYDPLQPELDSGGGSGGGQIYEGKLTAEGLRFGIVASRFNHALVDRLVEGAIDAIVRHGGREEDITLVRVPGSWEIPVAAGELARKEDIDAVIAIGVLIRGATPHFDYIASEVSKGLADLSLELRKPITFGVITADTLEQAIERAGTKHGNKGWEAALSAIEMANLFKSLR

SEQ ID NO: 8385 - protein, 1307 aa, Artificial Sequence
  SARS-CoV-2/Shenzhen/SZTH-001/2020__EPI_ISL_406592 spike protein (1-1147)(F970C_G999C) LumSynth construct
MFVFLVLLPLVSSQCVNLTTRTQLPPAYTNSFTRGVYYPDKVFRSSVLHSTQDLFLPFFSNVTWFHAIHVSGTNGTKRFDNPVLPFNDGVYFASTEKSNIIRGWIFGTTLDSKTQSLLIVNNATNVVIKVCEFQFCNDPFLGVYYHKNNKSWMESEFRVYSSANNCTFEYVSQPFLMDLEGKQGNFKNLREFVFKNIDGYFKIYSKHTPINLVRDLPQGFSALEPLVDLPIGINITRFQTLLALHRSYLTPGDSSSGWTAGAAAYYVGYLQPRTFLLKYNENGTITDAVDCALDPLSETKCTLKSFTVEKGIYQTSNFRVQPTESIVRFPNITNLCPFGEVFNATRFASVYAWNRKRISNCVADYSVLYNSASFSTFKCYGVSPTKLNDLCFTNVYADSFVIRGDEVRQIAPGQTGKIADYNYKLPDDFTGCVIAWNSNNLDSKVGGNYNYLYRLFRKSNLKPFERDISTEIYQAGSTPCNGVEGFNCYFPLQSYGFQPTNGVGYQPYRVVVLSFELLHAPATVCGPKKSTNLVKNKCVNFNFNGLTGTGVLTESNKKFLPFQQFGRDIADTTDAVRDPQTLEILDITPCSFGGVSVITPGTNTSNQVAVLYQDVNCTEVPVAIHADQLTPTWRVYSTGSNVFQTRAGCLIGAEHVNNSYECDIPIGAGICASYQTQTNSPRRARSVASQSIIAYTMSLGAENSVAYSNNSIAIPTNFTISVTTEILPVSMTKTSVDCTMYICGDSTECSNLLLQYGSFCTQLNRALTGIAVEQDKNTQEVFAQVKQIYKTPPIKDFGGFNFSQILPDPSKPSKRSFIEDLLFNKVTLADAGFIKQYGDCLGDIAARDLICAQKFNGLTVLPPLLTDEMIAQYTSALLAGTITSGWTFGAGAALQIPFAMQMAYRFNGIGVTQNVLYENQKLIANQFNSAIGKIQDSLSSTASALGKLQDVVNQNAQALNTLVKQLSSNCGAISSVLNDILSRLDKVEAEVQIDRLITCRLQSLQTYVTQQLIRAAEIRASANLAATKMSECVLGQSKRVDFCGKGYHLMSFPQSAPHGVVFLHVTYVPAQEKNFTTAPAICHDGKAHFPREGVFVSNGTHWFVTQRNFYEPQIITTDNTFVSGNCDVLIGIVNNTVYDPLQPELDSGGGSGGGQIYEGKLTAEGLRFGIVASRFNHALVDRLVEGAIDAIVRHGGREEDITLVRVPGSWEIPVAAGELARKEDIDAVIAIGVLIRGATPHFDYIASEVSKGLADLSLELRKPITFGVITADTLEQAIERAGTKHGNKGWEAALSAIEMANLFKSLR

SEQ ID NO: 8386 - protein, 1307 aa, Artificial Sequence
  SARS-CoV-2/Shenzhen/SZTH-004/2020__EPI_ISL_406595 spike protein (1-1147)(F970C_G999C) LumSynth construct
MFVFLVLLPLVSSQCVNLTTRTQLPPAYTNSFTRGVYYPDKVFRSSVLHSTQDLFLPFFSNVTWFHAIHVSGTNGTKRFDNPVLPFNDGVYFASTEKSNIIRGWIFGTTLDSKTQSLLIVNNATNVVIKVCEFQFCNDPFLGVYYHKNNKSWMESEFRVYSSANNCTFEYVSQPFLMDLEGKQGNFKNLREFVFKNIDGYFKIYSKHTPINLVRDLPQGFSALEPLVDLPIGINITRFQTLLALHRSYLTPGDSSSGWTAGAAAYYVGYLQPRTFLLKYNENGTITDAVDCALDPLSETKCTLKSFTVEKGIYQTSNFRVQPTESIVRFPNITNLCPFGEVFNATRFASVYAWDRKRISNCVAYYSVLYNSASFSTFKCYGVSPTKLNDLCFTNVYADSFVIRGDEVRQIAPGQTGKIADYNYKLPDDFTGCVIAWNSNNLDSKVGGNYNYLYRLFRKSNLKPFERDISTEIYQAGSTPCNGVEGFNCYFPLQSYGFQPTNGVGYQPYRVVVLSFELLHAPATVCGPKKSTNLVKNKCVNFNFNGLTGTGVLTESNKKFLPFQQFGRDIADTTDAVRDPQTLEILDITPCSFGGVSVITPGTNTSNQVAVLYQDVNCTEVPVAIHADQLTPTWRVYSTGSNVFQTRAGCLIGAEHVNNSYECDIPIGAGICASYQTQTNSPRRARSVASQSIIAYTMSLGAENSVAYSNNSIAIPTNFTISVTTEILPVSMTKTSVDCTMYICGDSTECSNLLLQYGSFCTQLNRALTGIAVEQDKNTQEVFAQVKQIYKTPPIKDFGGFNFSQILPDPSKPSKRSFIEDLLFNKVTLADAGFIKQYGDCLGDIAARDLICAQKFNGLTVLPPLLTDEMIAQYTSALLAGTITSGWTFGAGAALQIPFAMQMAYRFNGIGVTQNVLYENQKLIANQFNSAIGKIQDSLSSTASALGKLQDVVNQNAQALNTLVKQLSSNCGAISSVLNDILSRLDKVEAEVQIDRLITCRLQSLQTYVTQQLIRAAEIRASANLAATKMSECVLGQSKRVDFCGKGYHLMSFPQSAPHGVVFLHVTYVPAQEKNFTTAPAICHDGKAHFPREGVFVSNGTHWFVTQRNFYEPQIITTDNTFVSGNCDVVIGIVNNTVYDPLQPELDSGGGSGGGQIYEGKLTAEGLRFGIVASRFNHALVDRLVEGAIDAIVRHGGREEDITLVRVPGSWEIPVAAGELARKEDIDAVIAIGVLIRGATPHFDYIASEVSKGLADLSLELRKPITFGVITADTLEQAIERAGTKHGNKGWEAALSAIEMANLFKSLR

SEQ ID NO: 8387 - protein, 1307 aa, Artificial Sequence
  SARS-CoV-2/France/IDF0372/2020__EPI_ISL_406596 spike protein (1-1147)(F970C_G999C) LumSynth construct
MFVFLVLLPLVSSQCVNLTTRTQLPPAYTNSFTRGVYYPDKVFRSSVLHSTQDLFLPFFSNVTWFHAIHVSGTNGTKRFDNPVLPFNDGVYFASTEKSNIIRGWIFGTTLDSKTQSLLIVNNATNVVIKVCEFQFCNDPFLGVYYHKNNKSWMESEFRVYSSANNCTFEYVSQPFLMDLEGKQGNFKNLREFVFKNIDGYFKIYSKHTPINLVRDLPQGFSALEPLVDLPIGINITRFQTLLALHRSYLTPGDSSSGWTAGAAAYYVGYLQPRTFLLKYNENGTITDAVDCALDPLSETKCTLKSFTVEKGIYQTSNFRVQPTESIVRFPNITNLCPFGEVFNATRFASVYAWNRKRISNCVADYSFLYNSASFSTFKCYGVSPTKLNDLCFTNVYADSFVIRGDEVRQIAPGQTGKIADYNYKLPDDFTGCVIAWNSNNLDSKVGGNYNYLYRLFRKSNLKPFERDISTEIYQAGSTPCNGVEGFNCYFPLQSYGFQPTNGVGYQPYRVVVLSFELLHAPATVCGPKKSTNLVKNKCVNFNFNGLTGTGVLTESNKKFLPFQQFGRDIADTTDAVRDPQTLEILDITPCSFGGVSVITPGTNTSNQVAVLYQDVNCTEVPVAIHADQLTPTWRVYSTGSNVFQTRAGCLIGAEHVNNSYECDIPIGAGICASYQTQTNSPRRARSVASQSIIAYTMSLGAENSVAYSNNSIAIPTNFTISVTTEILPVSMTKTSVDCTMYICGDSTECSNLLLQYGSFCTQLNRALTGIAVEQDKNTQEVFAQVKQIYKTPPIKDFGGFNFSQILPDPSKPSKRSFIEDLLFNKVTLADAGFIKQYGDCLGDIAARDLICAQKFNGLTVLPPLLTDEMIAQYTSALLAGTITSGWTFGAGAALQIPFAMQMAYRFNGIGVTQNVLYENQKLIANQFNSAIGKIQDSLSSTASALGKLQDVVNQNAQALNTLVKQLSSNCGAISSVLNDILSRLDKVEAEVQIDRLITCRLQSLQTYVTQQLIRAAEIRASANLAATKMSECVLGQSKRVDFCGKGYHLMSFPQSAPHGVVFLHVTYVPAQEKNFTTAPAICHDGKAHFPREGVFVSNGTHWFVTQRNFYEPQIITTDNTFVSGNCDVVIGIVNNTVYDPLQPELDSGGGSGGGQIYEGKLTAEGLRFGIVASRFNHALVDRLVEGAIDAIVRHGGREEDITLVRVPGSWEIPVAAGELARKEDIDAVIAIGVLIRGATPHFDYIASEVSKGLADLSLELRKPITFGVITADTLEQAIERAGTKHGNKGWEAALSAIEMANLFKSLR

SEQ ID NO: 8388 - protein, 1307 aa, Artificial Sequence
  SARS-CoV-2/Australia/VIC01/2020__EPI_ISL_406844 spike protein (1-1147)(F970C_G999C) LumSynth construct
MFVFLVLLPLVSSQCVNLTTRTQLPPAYTNSFTRGVYYPDKVFRSSVLHSTQDLFLPFFSNVTWFHAIHVSGTNGTKRFDNPVLPFNDGVYFASTEKSNIIRGWIFGTTLDSKTQSLLIVNNATNVVIKVCEFQFCNDPFLGVYYHKNNKSWMESEFRVYSSANNCTFEYVSQPFLMDLEGKQGNFKNLREFVFKNIDGYFKIYSKHTPINLVRDLPQGFSALEPLVDLPIGINITRFQTLLALHRRYLTPGDSSSGWTAGAAAYYVGYLQPRTFLLKYNENGTITDAVDCALDPLSETKCTLKSFTVEKGIYQTSNFRVQPTESIVRFPNITNLCPFGEVFNATRFASVYAWNRKRISNCVADYSVLYNSASFSTFKCYGVSPTKLNDLCFTNVYADSFVIRGDEVRQIAPGQTGKIADYNYKLPDDFTGCVIAWNSNNLDSKVGGNYNYLYRLFRKSNLKPFERDISTEIYQAGSTPCNGVEGFNCYFPLQSYGFQPTNGVGYQPYRVVVLSFELLHAPATVCGPKKSTNLVKNKCVNFNFNGLTGTGVLTESNKKFLPFQQFGRDIADTTDAVRDPQTLEILDITPCSFGGVSVITPGTNTSNQVAVLYQDVNCTEVPVAIHADQLTPTWRVYSTGSNVFQTRAGCLIGAEHVNNSYECDIPIGAGICASYQTQTNSPRRARSVASQSIIAYTMSLGAENSVAYSNNSIAIPTNFTISVTTEILPVSMTKTSVDCTMYICGDSTECSNLLLQYGSFCTQLNRALTGIAVEQDKNTQEVFAQVKQIYKTPPIKDFGGFNFSQILPDPSKPSKRSFIEDLLFNKVTLADAGFIKQYGDCLGDIAARDLICAQKFNGLTVLPPLLTDEMIAQYTSALLAGTITSGWTFGAGAALQIPFAMQMAYRFNGIGVTQNVLYENQKLIANQFNSAIGKIQDSLSSTASALGKLQDVVNQNAQALNTLVKQLSSNCGAISSVLNDILSRLDKVEAEVQIDRLITCRLQSLQTYVTQQLIRAAEIRASANLAATKMSECVLGQSKRVDFCGKGYHLMSFPQSAPHGVVFLHVTYVPAQEKNFTTAPAICHDGKAHFPREGVFVSNGTHWFVTQRNFYEPQIITTDNTFVSGNCDVVIGIVNNTVYDPLQPELDSGGGSGGGQIYEGKLTAEGLRFGIVASRFNHALVDRLVEGAIDAIVRHGGREEDITLVRVPGSWEIPVAAGELARKEDIDAVIAIGVLIRGATPHFDYIASEVSKGLADLSLELRKPITFGVITADTLEQAIERAGTKHGNKGWEAALSAIEMANLFKSLR

SEQ ID NO: 8389 - protein, 1307 aa, Artificial Sequence
  SARS-CoV-2/Germany/BavPat1/2020__EPI_ISL_406862 spike protein (1-1147)(F970C_G999C) LumSynth construct
MFVFLVLLPLVSSQCVNLTTRTQLPPAYTNSFTRGVYYPDKVFRSSVLHSTQDLFLPFFSNVTWFHAIHVSGTNGTKRFDNPVLPFNDGVYFASTEKSNIIRGWIFGTTLDSKTQSLLIVNNATNVVIKVCEFQFCNDPFLGVYYHKNNKSWMESEFRVYSSANNCTFEYVSQPFLMDLEGKQGNFKNLREFVFKNIDGYFKIYSKHTPINLVRDLPQGFSALEPLVDLPIGINITRFQTLLALHRSYLTPGDSSSGWTAGAAAYYVGYLQPRTFLLKYNENGTITDAVDCALDPLSETKCTLKSFTVEKGIYQTSNFRVQPTESIVRFPNITNLCPFGEVFNATRFASVYAWNRKRISNCVADYSVLYNSASFSTFKCYGVSPTKLNDLCFTNVYADSFVIRGDEVRQIAPGQTGKIADYNYKLPDDFTGCVIAWNSNNLDSKVGGNYNYLYRLFRKSNLKPFERDISTEIYQAGSTPCNGVEGFNCYFPLQSYGFQPTNGVGYQPYRVVVLSFELLHAPATVCGPKKSTNLVKNKCVNFNFNGLTGTGVLTESNKKFLPFQQFGRDIADTTDAVRDPQTLEILDITPCSFGGVSVITPGTNTSNQVAVLYQGVNCTEVPVAIHADQLTPTWRVYSTGSNVFQTRAGCLIGAEHVNNSYECDIPIGAGICASYQTQTNSPRRARSVASQSIIAYTMSLGAENSVAYSNNSIAIPTNFTISVTTEILPVSMTKTSVDCTMYICGDSTECSNLLLQYGSFCTQLNRALTGIAVEQDKNTQEVFAQVKQIYKTPPIKDFGGFNFSQILPDPSKPSKRSFIEDLLFNKVTLADAGFIKQYGDCLGDIAARDLICAQKFNGLTVLPPLLTDEMIAQYTSALLAGTITSGWTFGAGAALQIPFAMQMAYRFNGIGVTQNVLYENQKLIANQFNSAIGKIQDSLSSTASALGKLQDVVNQNAQALNTLVKQLSSNCGAISSVLNDILSRLDKVEAEVQIDRLITCRLQSLQTYVTQQLIRAAEIRASANLAATKMSECVLGQSKRVDFCGKGYHLMSFPQSAPHGVVFLHVTYVPAQEKNFTTAPAICHDGKAHFPREGVFVSNGTHWFVTQRNFYEPQIITTDNTFVSGNCDVVIGIVNNTVYDPLQPELDSGGGSGGGQIYEGKLTAEGLRFGIVASRFNHALVDRLVEGAIDAIVRHGGREEDITLVRVPGSWEIPVAAGELARKEDIDAVIAIGVLIRGATPHFDYIASEVSKGLADLSLELRKPITFGVITADTLEQAIERAGTKHGNKGWEAALSAIEMANLFKSLR

SEQ ID NO: 8390 - protein, 1307 aa, Artificial Sequence
  SARS-CoV-2/Wuhan/HBCDC-HB-02/2020__EPI_ISL_412978 spike protein (1-1147)(F970C_G999C) LumSynth construct
MFVFLVLLPLVSSQCVNLTTRTQLPPAYTNSFTRGVYYPDKVFRSSVLHSTQDLFLPFFSNVTWFHAIHVSGTNGTKRFDNPVLPFNDGVYFASTEKSNIIRGWIFGTTLDSKTQSLLIVNNATNVVIKVCEFQFCNDPFLGVYYHKNNKSWMESEFRVYSSANNCTFEYVSQPFLMDLEGKQGNFKNLREFVFKNIDGYFKIYSKHTPINLVRDLPQGFSALEPLVDLPIGINITRFQTLLALHRSYLTPGDSSSGWTAGAAAYYVGYLQPRTFLLKYNENGTITDAVDCALDPLSETKCTLKSFTVEKGIYQTSNFRVQPTESIVRFPNITNLCPFGEVFNATRFASVYAWNRKRISNCVADYSVLYNSASFSTFKCYGVSPTKLNDLCFTNVYADSFVIRGDEVRQIAPGQTGKIADYNYKLPDDFTGCVIAWNSNNLDSKVGGNYNYLYRLFRKSNLKPFERDISTEIYQAGSTPCNGVEGFNCYFPLQSYGFQPTNGVGYQPYRVVVLSFELLHAPATVCGPKKSTNLVKNKCVNFNFNGLTGTGVLTESNKKFLPFQQFGRDIADTTDAVRDPQTLEILDITPCSFGGVSVITPGTNTSNQVAVLYQDVNCTEVPVAIHADQLTPTWRVYSTGSNVFQTRAGCLIGAEHVNNSYECDIPIGAGICASYQTQTNSPRRARSVASQSIIAYTMSLGAENSVAYSNNSIAIPTNFTISVTTEILPVSMTKTSVDCTMYICGDSTECSNFLLQYGSFCTQLNRALTGIAVEQDKNTQEVFAQVKQIYKTPPIKDFGGFNFSQILPDPSKPSKRSFIEDLLFNKVTLADAGFIKQYGDCLGDIAARDLICAQKFNGLTVLPPLLTDEMIAQYTSALLAGTITSGWTFGAGAALQIPFAMQMAYRFNGIGVTQNVLYENQKLIANQFNSAIGKIQDSLSSTASALGKLQDVVNQNAQALNTLVKQLSSNCGAISSVLNDILSRLDKVEAEVQIDRLITCRLQSLQTYVTQQLIRAAEIRASANLAATKMSECVLGQSKRVDFCGKGYHLMSFPQSAPHGVVFLHVTYVPAQEKNFTTAPAICHDGKAHFPREGVFVSNGTHWFVTQRNFYEPQIITTDNTFVSGNCDVVIGIVNNTVYDPLQPELDSGGGSGGGQIYEGKLTAEGLRFGIVASRFNHALVDRLVEGAIDAIVRHGGREEDITLVRVPGSWEIPVAAGELARKEDIDAVIAIGVLIRGATPHFDYIASEVSKGLADLSLELRKPITFGVITADTLEQAIERAGTKHGNKGWEAALSAIEMANLFKSLR

SEQ ID NO: 8391 - protein, 1307 aa, Artificial Sequence
  SARS-CoV-2/Australia/QLD02/2020__EPI_ISL_407896 spike protein (1-1147)(F970C_G999C) LumSynth construct
MFVFLVLLPLVSSQCVNLTTRTQLPPAYTNSFTRGVYYPDKVFRSSVLHSTQDLFLPFFSNVTWFHAIHVSGTNGTKRFDNPVLPFNDGVYFASTEKSNIIRGWIFGTTLDSKTQSLLIVNNATNVVIKVCEFQFCNDPFLGVYYHKNNKSWMESEFRVYSSANNCTFEYVSQPFLMDLEGKQGNFKNLREFVFKNIDGYFKIYSKHTPINLVRDLPQGFSALEPLVDLPIGINITRFQTLLALHRSYLTPGDSSSGWTAGAAAYYVGYLQPRTFLLKYNENGTITDAVDCALDPLSETKCTLKSFTVEKGIYQTSNFRVQPTESIVRFPNITNLCPFGEVFNATRFASVYAWNRKRISNCVADYSVLYNSASFSTFKCYGVSPTKLNDLCFTNVYADSFVIRGDEVRQIAPGQTGKIADYNYKLPDDFTGCVIAWNSNNLDSKVGGNYNYLYRLFRKSNLKPFERDISTEIYQAGSTPCNGVEGFNCYFPLQSYGFQPTNGVGYQPYRVVVLSFELLHAPATVCGPKKSTNLVKNKCVNFNFNGLTGTGVLTESNKKFLPFQQFGRDIADTTDAVRDPQTLEILDITPCSFGGVSVITPGTNTSNQVAVLYQDVNCTEVPVAIHADQLTPTWRVYSTGSNVFQTRAGCLIGAEHVNNSYECDIPIGAGICASYQTQTNSPRRARSVASQSIIAYTMSLGAENSVAYSNNSIAIPTNFTISVTTEILPVSMTKTSVDCTMYICGDSTECSNLLLQYGSFCTQLNRALTGIAVEQDKNTQEVFAQVKQIYKTPPIKDFGGFNFSQILPDPSKPSKRSFIEDLLFNKVTLADAGFIKQYGDCLGDIAARDLICAQKFNGLTVLPPLLTDEMIAQYTSALLAGTITSGWTFGAGAALQIPFAMQMAYRFNGIGVTQNVLYENQKLIANQFNSAIGKIQDSLSSTASALGKLQDVVNQNAQALNTLVKQLSSNCGAISSVLNDILSRLDKVEAEVQIDRLITCRLQSLQTYVTQQLIRAAEIRASANLAATKMSECVLGQSKRVDFCGKGYHLMSFPQSAPHGVVFLHVTYVPAQEKNFTTAPAICHDGKAHFPREGVFVSNGTHWFVTQRNFYEPQIITTDNTFVSGNCDVVIGIVNNTVYDPLQLELDSGGGSGGGQIYEGKLTAEGLRFGIVASRFNHALVDRLVEGAIDAIVRHGGREEDITLVRVPGSWEIPVAAGELARKEDIDAVIAIGVLIRGATPHFDYIASEVSKGLADLSLELRKPITFGVITADTLEQAIERAGTKHGNKGWEAALSAIEMANLFKSLR

SEQ ID NO: 8392 - protein, 1307 aa, Artificial Sequence
  SARS-CoV-2/India/1-31/2020__EPI_ISL_413523 spike protein (1-1147)(F970C_G999C) LumSynth construct
MFVFLVLLPLVSSQCVNLTTRTQLPPAYTNSFTRGVYYPDKVFRSSVLHSTQDLFLPFFSNVTWFHAIHVSGTNGTKRFDNPVLPFNDGVYFASTEKSNIIRGWIFGTTLDSKTQSLLIVNNATNVVIKVCEFQFCNDPFLGVYYHKNNKSWMESEFRVYSSANNCTFEYVSQPFLMDLEGKQGNFKNLREFVFKNIDGYFKIYSKHTPINLVRDLPQGFSALEPLVDLPIGINITRFQTLLALHRSYLTPGDSSSGWTAGAAAYYVGYLQPRTFLLKYNENGTITDAVDCALDPLSETKCTLKSFTVEKGIYQTSNFRVQPTESIVRFPNITNLCPFGEVFNATRFASVYAWNRKRISNCVADYSVLYNSASFSTFKCYGVSPTKLNDLCFTNVYADSFVIRGDEVRQIAPGQTGKIADYNYKLPDDFTGCVIAWNSNNLDSKVGGNYNYLYRLFRKSNLKPFERDISTEIYQAGSTPCNGVEGFNCYFPLQSYGFQPTNGVGYQPYRVVVLSFELLHAPATVCGPKKSTNLVKNKCVNFNFNGLTGTGVLTESNKKFLPFQQFGRDIADTTDAVRDPQTLEILDITPCSFGGVSVITPGTNTSNQVAVLYQDVNCTEVPVAIHADQLTPTWRVYSTGSNVFQTRAGCLIGAEHVNNSYECDIPIGAGICASYQTQTNSPRRARSVASQSIIAYTMSLGAENSVAYSNNSIAIPTNFTISVTTEILPVSMTKTSVDCTMYICGDSTECSNLLLQYGSFCTQLNRALTGIAVEQDKNTQEVFAQVKQIYKTPPIKDFGGFNFSQILPDPSKPSKRSFIEDLLFNKVTLADAGFIKQYGDCLGDIAARDLICAQKFNGLTVLPPLLTDEMIAQYTSALLAGTITSGWTFGAGAALQIPFAMQMAYRFNGIGVTQNVLYENQKLIANQFNSVIGKIQDSLSSTASALGKLQDVVNQNAQALNTLVKQLSSNCGAISSVLNDILSRLDKVEAEVQIDRLITCRLQSLQTYVTQQLIRAAEIRASANLAATKMSECVLGQSKRVDFCGKGYHLMSFPQSAPHGVVFLHVTYVPAQEKNFTTAPAICHDGKAHFPREGVFVSNGTHWFVTQRNFYEPQIITTDNTFVSGNCDVVIGIVNNTVYDPLQPELDSGGGSGGGQIYEGKLTAEGLRFGIVASRFNHALVDRLVEGAIDAIVRHGGREEDITLVRVPGSWEIPVAAGELARKEDIDAVIAIGVLIRGATPHFDYIASEVSKGLADLSLELRKPITFGVITADTLEQAIERAGTKHGNKGWEAALSAIEMANLFKSLR

SEQ ID NO: 8393 - protein, 1307 aa, Artificial Sequence
  SARS-CoV-2/Guangdong/GD2020087-P0008/2020__EPI_ISL_413863 spike protein (1-1147)(F970C_G999C) LumSynth construct
MFVFLVLLPLVSSQCVNLTTRTQLPPAYTNSFTRGVYYPDKVFRSSVLHSTQDLFLPFFSNVTWFHAIHVSGTNGTKRFDNPVLPFNDGVYFASTEKSNIIRGWIFGTTLDSKTQSLLIVNNATNVVIKVCEFQFCNDPFLGVYYHKNNKSWMESEFRVYSSANNCTFEYVSQPFLMDLEGKQGNFKNLREFVFKNIDGYFKIYSKHTPINLVRDLPQGFSALEPLVDLPIGINITRFQTLLALHRSYLTPGDSSSGWTAGAAAYYVGYLQPRTFLLKYNENGTITDAVDCALDPLSETKCTLKSFTVEKGIYQTSNFRVQPTESIVRFPNITNLCPFGEVFNATRFASVYAWNRKRISNCVADYSVLYNSASFSTFKCYGVSPTKLNDLCFTNVYADSFVIRGDEVREIAPGQTGKIADYNYKLPDDFTGCVIAWNSNNLDSKVGGNYNYLYRLFRKSNLKPFERDISTEIYQAGSTPCNGVEGFNCYFPLQSYGFQPTNGVGYQPYRVVVLSFELLHAPATVCGPKKSTNLVKNKCVNFNFNGLTGTGVLTESNKKFLPFQQFGRDIADTTDAVRDPQTLEILDITPCSFGGVSVITPGTNTSNQVAVLYQDVNCTEVPVAIHADQLTPTWRVYSTGSNVFQTRAGCLIGAEHVNNSYECDIPIGAGICASYQTQTNSPRRARSVASQSIIAYTMSLGAENSVAYSNNSIAIPTNFTISVTTEILPVSMTKTSVDCTMYICGDSTECSNLLLQYGSFCTQLNRALTGIAVEQDKNTQEVFAQVKQIYKTPPIKDFGGFNFSQILPDPSKPSKRSFIEDLLFNKVTLADAGFIKQYGDCLGDIAARDLICAQKFNGLTVLPPLLTDEMIAQYTSALLAGTITSGWTFGAGAALQIPFAMQMAYRFNGIGVTQNVLYENQKLIANQFNSAIGKIQDSLSSTASALGKLQDVVNQNAQALNTLVKQLSSNCGAISSVLNDILSRLDKVEAEVQIDRLITCRLQSLQTYVTQQLIRAAEIRASANLAATKMSECVLGQSKRVDFCGKGYHLMSFPQSAPHGVVFLHVTYVPAQEKNFTTAPAICHDGKAHFPREGVFVSNGTHWFVTQRNFYEPQIITTDNTFVSGNCDVVIGIVNNTVYDPLQPELDSGGGSGGGQIYEGKLTAEGLRFGIVASRFNHALVDRLVEGAIDAIVRHGGREEDITLVRVPGSWEIPVAAGELARKEDIDAVIAIGVLIRGATPHFDYIASEVSKGLADLSLELRKPITFGVITADTLEQAIERAGTKHGNKGWEAALSAIEMANLFKSLR

SEQ ID NO: 8394 - protein, 1307 aa, Artificial Sequence
  SARS-CoV-2/Sweden/01/2020__EPI_ISL_411951 spike protein (1-1147)(F970C_G999C) LumSynth construct
MFVFLVLLPLVSSQCVNLTTRTQLPPAYTNSFTRGVYYPDKVFRSSVLHSTQDLFLPFFSNVTWFHAIHVSGTNGTKRFDNPVLPFNDGVYFASTEKSNIIRGWIFGTTLDSKTQSLLIVNNATNVVIKVCEFQFCNDPFLGVYYHKNNKSWMESEFRVYSSANNCTFEYVSQPFLMDLEGKQGNFKNLREFVFKNIDGYFKIYSKHTPINLVRDLPQGFSALEPLVDLPIGINITRFQTLLALHRSYLTPGDSSSGWTAGAAAYYVGYLQPRTFLLKYNENGTITDAVDCALDPLSETKCTLKSFTVEKGIYQTSNFRVQPTESIVRFPNITNLCPFGEVFNATRFASVYAWNRKRISNCVADYSVLYNSASFSTFKCYGVSPTKLNDLCFTNVYADSFVIRGDEVRQIAPGQTGKIADYNYKLPDDFTGCVIAWNSNNLDSKVGGNYNYLYRLFRKSNLKPFERDISTEIYQAGSTPCNGVEGFNCYFPLQSYGFQPTNGVGYQPYRVVVLSFELLHAPATVCGPKKSTNLVKNKCVNFNFNGLTGTGVLTESNKKFLPFQQFGRDIADTTDAVRDPQTLEILDITPCSFGGVSVITPGTNTSNQVAVLYQDVNCTEVPVAIHADQLTPTWRVYSTGSNVFQTRAGCLIGAEHVNNSYECDIPIGAGICASYQTQTNSPRRARSVASQSIIAYTMSLGAENSVAYSNNSIAIPTNFTISVTTEILPVSMTKTSVDCTMYICGDSTECSNLLLQYGSFCTQLNRALTGIAVEQDKNTQEVFAQVKQIYKTPPIKDCGGFNFSQILPDPSKPSKRSFIEDLLFNKVTLADAGFIKQYGDCLGDIAARDLICAQKFNGLTVLPPLLTDEMIAQYTSALLAGTITSGWTFGAGAALQIPFAMQMAYRFNGIGVTQNVLYENQKLIANQFNSAIGKIQDSLSSTASALGKLQDVVNQNAQALNTLVKQLSSNCGAISSVLNDILSRLDKVEAEVQIDRLITCRLQSLQTYVTQQLIRAAEIRASANLAATKMSECVLGQSKRVDFCGKGYHLMSFPQSAPHGVVFLHVTYVPAQEKNFTTAPAICHDGKAHFPREGVFVSNGTHWFVTQRNFYEPQIITTDNTFVSGNCDVVIGIVNNTVYDPLQPELDSGGGSGGGQIYEGKLTAEGLRFGIVASRFNHALVDRLVEGAIDAIVRHGGREEDITLVRVPGSWEIPVAAGELARKEDIDAVIAIGVLIRGATPHFDYIASEVSKGLADLSLELRKPITFGVITADTLEQAIERAGTKHGNKGWEAALSAIEMANLFKSLR

SEQ ID NO: 8395 - protein, 1307 aa, Artificial Sequence
  SARS-CoV-2/Tianmen/HBCDC-HB-07/2020__EPI_ISL_412983 spike protein (1-1147)(F970C_G999C) LumSynth construct
MFVFLVLLPLVSSQCVNLTTRTQLPPAYTNSFTRGVYYPDKVFRSSVLHSTQDLFLPFFSNVTWFHAIHVSGTNGTKRFDNPVLPFNDGVYFASTEKSNIIRGWIFGTTLDSKTQSLLIVNNATNVVIKVCEFQFCNDPFLGVYYHKNNKSWMESEFRVYSSANNCTFEYVSQPFLMDLEGKQGNFKNLREFVFKNIDGYFKIYSKHTPINLVRDLPQGFSALEPLVDLPIGINITRFQTLLALHRSYLTPGDSSSGWTAGAAAYYVGYLQPRTFLLKYNENGTITDAVDCALDPLSETKCTLKSFTVEKGIYQTSNFRVQPTESIVRFPNITNLCPFGEVFNATRFASVYAWNRKRISNCVADYSVLYNSASFSTFKCYGVSPTKLNDLCFTNVYADSFVIRGDEVRQIAPGQTGKIADYNYKLPDDFTGCVIAWNSNNLDSKVGGNYNYLYRLFRKSNLKPFERDISTEIYQAGSTPCNGVEGFNCYFPLQSYGFQPTNGVGYQPYRVVVLSFELLHAPATVCGPKKSTNLVKNKCVNFNFNGLTGTGVLTESNKKFLPFQQFGRDIADTTDAVRDPQTLEILDITPCSFGGVSVITPGTNTSNQVAVLYQDLNCTEVPVAIHADQLTPTWRVYSTGSNVFQTRAGCLIGAEHVNNSYECDIPIGAGICASYQTQTNSPRRARSVASQSIIAYTMSLGAENSVAYSNNSIAIPTNFTISVTTEILPVSMTKTSVDCTMYICGDSTECSNLLLQYGSFCTQLNRALTGIAVEQDKNTQEVFAQVKQIYKTPPIKDFGGFNFSQILPDPSKPSKRSFIEDLLFNKVTLADAGFIKQYGDCLGDIAARDLICAQKFNGLTVLPPLLTDEMIAQYTSALLAGTITSGWTFGAGAALQIPFAMQMAYRFNGIGVTQNVLYENQKLIANQFNSAIGKIQDSLSSTASALGKLQDVVNQNAQALNTLVKQLSSNCGAISSVLNDILSRLDKVEAEVQIDRLITCRLQSLQTYVTQQLIRAAEIRASANLAATKMSECVLGQSKRVDFCGKGYHLMSFPQSAPHGVVFLHVTYVPAQEKNFTTAPAICHDGKAHFPREGVFVSNGTHWFVTQRNFYEPQIITTDNTFVSGNCDVVIGIVNNTVYDPLQPELDSGGGSGGGQIYEGKLTAEGLRFGIVASRFNHALVDRLVEGAIDAIVRHGGREEDITLVRVPGSWEIPVAAGELARKEDIDAVIAIGVLIRGATPHFDYIASEVSKGLADLSLELRKPITFGVITADTLEQAIERAGTKHGNKGWEAALSAIEMANLFKSLR

SEQ ID NO: 8396 - protein, 1307 aa, Artificial Sequence
  SARS-CoV-2/Hong Kong/case42_VM20002493/2020__EPI_ISL_414527 spike protein (1-1147)(F970C_G999C) LumSynth construct
MFVFLVLLPLVSSQCVNLTTRTQLPPAYTNSFTRGVYYPDKVFRSSVLHSTQDLFLPFFSNVTWFHAIHVSGTNGTKRFDNPVLPFNDGVYFASTEKSNIIRGWIFGTTLDSKTQSLLIVNNATNVVIKVCEFQFCNDPFLGVYYHKNNKSWMESEFRVYSSANNCTFEYVSQPFLMDLEGKQGNFKNLREFVFKNIDGYFKIYSKHTPINLVRDLPQGFSALEPLVDLPIGINITRFQTLLALHRSYLTPGDSSSGWTAGAAAYYVGYLQPRTFLLKYNENGTITDAVDCALDPLSETKCTLKSFTVEKGIYQTSNFRVQPTESIVRFPNITNLCPFGEVFNATRFASVYAWNRKRISNCVADYSVLYNSASFSTFKCYGVSPTKLNDLCFTNVYADSFVIRGDEVRQIAPGQTGKIADYNYKLPDDFTGCVIAWNSNNLDSKVGGNYNYLYRLFRKSNLKPFERDISTEIYQAGSTPCNGVEGFNCYFPLQSYGFQPTNGVGYQPYRVVVLSFELLHAPATVCGPKKSTNLVKNKCVNFNFNGLTGTGVLTESNKKFLPFQQFGRDIADTTDAVRDPQTLEILDITPCSFGGVSVITPGTNTSNQVAVLYQDVNCTEVPVAIHADQLTPTWRVYSTGSNVFQTRAGCLIGAEHVNNSYECDIPIGAGICASYQTQTNSPRRARSVASQSIIAYTMSLGAENSVAYSNNSIAIPTNFAISVTTEILPVSMTKTSVDCTMYICGDSTECSNLLLQYGSFCTQLNRALTGIAVEQDKNTQEVFAQVKQIYKTPPIKDFGGFNFSQILPDPSKPSKRSFIEDLLFNKVTLADAGFIKQYGDCLGDIAARDLICAQKFNGLTVLPPLLTDEMIAQYTSALLAGTITSGWTFGAGAALQIPFAMQMAYRFNGIGVTQNVLYENQKLIANQFNSAIGKIQDSLSSTASALGKLQDVVNQNAQALNTLVKQLSSNCGAISSVLNDILSRLDKVEAEVQIDRLITCRLQSLQTYVTQQLIRAAEIRASANLAATKMSECVLGQSKRVDFCGKGYHLMSFPQSAPHGVVFLHVTYVPAQEKNFTTAPAICHDGKAHFPREGVFVSNGTHWFVTQRNFYEPQIITTDNTFVSGNCDVVIGIVNNTVYDPLQPELDSGGGSGGGQIYEGKLTAEGLRFGIVASRFNHALVDRLVEGAIDAIVRHGGREEDITLVRVPGSWEIPVAAGELARKEDIDAVIAIGVLIRGATPHFDYIASEVSKGLADLSLELRKPITFGVITADTLEQAIERAGTKHGNKGWEAALSAIEMANLFKSLR

SEQ ID NO: 8397 - protein, 1307 aa, Artificial Sequence
  SARS-CoV-2/USA/CruiseA-23/2020__EPI_ISL_414482 spike protein (1-1147)(F970C_G999C) LumSynth construct
MFVFLVLLPLVSSQCVNLTTRTQLPPAYTNSFTRGVYYPDKVFRSSVLHSTQDLFLPFFSNVTWFHAIHVSGTNGTKRFDNPVLPFNDGVYFASTEKSNIIRGWIFGTTLDSKTQSLLIVNNATNVVIKVCEFQFCNDPFLGVYYHKNNKSWMESEFRVYSSANNCTFEYVSQPFLMDLEVKQGNFKNLREFVFKNIDGYFKIYSKHTPINLVRDLPQGFSALEPLVDLPIGINITRFQTLLALHRSYLTPGDSSSGWTAGAAAYYVGYLQPRTFLLKYNENGTITDAVDCALDPLSETKCTLKSFTVEKGIYQTSNFRVQPTESIVRFPNITNLCPFGEVFNATRFASVYAWNRKRISNCVADYSVLYNSASFSTFKCYGVSPTKLNDLCFTNVYADSFVIRGDEVRQIAPGQTGKIADYNYKLPDDFTGCVIAWNSNNLDSKVGGNYNYLYRLFRKSNLKPFERDISTEIYQAGSTPCNGVEGFNCYFPLQSYGFQPTNGVGYQPYRVVVLSFELLHAPATVCGPKKSTNLVKNKCVNFNFNGLTGTGVLTESNKKFLPFQQFGRDIADTTDAVRDPQTLEILDITPCSFGGVSVITPGTNTSNQVAVLYQDVNCTEVPVAIHADQLTPTWRVYSTGSNVFQTRAGCLIGAEHVNNSYECDIPIGAGICASYQTQTNSPRRARSVASQSIIAYTMSLGAENSVAYSNNSIAIPTNFTISVTTEILPVSMTKTSVDCTMYICGDSTECSNLLLQYGSFCTQLNRALTGIAVEQDKNTQEVFAQVKQIYKTPPIKDFGGFNFSQILPDPSKPSKRSFIEDLLFNKVTLADAGFIKQYGDCLGDIAARDLICAQKFNGLTVLPPLLTDEMIAQYTSALLAGTITSGWTFGAGAALQIPFAMQMAYRFNGIGVTQNVLYENQKLIANQFNSAIGKIQDSLSSTASALGKLQDVVNQNAQALNTLVKQLSSNCGAISSVLNDILSRLDKVEAEVQIDRLITCRLQSLQTYVTQQLIRAAEIRASANLAATKMSECVLGQSKRVDFCGKGYHLMSFPQSAPHGVVFLHVTYVPAQEKNFTTAPAICHDGKAHFPREGVFVSNGTHWFVTQRNFYEPQIITTDNTFVSGNCDVVIGIVNNTVYDPLQPELDSGGGSGGGQIYEGKLTAEGLRFGIVASRFNHALVDRLVEGAIDAIVRHGGREEDITLVRVPGSWEIPVAAGELARKEDIDAVIAIGVLIRGATPHFDYIASEVSKGLADLSLELRKPITFGVITADTLEQAIERAGTKHGNKGWEAALSAIEMANLFKSLR

SEQ ID NO: 8398 - protein, 1307 aa, Artificial Sequence
  SARS-CoV-2/Hong Kong/case85_VM20002868/2020__EPI_ISL_414519 spike protein (1-1147)(F970C_G999C) LumSynth construct
MFVFLVLVPLVSSQCVNLTTRTQLPPAYTNSFTRGVYYPDKVFRSSVLHSTQDLFLPFFSNVTWFHAIHVSGTNGTKRFDNPVLPFNDGVYFASTEKSNIIRGWIFGTTLDSKTQSLLIVNNATNVVIKVCEFQFCNDPFLGVYYHKNNKSWMESEFRVYSSANNCTFEYVSQPFLMDLEGKQGNFKNLREFVFKNIDGYFKIYSKHTPINLVRDLPQGFSALEPLVDLPIGINITRFQTLLALHRSYLTPGDSSSGWTAGAAAYYVGYLQPRTFLLKYNENGTITDAVDCALDPLSETKCTLKSFTVEKGIYQTSNFRVQPTESIVRFPNITNLCPFGEVFNATRFASVYAWNRKRISNCVADYSVLYNSASFSTFKCYGVSPTKLNDLCFTNVYADSFVIRGDEVRQIAPGQTGKIADYNYKLPDDFTGCVIAWNSNNLDSKVGGNYNYLYRLFRKSNLKPFERDISTEIYQAGSTPCNGVEGFNCYFPLQSYGFQPTNGVGYQPYRVVVLSFELLHAPATVCGPKKSTNLVKNKCVNFNFNGLTGTGVLTESNKKFLPFQQFGRDIADTTDAVRDPQTLEILDITPCSFGGVSVITPGTNTSNQVAVLYQDVNCTEVPVAIHADQLTPTWRVYSTGSNVFQTRAGCLIGAEHVNNSYECDIPIGAGICASYQTQTNSPRRARSVASQSIIAYTMSLGAENSVAYSNNSIAIPTNFTISVTTEILPVSMTKTSVDCTMYICGDSTECSNLLLQYGSFCTQLNRALTGIAVEQDKNTQEVFAQVKQIYKTPPIKDFGGFNFSQILPDPSKPSKRSFIEDLLFNKVTLADAGFIKQYGDCLGDIAARDLICAQKFNGLTVLPPLLTDEMIAQYTSALLAGTITSGWTFGAGAALQIPFAMQMAYRFNGIGVTQNVLYENQKLIANQFNSAIGKIQDSLSSTASALGKLQDVVNQNAQALNTLVKQLSSNCGAISSVLNDILSRLDKVEAEVQIDRLITCRLQSLQTYVTQQLIRAAEIRASANLAATKMSECVLGQSKRVDFCGKGYHLMSFPQSAPHGVVFLHVTYVPAQEKNFTTAPAICHDGKAHFPREGVFVSNGTHWFVTQRNFYEPQIITTDNTFVSGNCDVVIGIVNNTVYDPLQPELDSGGGSGGGQIYEGKLTAEGLRFGIVASRFNHALVDRLVEGAIDAIVRHGGREEDITLVRVPGSWEIPVAAGELARKEDIDAVIAIGVLIRGATPHFDYIASEVSKGLADLSLELRKPITFGVITADTLEQAIERAGTKHGNKGWEAALSAIEMANLFKSLR

SEQ ID NO: 8399 - protein, 1307 aa, Artificial Sequence; identical to SEQ ID NO: 8389
  SARS-CoV-2/England/200990660/2020__EPI_ISL_414523 spike protein (1-1147)(F970C_G999C) LumSynth construct

SEQ ID NO: 8400 - protein, 1307 aa, Artificial Sequence
  SARS-CoV-2/Australia/NSW09/2020__EPI_ISL_413595 spike protein (1-1147)(F970C_G999C) LumSynth construct
MFVFLVLLPLVSSQCVNLTTRTQLPPAYTNSFTRGVYYPDKVFRSSVLHSTQDLFLPFFSNVTWFHAIHVSGTNGTKRFDNPVLPFNDGVYFASTEKSNIIRGWIFGTTLDSKTQSLLIVNNATNVVIKVCEFQFCNDPFLGVYYHKNNKSWMESEFRVYSSANNCTFEYVSQPFLMDLEGKQGNFKNLREFVFKNIDGYFKIYSKHTPINLVRDLPQGFSALEPLVDLPIGINITRFQTLLALHRSYLTPGDSSSGWTAGAAAYYVGYLQPRTFLLKYNENGTITDAVDCALDPLSETKCTLKSFTVEKGIYQTSNFRVQPTESIVRFPNITNLCPFGEVFNATRFASVYAWNRKRISNCVADYSVLYNSASFSTFKCYGVSPTKLNDLCFTNVYADSFVIRGDEVRQIAPGQTGKIADYNYKLPDDFTGCVIAWNSNNLDSKVGGNYNYLYRLFRKSNLKPFERDISTEIYQAGSTPCNGVEGFNCYFPLQSYGFQPTNGVGYQPYRVVVLSFELLHAPATVCGPKKSTNLVKNKCVNFNFNGLTGTGVLTESNKKFLPFQQFGRDIADTTDAVRDPQTLEILDITPCSFGGVSVITPGTNTSNQVAVLYQDVNCTEVPVAIHADQLTPTWRVYSTGSNVFQTRAGCLIGAEHVNNSYECDIPIGAGICASYQTQTNSPRRARSVASQSIIAYTMSLGAENSVAYSNNSIAIPTNFTISVTTEILPVSMTKTSVDCTMYICGDSTECSNLLLQYGSFCTQLNRALTGIAVEQDKNTQEVFAQVKQIYKTPPIKDFGGFNFSQILPDPSKPSKRSFIEDLLFNKVTLADAGFIKQYGDCLGDIAARDLICAQKFNGLTVLPPLLTDEMIAQYTSALLAGTITSGWTFGAGAALQIPFAMQMAYRFNGIGVTQNVLYENQKLIANQFNSAIGKIQDSLSFTASALGKLQDVVNQNAQALNTLVKQLSSNCGAISSVLNDILSRLDKVEAEVQIDRLITCRLQSLQTYVTQQLIRAAEIRASANLAATKMSECVLGQSKRVDFCGKGYHLMSFPQSAPHGVVFLHVTYVPAQEKNFTTAPAICHDGKAHFPREGVFVSNGTHWFVTQRNFYEPQIITTDNTFVSGNCDVVIGIVNNTVYDPLQPELDSGGGSGGGQIYEGKLTAEGLRFGIVASRFNHALVDRLVEGAIDAIVRHGGREEDITLVRVPGSWEIPVAAGELARKEDIDAVIAIGVLIRGATPHFDYIASEVSKGLADLSLELRKPITFGVITADTLEQAIERAGTKHGNKGWEAALSAIEMANLFKSLR

SEQ ID NO: 8401 - protein, 1307 aa, Artificial Sequence; identical to SEQ ID NO: 8381
  SARS-CoV-2/Australia/NSW10/2020__EPI_ISL_413596 spike protein (1-1147)(F970C_G999C) LumSynth construct

SEQ ID NO: 8402 - protein, 1307 aa, Artificial Sequence
  SARS-CoV-2/Switzerland/1000477797/2020__EPI_ISL_413023 spike protein (1-1147)(F970C_G999C) LumSynth construct
MFVFLVLLPLVSSQCVNLTTRTQLPPAYTNSFTRGVYYPDKVFRSSVLHSTQDLFLPFFSNVTWFHAIHVSGTNGTKRFDNPVLPFNDGVYFASTEKSNIIRGWIFGTTLDSKTQSLLIVNNATNVVIKVCEFQFCNDPFLGVYYHKNNKSWMESEFRVYSSANNCTFEYVSQPFLMDLEGKQGNFKNLREFVFKNIDGYFNIYSKHTPINLVRDLPQGFSALEPLVDLPIGINITRFQTLLALHRSYLTPGDSSSGWTAGAAAYYVGYLQPRTFLLKYNENGTITDAVDCALDPLSETKCTLKSFTVEKGIYQTSNFRVQPTESIVRFPNITNLCPFGEVFNATRFASVYAWNRKRISNCVADYSVLYNSASFSTFKCYGVSPTKLNDLCFTNVYADSFVIRGDEVRQIAPGQTGKIADYNYKLPDDFTGCVIAWNSNNLDSKVGGNYNYLYRLFRKSNLKPFERDISTEIYQAGSTPCNGVEGFNCYFPLQSYGFQPTNGVGYQPYRVVVLSFELLHAPATVCGPKKSTNLVKNKCVNFNFNGLTGTGVLTESNKKFLPFQQFGRDIADTTDAVRDPQTLEILDITPCSFGGVSVITPGTNTSNQVAVLYQGVNCTEVPVAIHADQLTPTWRVYSTGSNVFQTRAGCLIGAEHVNNSYECDIPIGAGICASYQTQTNSPRRARSVASQSIIAYTMSLGAENSVAYSNNSIAIPTNFTISVTTEILPVSMTKTSVDCTMYICGDSTECSNLLLQYGSFCTQLNRALTGIAVEQDKNTQEVFAQVKQIYKTPPIKDFGGFNFSQILPDPSKPSKRSFIEDLLFNKVTLADAGFIKQYGDCLGDIAARDLICAQKFNGLTVLPPLLTDEMIAQYTSALLAGTITSGWTFGAGAALQIPFAMQMAYRFNGIGVTQNVLYENQKLIANQFNSAIGKIQDSLSSTASALGKLQDVVNQNAQALNTLVKQLSSNCGAISSVLNDILSRLDKVEAEVQIDRLITCRLQSLQTYVTQQLIRAAEIRASANLAATKMSECVLGQSKRVDFCGKGYHLMSFPQSAPHGVVFLHVTYVPAQEKNFTTAPAICHDGKAHFPREGVFVSNGTHWFVTQRNFYEPQIITTDNTFVSGNCDVVIGIVNNTVYDPLQPELDSGGGSGGGQIYEGKLTAEGLRFGIVASRFNHALVDRLVEGAIDAIVRHGGREEDITLVRVPGSWEIPVAAGELARKEDIDAVIAIGVLIRGATPHFDYIASEVSKGLADLSLELRKPITFGVITADTLEQAIERAGTKHGNKGWEAALSAIEMANLFKSLR

SEQ ID NO: 8403 - protein, 1307 aa, Artificial Sequence
  SARS-CoV-2/Belgium/BA-02291/2020__EPI_ISL_415159 spike protein (1-1147)(F970C_G999C) LumSynth construct
MFVFLVLLPLVSSQCVNLTTRTQLPPAYTNSFTRGVYYPDKVFRSSVLHSTQDLFLPFFSNVTWFHAIHVSGTNGTKRFDNPVLPFNDGVYFASTEKSNIIRGWIFGTTLDSKTQSLLIVNNATNVVIKVCEFQFCNDPFLGVYYHKNNKSWMESEFRVYSSANNCTFEYVSQPFLMDLEGKQGNFKNLREFVFKNIDGYFKIYSKHTPINLVRDLPQGFSALEPLVDLPIGINITRFQTLLALHRSYLTPGDSSSGWTAGAAAYYVGYLQPRTFLLKYNENGTITDAVDCALDPLSETKCTLKSFTVEKGIYQTSNFRVQPTESIVRFPNITNLCPFGEVFNATRFASVYAWNRKRISNCVADYSVLYNSASFSTFKCYGVSPTKLNDLCFTNVYADSFVIRGDEVRQIAPGQTGKIADYNYKLPDDFTGCVIAWNSNNLDSKVGGNYNYLYRLFRRSNLKPFERDISTEIYQAGSTPCNGVEGFNCYFPLQSYGFQPTNGVGYQPYRVVVLSFELLPAPATVCGPKKSTNLVKNKCVNFNFNGLTGTGVLTESNKKFLPFQQFGRDIADTTDAVRDPQTLEILDITPCSFGGVSVITPGTNTSNQVAVLYQGVNCTEVPVAIHADQLTPTWRVYSTGSNVFQTRAGCLIGAEHVNNSYECDIPIGAGICASYQTQTNSPRRARSVASQSIIAYTMSLGAENSVAYSNNSIAIPTNFTISVTTEILPVSMTKTSVDCTMYICGDSTECSNLLLQYGSFCTQLNRALTGIAVEQDKNTQEVFAQVKQIYKTPPIKDFGGFNFSQILPDPSKPSKRSFIEDLLFNKVTLADAGFIKQYGDCLGDIAARDLICAQKFNGLTVLPPLLTDEMIAQYTSALLAGTITSGWTFGAGAALQIPFAMQMAYRFNGIGVTQNVLYENQKLIANQFNSAIGKIQDSLSSAAPALGKLQDVVNQNAQALNTLVKQLSSNCGAISSVLNDILSRLDKVEAEVQIDRLITCRLQSLQTYVTQQLIRAAEIRASANLAATKMSECVLGQSKRVDFCGKGYHLMSFPQSAPHGVVFLHVTYVPAQEKNFTTAPAICHDGKAHFPREGVFVSNGTHWFVTQRNFYEPQIITTDNTFVSGNCDVVIGIVNNTVYDPLQPELDSGGGSGGGQIYEGKLTAEGLRFGIVASRFNHALVDRLVEGAIDAIVRHGGREEDITLVRVPGSWEIPVAAGELARKEDIDAVIAIGVLIRGATPHFDYIASEVSKGLADLSLELRKPITFGVITADTLEQAIERAGTKHGNKGWEAALSAIEMANLFKSLR

SEQ ID NO: 8404 - protein, 1307 aa, Artificial Sequence
  SARS-CoV-2/USA/WA8-UW5/2020__EPI_ISL_413486 spike protein (1-1147)(F970C_G999C) LumSynth construct
MFVFLVLLPLVSSQCVNLTTRTQLPPAYTNSFTRGVYYPDKVFRSSVLHSTQDLFLPFFSNVTWFHAIHVSGTNGTKRFDNPVLPFNDGVYFASTEKSNIIRGWIFGTTLDSKTQSLLIVNNATNVVIKVCEFQFCNDPFLGVYYHKNNKSWMESEFRVYSSANNCTFEYVSQPFLMDLEGKQGNFKNLREFVFKNIDGYFKIYSKHTPINLVRDLPQGFSALEPLVDLPIGINITRFQTLLALHRSYLTPGDSSSGWTAGAAAYYVGYLQPRTFLLKYNENGTITDAVDCALDPLSETKCTLKSFTVEKGIYQTSNFRVQPTESIVRFPNITNLCPFGEVFNATRFASVYAWNRKRISNCVADYSVLYNSASFSTFKCYGVSPTKLNDLCFTNVYADSFVIRGDEVRQIAPGQTGKIADYNYKLPDDFTGCVIAWNSNNLDSKVGGNYNYLYRLFRKSNLKPFERDISTEIYQAGSTPCNGVEGFNCYFPLQSYGFQPTNGVGYQPYRVVVLSFELLHAPATVCGPKKSTNLVKNKCVNFNFNGLTGTGVLTESNKKFLPFQQFGRDIADTTDAVRDPQTLEILDITPCSFGGVSVITPGTNTSNQVAVLYQDVNCTEVPVAIHADQLTPTWRVYSTGSNVFQTRAGCLIGAEYVNNSYECDIPIGAGICASYQTQTNSPRRARSVASQSIIAYTMSLGAENSVAYSNNSIAIPTNFTISVTTEILPVSMTKTSVDCTMYICGDSTECSNLLLQYGSFCTQLNRALTGIAVEQDKNTQEVFAQVKQIYKTPPIKDFGGFNFSQILPDPSKPSKRSFIEDLLFNKVTLADAGFIKQYGDCLGDIAARDLICAQKFNGLTVLPPLLTDEMIAQYTSALLAGTITSGWTFGAGAALQIPFAMQMAYRFNGIGVTQNVLYENQKLIANQFNSAIGKIQDSLSSTASALGKLQDVVNQNAQALNTLVKQLSSNCGAISSVLNDILSRLDKVEAEVQIDRLITCRLQSLQTYVTQQLIRAAEIRASANLAATKMSECVLGQSKRVDFCGKGYHLMSFPQSAPHGVVFLHVTYVPAQEKNFTTAPAICHDGKAHFPREGVFVSNGTHWFVTQRNFYEPQIITTDNTFVSGNCDVVIGIVNNTVYDPLQPELDSGGGSGGGQIYEGKLTAEGLRFGIVASRFNHALVDRLVEGAIDAIVRHGGREEDITLVRVPGSWEIPVAAGELARKEDIDAVIAIGVLIRGATPHFDYIASEVSKGLADLSLELRKPITFGVITADTLEQAIERAGTKHGNKGWEAALSAIEMANLFKSLR

SEQ ID NO: 8405 - protein, 1307 aa, Artificial Sequence
  SARS-CoV-2/England/20102000506/2020__EPI_ISL_415147 spike protein (1-1147)(F970C_G999C) LumSynth construct
MFVFLVLLPLVSSQCVNLTTRTQLPPAYTNSFTRGVYYPDKVFRSSVLHSTQDLFLPFFSNVTWFHAIHVSGTNGTKRFDNPVLPFNDGVYFASTEKSNIIRGWIFGTTLDSKTQSLLIVNNATNVVIKVCEFQFCNDPFLGVYYHKNNKSWMESEFRVYSSANNCTFEYVSQPFLMDLEGKQGNFKNLREFVFKNIDGYFKIYSKHTPINLVRDLPQGFSALEPLVDLPIGINITRFQTLLALHRSYLTPGDSSSGWTAGAAAYYVGYLQPRTFLLKYNENGTITDAVDCALDPLSETKCTLKSFTVEKGIYQTSNFRVQPTESIVRFPNITNLCPFGEVFNATRFASVYAWNRKRISNCVADYSVLYNSASFSTFKCYGVSPTKLNDLCFTNVYADSFVIRGDEVRQIAPGQTGKIADYNYKLPDDFTGCVIAWNSNNLDSKVGGNYNYLYRLFRKSNLKPFERDISTEIYQAGSTPCNGVEGFNCYFPLQSYGFQPTNGVGYQPYRVVVLSFELLHAPATVCGPKKSTNLVKNKCVNFNFNGLTGTGVLTESNKKFLPFQQFGRDIADTTDAVRDPQTLEILDITPCSFGGVSVITPGTNTSNQVAVLYQGVNCTEVPVAIHADQLTPTWRVYSTGSNVFQTRAGCLIGAEHVNNSYECDIPIGAGICASYQTQTNSPRRARSVASQSIIAYTMSLGAENSVAYSNNSIAIPTNFTISVTTEILPVSMTKTSVDCTMYICGDSTECSNLLLQYGSFCTQLNRALTGIAVEQDKNTQEVFAQVKQIYKTPPIKDFGGFNFSQILPDPSKPSKRSFIEDLLFNKVTLADAGFIKQYGYCLGDIAARDLICAQKFNGLTVLPPLLTDEMIAQYTSALLAGTITSGWTFGAGAALQIPFAMQMAYRFNGIGVTQNVLYENQKLIANQFNSAIGKIQDSLSSTASALGKLQDVVNQNAQALNTLVKQLSSNCGAISSVLNDILSRLDKVEAEVQIDRLITCRLQSLQTYVTQQLIRAAEIRASANLAATKMSECVLGQSKRVDFCGKGYHLMSFPQSAPHGVVFLHVTYVPAQEKNFTTAPAICHDGKAHFPREGVFVSNGTHWFVTQRNFYEPQIITTDNTFVSGNCDVVIGIVNNTVYDPLQPELDSGGGSGGGQIYEGKLTAEGLRFGIVASRFNHALVDRLVEGAIDAIVRHGGREEDITLVRVPGSWEIPVAAGELARKEDIDAVIAIGVLIRGATPHFDYIASEVSKGLADLSLELRKPITFGVITADTLEQAIERAGTKHGNKGWEAALSAIEMANLFKSLR

SEQ ID NO: 8406 - protein, 1307 aa, Artificial Sequence
  SARS-CoV-2/Belgium/VAG-03013/2020__EPI_ISL_415155 spike protein (1-1147)(F970C_G999C) LumSynth construct
MFVFLVLLPLVSSQCVNLTTRTQLPPAYTNSFTRGVYYPDKVFRSSVLHSTQDLFLPFFSNVTWFHAIHVSGTNGTKRFDNPVLPFNDGVYFASTEKSNIIRGWIFGTTLDSKTQSLLIVNNATNVVIKVCEFQFCNDPFLGVYYHKNNKSWMESEFRVYSSANNCTFEYVSQPFLMDLEGKQGNFKNLREFVFKNIDGYFKIYSKHTPINLVRDLPQGFSALEPLVDLPIGINITRFQTLLALHRSYLTPGDSSSGWTAGAAAYYVGYLQPRTFLLKYNENGTITDAVDCALDPLSETKCTLKSFTVEKGIYQTSNFRVQPTESIVRFPNITNLCPFGEVFNATRFASVYAWNRKRISNCVADYSVLYNSASFSTFKCYGVSPTKLNDLCFTNVYADSFVIRGDEVRQIAPGQTGKIADYNYKLPDDFTGCVIAWNSNNLDSKVGGNYNYLYRLFRKSNLKPFERDISTEIYQAGSTPCNGVEGFNCYFPLQSYGFQPTNGVGYQPYRVVVLSFELLHAPATVCGPKKSTNLVKNKCVNFNFNGLTGTGVLTESNKKFLPFQQFGRDIADTTDAVRDPQTLEILDITPCSFGGVSVITPGTNTSNQVAVLYQGVNCTEVPVAIHADQLTPTWRVYSTGSNVFQTRAGCLIGAEHVNNSYECDIPIGAGICASYQTQTNSPRRARSVASQSIIAYTMSLGAENSVAYSNNSIAIPTNFTISVTTEILPVSMTKTSVDCTMYICGDSTECSNLLLQYGSFCTQLNRALTGIAVEQDKNTQEVFAQVKQIYKTPPIKDFGGFNFSQILPDPSKPSKRSFIEDLLFNKVTLADAGFIKQYGDCLGDIAARDLICAQKFNGLTVLPPLLTDEMIAQYTSALLAGTITSGWTFGAGAALQIPFAMQMAYRFNGIGVTQNVLYENQKLIANQFNSAIGKIQDSLSSTATALGKLQDVVNQNAQALNTLVKQLSSNCGAISSVLNDILSRLDKVEAEVQIDRLITCRLQSLQTYVTQQLIRAAEIRASANLAATKMSECVLGQSKRVDFCGKGYHLMSFPQSAPHGVVFLHVTYVPAQEKNFTTAPAICHDGKAHFPREGVFVSNGTHWFVTQRNFYEPQIITTDNTFVSGNCDVVIGIVNNTVYDPLQPELDSGGGSGGGQIYEGKLTAEGLRFGIVASRFNHALVDRLVEGAIDAIVRHGGREEDITLVRVPGSWEIPVAAGELARKEDIDAVIAIGVLIRGATPHFDYIASEVSKGLADLSLELRKPITFGVITADTLEQAIERAGTKHGNKGWEAALSAIEMANLFKSLR

SEQ ID NO: 8407 - protein, 1307 aa, Artificial Sequence
  SARS-CoV-2/Belgium/BC-03016/2020__EPI_ISL_415157 spike protein (1-1147)(F970C_G999C) LumSynth construct
MFVFLVLLPLVSSQCVNLTTRTQLPPAYTNSFTRGVYYPDKVFRSSVLHSTQDLFLPFFSNVTWFHAIHVSGTNGTKRFDNPVLPFNDGVYFASTEKSNIIRGWIFGTTLDSKTQSLLIVNNATNVVIKVCEFQFCNDPFLGVYYHKNNKSWMESEFRVYSSANNCTFEYVSQPFLMDLEGKQGNFKNLREFVFKNIDGYFKIYSKHTPINLVRDLPQGFSALEPLVDLPIGINITRFQTLLALHRSYLTPGDSSSGWTAGAAAYYVGYLQPRTFLLKYNENGTITDAVDCALDPLSETKCTLKSFTVEKGIYQTSNFRVQPTESIVRFPNITNLCPFGEVFNATRFASVYAWNRKRISNCVADYSVLYNSASFSTFKCYGVSPTKLNDLCFTNVYADSFVIRGDEVRQIAPGQTGKIADYNYKLPDDFTGCVIAWNSNNLDSKVGGNYNYLYRLFRKSNLKPFERDISTEIYQAGSTPCNGVEGFNCYFPLQSYGFQPTNGVGYQPYRVVVLSFELLHAPATVCGPKKSTNLVKNKCVNFNFNGLTGTGVLTESNKKFLPFQQFGRDIADTTDAVRDPQTLEILDITPCSFGGVSVITPGTNTSNQVAVLYQGVNCTEVPVAIHADQLTPTWRVYSTGSNVFQTRAGCLIGAEHVNNSYECDIPIGAGICASYQTQTNSPRRARSVASQSIIAYTMSLGAENSVAYSNNSIAIPTNFTISVTTEILPVSMTKTSVDCTMYICGDSTECSNLLLQYGSFCTQLNRALTGIAVEQDKNTQEVFAQVKQIYKTPPIKDFGGFNFSQILPDPSKPSKRSFIEDLLFNKVTLADAGFIKQYGDCLGDIAARDLICAQKFNGLTVLPPLLTDEMIAQYTSALLAGTITSGWTFGAGAALQIPFAMQMAYRFNGIGVTQNVLYENQKLIANQFNSAIGKIQDSLSSTAPALGKLQDVVNQNAQALNTLVKQLSSNCGAISSVLNDILSRLDKVEAEVQIDRLITCRLQSLQTYVTQQLIRAAEIRASANLAATKMSECVLGQSKRVDFCGKGYHLMSFPQSAPHGVVFLHVTYVPAQEKNFTTAPAICHDGKAHFPREGVFVSNGTHWFVTQRNFYEPQIITTDNTFVSGNCDVVIGIVNNTVYDPLQPELDSGGGSGGGQIYEGKLTAEGLRFGIVASRFNHALVDRLVEGAIDAIVRHGGREEDITLVRVPGSWEIPVAAGELARKEDIDAVIAIGVLIRGATPHFDYIASEVSKGLADLSLELRKPITFGVITADTLEQAIERAGTKHGNKGWEAALSAIEMANLFKSLR

SEQ ID NO: 8408 - protein, 1307 aa, Artificial Sequence
  SARS-CoV-2/Germany/BavPat3/2020__EPI_ISL_414521 spike protein (1-1147)(F970C_G999C) LumSynth construct
MFVFLVLLPLVSSQCVNLTTRTQLPPAYTNSFTRGVYYPDKVFRSSVLHSTQDLFLPFFSNVTWFHAIHVSGTNGTKRFDNPVLPFNDGVYFASTEKSNIIRGWIFGTTLDSKTQSLLIVNNATNVVIKVCEFQFCNDPFLGVYYHKNNKSWMESEFRVYSSANNCTFEYVSQPFLMDLEGKQGNFKNLREFVFKNIDGYFKIYSKHTPINLVRDLPQGFSALEPLVDLPIGINITRFQTLLALHRSYLTPGDSSSGWTAGAAAYYVGYLQPRTFLLKYNENGTITDAVDCALDPLSETKCTLKSFTVEKGIYQTSNFRVQPTESIVRFPNITNLCPFGEVFNATRFASVYAWNRKRISNCVADYSVLYNSASFSTFKCYGVSPTKLNDLCFTNVYADSFVIRGDEVRQIAPGQTGKIADYNYKLPDDFTGCVIAWNSNNLDSKVGGNYNYLYRLFRKSNLKPFERDISTEIYQAGSTPCNGVEGFNCYFPLQSYGFQPTNGVGYQPYRVVVLSFELLHAPATVCGPKKSTNLVKNKCVNFNFNGLTGTGVLTESNKKFLPFQQFGRDIADTTDAVRDPQTLEILDITPCSFGGVSVITPGTNTSNQVAVLYQDVNCTEVPVAIHADQLTPTWRVYSTGSNVFQTRAGCLIGAEHVNNSYECDIPIGAGICASYQTQTNSPRRARSVASQSIIAYTMSLGAENSVAYSNNSIAIPTNFTISVTTEILPVSMTKTSVDCTMYICGDSTECSNLLLQYGSFCTQLNRALTGIAVEQDKNTQQVFAQVKQIYKTPPIKDFGGFNFSQILPDPSKPSKRSFIEDLLFNKVTLADAGFIKQYGDCLGDIAARDLICAQKFNGLTVLPPLLTDEMIAQYTSALLAGTITSGWTFGAGAALQIPFAMQMAYRFNGIGVTQNVLYENQKLIANQFNSAIGKIQDSLSSTASALGKLQDVVNQNAQALNTLVKQLSSNCGAISSVLNDILSRLDKVEAEVQIDRLITCRLQSLQTYVTQQLIRAAEIRASANLAATKMSECVLGQSKRVDFCGKGYHLMSFPQSAPHGVVFLHVTYVPAQEKNFTTAPAICHDGKAHFPREGVFVSNGTHWFVTQRNFYEPQIITTDNTFVSGNCDVVIGIVNNTVYDPLQPELDSGGGSGGGQIYEGKLTAEGLRFGIVASRFNHALVDRLVEGAIDAIVRHGGREEDITLVRVPGSWEIPVAAGELARKEDIDAVIAIGVLIRGATPHFDYIASEVSKGLADLSLELRKPITFGVITADTLEQAIERAGTKHGNKGWEAALSAIEMANLFKSLR

SEQ ID NO: 8409 - protein, 1307 aa, Artificial Sequence
  SARS-CoV-2/France/HF1805/2020__EPI_ISL_414628 spike protein (1-1147)(F970C_G999C) LumSynth construct
MFVFLVLLPLVSSQCVNLTTRTQLPPAYTNSFTRGVYYPDKVFRSSVLHSTQDLFLPFFSNVTWFHAIHVSGTNGTKRFDNPVLPFNDGVYFASTEKSNIIRGWIFGTTLDSKTQSLLIVNNATNVVIKVCEFQFCNDPFLGVYYHKNNKSWMESEFRVYSSANNCTFEYVSQPFLMDLEGKQGNFKNLREFVFKNIDGYFKIYSKHTPINLVRDLPQGFSALEPLVDLPIGINITRFQTLLALHRSYLTPGDSSSGWTAGAAAYYVGYLQPRTFLLKYNENGTITDAVDCALDPLSETKCTLKSFTVEKGIYQTSNFRVQPTESIVRFPNITNLCPFGEVFNATRFASVYAWNRKRISNCVADYSVLYNSASFSTFKCYGVSPTKLNDLCFTNVYADSFVIRGDEVRQIAPGQTGKIADYNYKLPDDFTGCVIAWNSNNLDSKVGGNYNYLYRLFRKSNLKPFERDISTEIYQAGSTPCNGVEGFNCYFPLQSYGFQPTNGVGYQPYRVVVLSFELLHAPATVCGPKKSTNLVKNKCVNFNFNGLTGTGVLTESNKKFLPFQQFGRDIADTTDAVRDPQTLEILDITPCSFGGVSVITPGTNTSNQVAVLYQGVNCTEVPVAIHADQLTPTWRVYSTGSNVFQTRAGCLIGAEHVNNSYECDIPIGAGICASYQTQTNSPRRARSVASQSIIAYTMSLGAENSVAYSNNSIAIPTNFTISVTTEILPVSMTKTSVDCTMYICGDSTECSNLLLQYGSFCTQLNRALTGIAVEQDKNTQEVFAQVKQIYKTPPIKDFGGFNFSQILPDPSKPSKRSFIEDLLFNKVTLADAGFIKQYGDCLGDIAARDLICAQKFNGLTVLPPLLTDEMIAQYTSALLAGTITSGWTFGAGAALQIPFAMQMAYRFNGIGVTQNVLYENQKLIANQFNSAIGKIQDSLSSTASALGKLQDVVNQNAQALNTLVKQLSSNCGAISSVLNDILSRLDKVEAEVQIDRLITCRLQSLQTYVTQQLIRAAEIRASANLAATKMSECVLGQSKRVDFCGKGYHLMSFPQSAPHGVVFLHVTYVPAQEKNFTTAPAICHDGKAHFPREGVFVSNGTHWFVTQRNFYEPQIITTDNTFVSGNCDVVIGVVNNTVYDPLQPELDSGGGSGGGQIYEGKLTAEGLRFGIVASRFNHALVDRLVEGAIDAIVRHGGREEDITLVRVPGSWEIPVAAGELARKEDIDAVIAIGVLIRGATPHFDYIASEVSKGLADLSLELRKPITFGVITADTLEQAIERAGTKHGNKGWEAALSAIEMANLFKSLR

SEQ ID NO: 8410 - protein, 1307 aa, Artificial Sequence
  SARS-CoV-2/Netherlands/ZuidHolland_9/2020__EPI_ISL_414445 spike protein (1-1147)(F970C_G999C) LumSynth construct
MFVFLVLLPLVSSQCVNLTTRTQLPPAYTNSFTRGVYYPDKVFRSSVLHSTQDLFLPFFSNVTWFHAIHVSGTNGTKRFDNPVLPFNDGVYFASTEKSNIIRGWIFGTTLDSKTQSLLIVNNATNVVIKVCEFQFCNDPFLGVYYHKNNKSWMESEFRVYSSANNCTFEYVSQPFLMDLEGKQGNFKNLREFVFKNIDGYFKIYSKHTPINLVRDLPQGFSALEPLVDLPIGINITRFQTLLALHRSYLTPGDSSSGWTAGAAAYYVGYLQPRTFLLKYNENGTITDAVDCALDPLSETKCTLKSFTVEKGIYQTSNFRVQPTESIVRFPNITNLCPFGEVFNATRFASVYAWNRKRISNCVADYSVLYNSASFSTFKCYGVSPTKLNDLCFTNVYADSFVIRGDEVRQIAPGQTGKIADYNYKLPDDFTGCVIAWNSNNLDSKVGGNYNYLYRLFRKSNLKPFERDISTEIYQAGSTPCNGVEGFNCYFPLQSYGFQPTNGVGYQPYRVVVLSFELLHAPATVCGPKKSTNLVKNKCVNFNFNGLTGTGVLTESNKKFLPFQQFGRDIADTTDAVRDPQTLEILDITPCSFGGVSVITPGTNTSNQVAVLYQGVNCTEVPVAIHADQLTPTWRVYSTGSNVFQTRAGCLIGAEHVNNSYECDIPIGAGICASYQTQTNSPRRARSVASQSIIAYTMSLGAENSVAYSNNSIAIPTNFTISVTTEILPVSMTKTSVDCTMYICGDSTECSNLLLQYGSFCTQLNRALTGIAVEQDKNTQEVFAQVKQIYKTPPIKDFGGFNFSQILPDPSKPSKRSFIEDLLFNKVTLADAGFIKQYGDCLGDIAARDLICVQKFNGLTVLPPLLTDEMIAQYTSALLAGTITSGWTFGAGAALQIPFAMQMAYRFNGIGVTQNVLYENQKLIANQFNSAIGKIQDSLSSTASALGKLQDVVNQNAQALNTLVKQLSSNCGAISSVLNDILSRLDKVEAEVQIDRLITCRLQSLQTYVTQQLIRAAEIRASANLAATKMSECVLGQSKRVDFCGKGYHLMSFPQSAPHGVVFLHVTYVPAQEKNFTTAPAICHDGKAHFPREGVFVSNGTHWFVTQRNFYEPQIITTDNTFVSGNCDVVIGIVNNTVYDPLQPELDSGGGSGGGQIYEGKLTAEGLRFGIVASRFNHALVDRLVEGAIDAIVRHGGREEDITLVRVPGSWEIPVAAGELARKEDIDAVIAIGVLIRGATPHFDYIASEVSKGLADLSLELRKPITFGVITADTLEQAIERAGTKHGNKGWEAALSAIEMANLFKSLR

SEQ ID NO: 8411 - protein, 1307 aa, Artificial Sequence
  SARS-CoV-2/Finland/FIN03032020A/2020__EPI_ISL_413602 spike protein (1-1147)(F970C_G999C) LumSynth construct
MFVFLVLLPLVSSQCVNLTTRTQLPPAYTNSFTRGVYYPDKVFRSSVLHSTQDLFLPFFSNVTWFHAIHVSGTNGTKRFDNPVLPFNDGVYFASTEKSNIIRGWIFGTTLDSKTQSLLIVNNATNVVIKVCEFQFCNDPFLGVYYHKNNKSWMESEFRVYSSANNCTFEYVSQPFLMDLEGKQGNFKNLREFVFKNIDGYFKIYSKHTPINLVRDLPQGFSALEPLVDLPIGINITRFQTLLALHRSYLTPGDSSSGWTAGAAAYYVGYLQPRTFLLKYNENGTITDAVDCALDPLSETKCTLKSFTVEKGIYQTSNFRVQPTESIVRFPNITNLCPFGEVFNATRFASVYAWNRKRISNCVADYSVLYNSASFSTFKCYGVSPTKLNDLCFTNVYADSFVIRGDEVRQIAPGQTGKIADYNYKLPDDFTGCVISWNSNNLDSKVGGNYNYLYRLFRKSNLKPFERDISTEIYQAGSTPCNGVEGFNCYFPLQSYGFQPTNGVGYQPYRVVVLSFELLHAPATVCGPKKSTNLVKNKCVNFNFNGLTGTGVLTESNKKFLPFQQFGRDIADTTDAVRDPQTLEILDITPCSFGGVSVITPGTNTSNQVAVLYQGVNCTEVPVAIHADQLTPTWRVYSTGSNVFQTRAGCLIGAEHVNNSYECDIPIGAGICASYQTQTNSPRRARSVASQSIIAYTMSLGAENSVAYSNNSIAIPTNFTISVTTEILPVSMTKTSVDCTMYICGDSTECSNLLLQYGSFCTQLNRALTGIAVEQDKNTQEVFAQVKQIYKTPPIKDFGGFNFSQILPDPSKPSKRSFIEDLLFNKVTLADAGFIKQYGDCLGDIAARDLICAQKFNGLTVLPPLLTDEMIAQYTSALLAGTITSGWTFGAGAALQIPFAMQMAYRFNGIGVTQNVLYENQKLIANQFNSAIGKIQDSLSSTASALGKLQDVVNQNAQALNTLVKQLSSNCGAISSVLNDILSRLDKVEAEVQIDRLITCRLQSLQTYVTQQLIRAAEIRASANLAATKMSECVLGQSKRVDFCGKGYHLMSFPQSAPHGVVFLHVTYVPAQEKNFTTAPAICHDGKAHFPREGVFVSNGTHWFVTQRNFYEPQIITTDNTFVSGNCDVVIGIVNNTVYDPLQPELDSGGGSGGGQIYEGKLTAEGLRFGIVASRFNHALVDRLVEGAIDAIVRHGGREEDITLVRVPGSWEIPVAAGELARKEDIDAVIAIGVLIRGATPHFDYIASEVSKGLADLSLELRKPITFGVITADTLEQAIERAGTKHGNKGWEAALSAIEMANLFKSLR

SEQ ID NO: 8412 - protein, 1307 aa, Artificial Sequence
  SARS-CoV-2/France/GE1977/2020__EPI_ISL_414632 spike protein (1-1147)(F970C_G999C) LumSynth construct
MFVFLVLLPLVSSQCVNLTTRTQLPPAYTNSFTRGVYYPDKVFRSSVLHSTQDLFLPFFSNVTWFHAIHVSGTNGTKRFDNPVLPFNDGVYFASTEKSNIIRGWIFGTTLDSKTQSLLIVNNATNVVIKVCEFQFCNDPFLGVYYHKNNKSWMESEFRVYSSANNCTFEYVSQPFLMDLEGKQGNFKNLREFVFKNIDGYFKIYSKHTPINLVRDLPQGFSALEPLVDLPIGINITRFQTLLALHRSYLTPGDSSSGWTAGAAAYYVGYLQPRTFLLKYNENGTITDAVDCALDPLSETKCTLKSFTVEKGIYQTSNFRVQPTESIVRFPNITNLCPFGEVFNATRFASVYAWNRKRISNCVADYSVLYNSASFSTFKCYGVSPTKLNDLCFTNVYADSFVIRGDEVRQIAPGQTGKIADYNYKLPDDFTGCVIAWNSNNLDSKVGGNYNYLYRLFRKSNLKPFERDISTEIYQAGSTPCNGVEGFNCYFPLQSYGFQPTNGVGYQPYRVVVLSFELLHAPATVCGPKKSTNLVKNKCVNFNFNGLTGTGVLTESNKKFLPFQQFGRDIADTTDAVRDPQTLEILDITPCSFGGVSVITPGTNTSNQVAVLYQGVNCTEVPVAIHADQLTPTWRVYSTGSNVFQTRAGCLIGAEHVNNSYECDIPIGAGICASYQTQTNSPRRARSVASQSIIAYTMSLGAENSVAYSNNSIAIPTNFTISVTTEILPVSMTKTSVDCTMYICGDSTECSNLLLQYGSFCTQLNRALTGIAVEQDKNTQEVFAQVKQIYKTPPIKDFGGFNFSQILPDPSKPSKRSFIEDLLFNKVTLADAGFIKQYGDCLGDIAARDLICAQKFNGLTVLPPLLTDEMIAQYTSALLAGTITSGWTFGAGAALQIPFAMQMAYRFNGIGVTQNVLYENQKLIANQFNSAIGKIQDSLFSTASALGKLQDVVNQNAQALNTLVKQLSSNCGAISSVLNDILSRLDKVEAEVQIDRLITCRLQSLQTYVTQQLIRAAEIRASANLAATKMSECVLGQSKRVDFCGKGYHLMSFPQSAPHGVVFLHVTYVPAQEKNFTTAPAICHDGKAHFPREGVFVSNGTHWFVTQRNFYEPQIITTDNTFVSGNCDVVIGIVNNTVYDPLQPELDSGGGSGGGQIYEGKLTAEGLRFGIVASRFNHALVDRLVEGAIDAIVRHGGREEDITLVRVPGSWEIPVAAGELARKEDIDAVIAIGVLIRGATPHFDYIASEVSKGLADLSLELRKPITFGVITADTLEQAIERAGTKHGNKGWEAALSAIEMANLFKSLR

SEQ ID NO: 8413 - protein, 1307 aa, Artificial Sequence
  SARS-CoV-2/Finland/FIN-313/2020__EPI_ISL_414641 spike protein (1-1147)(F970C_G999C) LumSynth construct
MFVFLVLLPLVSSQCVNLTTRTQLPPAYTNSFTRGVYYPDKVFRSSVLHSTQDLFLPFFSNVTWFHAIHVSGTNGTKRFDNPVLPFNDGVYFASTEKSNIIRGWIFGTTLDSKTQSLLIVNNATNVVIKVCEFQFCNDPFLGVYYHKNNKSWMESEFRVYSSANNCTFEYVSQPFLMDLEGKQGNFKNLREFVFKNIDGYFKIYSKHTPINLVRDLPQGFSALEPLVDLPIGINITRFKTLLALHRSYLTPGDSSSGWTAGAAAYYVGYLQPRTFLLKYNENGTITDAVDCALDPLSETKCTLKSFTVEKGIYQTSNFRVQPTESIVRFPNITNLCPFGEVFNATRFASVYAWNRKRISNCVADYSVLYNSASFSTFKCYGVSPTKLNDLCFTNVYADSFVIRGDEVRQIAPGQTGKIADYNYKLPDDFTGCVIAWNSNNLDSKVGGNYNYLYRLFRKSNLKPFERDISTEIYQAGSTPCNGVEGFNCYFPLQSYGFQPTNGVGYQPYRVVVLSFELLHAPATVCGPKKSTNLVKNKCVNFNFNGLTGTGVLTESNKKFLPFQQFGRDIADTTDAVRDPQTLEILDITPCSFGGVSVITPGTNTSNQVAVLYQGVNCTEVPVAIHADQLTPTWRVYSTGSNVFQTRAGCLIGAEHVNNSYECDIPIGAGICASYQTQTNSPRRARSVASQSIIAYTMSLGAENSVAYSNNSIAIPTNFTISVTTEILPVSMTKTSVDCTMYICGDSTECSNLLLQYGSFCTQLNRALTGIAVEQDKNTQEVFAQVKQIYKTPPIKDFGGFNFSQILPDPSKPSKRSFIEDLLFNKVTLADAGFIKQYGDCLGDIAARDLICAQKFNGLTVLPPLLTDEMIAQYTSALLAGTITSGWTFGAGAALQIPFAMQMAYRFNGIGVTQNVLYENQKLIANQFNSAIGKIQDSLSSTASALGKLQDVVNQNAQALNTLVKQLSSNCGAISSVLNDILSRLDKVEAEVQIDRLITCRLQSLQTYVTQQLIRAAEIRASANLAATKMSECVLGQSKRVDFCGKGYHLMSFPQSAPHGVVFLHVTYVPAQEKNFTTAPAICHDGKAHFPREGVFVSNGTHWFVTQRNFYEPQIITTDNTFVSGNCDVVIGIVNNTVYDPLQPELDSGGGSGGGQIYEGKLTAEGLRFGIVASRFNHALVDRLVEGAIDAIVRHGGREEDITLVRVPGSWEIPVAAGELARKEDIDAVIAIGVLIRGATPHFDYIASEVSKGLADLSLELRKPITFGVITADTLEQAIERAGTKHGNKGWEAALSAIEMANLFKSLR

SEQ ID NO: 8414 - protein, 1307 aa, Artificial Sequence
  SARS-CoV-2/Netherlands/ZuidHolland_2/2020__EPI_ISL_414556 spike protein (1-1147)(F970C_G999C) LumSynth construct
MFVFLVLLPLVSSQCVNLTTRTQLPPAYTNSFTRGVYYPDKVFRSSVLHSTQDLFLPFFSNVTWFHAIHVSGTNGTKRFDNPVLPFNDGVYFASTEKSNIIRGWIFGTTLDSKTQSLLIVNNATNVVIKVCEFQFCNDPFLGVYYHKNNKSWMESEFRVYSSANNCTFEYVSQPFLMDLEGKQGNFKNLREFVFKNIDGYFKIYSKHTPINLVRDLPQGFSALEPLVDLPIGINITRFQTLLALHRSYLTPGDSSSGWTAGAAAYYVGYLQPRTFLLKYNENGTITDAVDCALDPLSETKCTLKSFTVEKGIYQTSNFRVQPTESIVRFPNITNLCPFGEVFNATRFASVYAWNRKRISNCVADYSVLYNSASFSTFKCYGVSPTKLNDLCFTNVYADSFVIRGDEVRQIAPGQTGKIADYNYKLPDDFTGCVIAWNSNNLDSKVGGNYNYLYRLFRKSNLKPFERDISTEIYQAGSTPCNGVEGFNCYFPLQSYGFQPTNGVGYQPYRVVVLSFELLHAPATVCGPKKSTNLVKNKCVNFNFNGLTGTGVLTESNKKFLPFQQFGRDIADTTDAVRDPQTLEILDITPCSFGGVSVITPGTNTSNQVAVLYQGVNCTEVPVAIHADQLTPTWRVYSTGSNVFQTRAGCLIGAEHVNNSYECDIPIGAGICASYQTQTNSPRRARSVASQSIIAYTMSLGAENSVAYSNNSIAIPTNFTISVTTEILPVSMTKTSVDCTMYICGDSTECSNLLLQYGSFCTQLNRALTGIALEQDKNTQEVFAQVKQIYKTPPIKDFGGFNFSQILPDPSKPSKRSFIEDLLFNKVTLADAGFIKQYGDCLGDIAARDLICAQKFNGLTVLPPLLTDEMIAQYTSALLAGTITSGWTFGAGAALQIPFAMQMAYRFNGIGVTQNVLYENQKLIANQFNSAIGKIQDSLSSTASALGKLQDVVNQNAQALNTLVKQLSSNCGAISSVLNDILSRLDKVEAEVQIDRLITCRLQSLQTYVTQQLIRAAEIRASANLAATKMSECVLGQSKRVDFCGKGYHLMSFPQSAPHGVVFLHVTYVPAQEKNFTTAPAICHDGKAHFPREGVFVSNGTHWFVTQRNFYEPQIITTDNTFVSGNCDVVIGIVNNTVYDPLQPELDSGGGSGGGQIYEGKLTAEGLRFGIVASRFNHALVDRLVEGAIDAIVRHGGREEDITLVRVPGSWEIPVAAGELARKEDIDAVIAIGVLIRGATPHFDYIASEVSKGLADLSLELRKPITFGVITADTLEQAIERAGTKHGNKGWEAALSAIEMANLFKSLR

SEQ ID NO: 8415 - protein, 1307 aa, Artificial Sequence
  SARS-CoV-2/USA/WA-UW31/2020__EPI_ISL_414618 spike protein (1-1147)(F970C_G999C) LumSynth construct
MFVFLVLLPLVSSQCVNLTTRTQLPPAYTNSFTRGVYYPDKVFRSSVLHSTQDLFLPFFSNVTWFHAIHVSGTNGTKRFDNPVLPFNDGVYFASTEKSNIIRGWIFGTTLDSKTQSLLIVNNATNVVIKVCEFQFCNDPFLGVYYHKNNKSWMESEFRVYSSANNCTFEYVSQPFLMDLEGKQGNFKNLREFVFKNIDGYFKIYSKHTPINLVRDLPQGFSALEPLVDLPIGINITRFQTLLALHRSYLTPGDSSSGWTAGAAAYYVGYLQPRTFLLKYNENGTITDAVDCALDPLSETKCTLKSFTVEKGIYQTSNFRVQPTESIVRFPNITNLCPFGEVFNATRFASVYAWNRKRISNCVADYSVLYNSASFSTFKCYGVSPTKLNDLCFTNVYADSFVIRGDEVRQIAPGQTGKIADYNYKLPDDFTGCVIAWNSNNLDSKVGGNYNYLYRLFRKSNLKPFERDISTEIYQAGSTPCNGAEGFNCYFPLQSYGFQPTNGVGYQPYRVVVLSFELLHAPATVCGPKKSTNLVKNKCVNFNFNGLTGTGVLTESNKKFLPFQQFGRDIADTTDAVRDPQTLEILDITPCSFGGVSVITPGTNTSNQVAVLYQDVNCTEVPVAIHADQLTPTWRVYSTGSNVFQTRAGCLIGAEHVNNSYECDIPIGAGICASYQTQTNSPRRARSVASQSIIAYTMSLGAENSVAYSNNSIAIPTNFTISVTTEILPVSMTKTSVDCTMYICGDSTECSNLLLQYGSFCTQLNRALTGIAVEQDKNTQEVFAQVKQIYKTPPIKDFGGFNFSQILPDPSKPSKRSFIEDLLFNKVTLADAGFIKQYGDCLGDIAARDLICAQKFNGLTVLPPLLTDEMIAQYTSALLAGTITSGWTFGAGAALQIPFAMQMAYRFNGIGVTQNVLYENQKLIANQFNSAIGKIQDSLSSTASALGKLQDVVNQNAQALNTLVKQLSSNCGAISSVLNDILSRLDKVEAEVQIDRLITCRLQSLQTYVTQQLIRAAEIRASANLAATKMSECVLGQSKRVDFCGKGYHLMSFPQSAPHGVVFLHVTYVPAQEKNFTTAPAICHDGKAHFPREGVFVSNGTHWFVTQRNFYEPQIITTDNTFVSGNCDVVIGIVNNTVYDPLQPELDSGGGSGGGQIYEGKLTAEGLRFGIVASRFNHALVDRLVEGAIDAIVRHGGREEDITLVRVPGSWEIPVAAGELARKEDIDAVIAIGVLIRGATPHFDYIASEVSKGLADLSLELRKPITFGVITADTLEQAIERAGTKHGNKGWEAALSAIEMANLFKSLR

SEQ ID NO: 8416 - protein, 1307 aa, Artificial Sequence
  SARS-CoV-2/South Korea/SNU01/2020__EPI_ISL_411929 spike protein (1-1147)(F970C_G999C) LumSynth construct
MFVFLVLLPLVSSQCVNLTTRTQLPPAYTNSFTRGVYYPDKVFRSSVLHSTQDLFLPFFSNVTWFHAIHVSGTNGTKRFDNPVLPFNDGVYFASTEKSNIIRGWIFGTTLDSKTQSLLIVNNATNVVIKVCEFQFCNDPFLGVYYHKNNKSWMESEFRVYSSANNCTFEYVSQPFLMDLEGKQGNFKNLREFVFKNIDGYFKIYSKHTPINLVRDLPQGFWALEPLVDLPIGINITRFQTLLALHRSYLTPGDSSSGWTAGAAAYYVGYLQPRTFLLKYNENGTITDAVDCALDPLSETKCTLKSFTVEKGIYQTSNFRVQPTESIVRFPNITNLCPFGEVFNATRFASVYAWNRKRISNCVADYSVLYNSASFSTFKCYGVSPTKLNDLCFTNVYADSFVIRGDEVRQIAPGQTGKIADYNYKLPDDFTGCVIAWNSNNLDSKVGGNYNYLYRLFRKSNLKPFERDISTEIYQAGSTPCNGVEGFNCYFPLQSYGFQPTNGVGYQPYRVVVLSFELLHAPATVCGPKKSTNLVKNKCVNFNFNGLTGTGVLTESNKKFLPFQQFGRDIADTTDAVRDPQTLEILDITPCSFGGVSVITPGTNTSNQVAVLYQDVNCTEVPVAIHADQLTPTWRVYSTGSNVFQTRAGCLIGAEHVNNSYECDIPIGAGICASYQTQTNSPRRARSVASQSIIAYTMSLGAENSVAYSNNSIAIPTNFTISVTTEILPVSMTKTSVDCTMYICGDSTECSNLLLQYGSFCTQLNRALTGIAVEQDKNTQEVFAQVKQIYKTPPIKDFGGFNFSQILPDPSKPSKRSFIEDLLFNKVTLADAGFIKQYGDCLGDIAARDLICAQKFNGLTVLPPLLTDEMIAQYTSALLAGTITSGWTFGAGAALQIPFAMQMAYRFNGIGVTQNVLYENQKLIANQFNSAIGKIQDSLSSTASALGKLQDVVNQNAQALNTLVKQLSSNCGAISSVLNDILSRLDKVEAEVQIDRLITCRLQSLQTYVTQQLIRAAEIRASANLAATKMSECVLGQSKRVDFCGKGYHLMSFPQSAPHGVVFLHVTYVPAQEKNFTTAPAICHDGKAHFPREGVFVSNGTHWFVTQRNFYEPQIITTDNTFVSGNCDVVIGIVNNTVYDPLQPELDSGGGSGGGQIYEGKLTAEGLRFGIVASRFNHALVDRLVEGAIDAIVRHGGREEDITLVRVPGSWEIPVAAGELARKEDIDAVIAIGVLIRGATPHFDYIASEVSKGLADLSLELRKPITFGVITADTLEQAIERAGTKHGNKGWEAALSAIEMANLFKSLR

SEQ ID NO: 8417 - protein, 1307 aa, Artificial Sequence
  SARS-CoV-2/China/WF0004/2020__EPI_ISL_413694 spike protein (1-1147)(F970C_G999C) LumSynth construct
MFVFLVLLPLVSSQCVNLTTRTQLPPAYTNSFTRGVYYPDKVFRSSVLHSTQDLFLPFFSNVTWFHAIHVSGTNGTKRFDNPVLPFNDGVYFASTEKSNIIRGWIFGTTLDSKTQSLLIVNNATNVVIKVCEFQFCNDPFLGVYYHKNNKSWTESEFRVYSSANNCTFEYVSQPFLMDLEGKQGNFKNLREFVFKNIDGYFKIYSKHTPINLVRDLPQGFSALEPLVDLPIGINITRFQTLLALHRSYLTPGDSSSGWTAGAAAYYVGYLQPRTFLLKYNENGTITDAVDCALDPLSETKCTLKSFTVEKGIYQTSNFRVQPTESIVRFPNITNLCPFGEVFNATRFASVYAWNRKRISNCVADYSVLYNSASFSTFKCYGVSPTKLNDLCFTNVYADSFVIRGDEVRQIAPGQTGKIADYNYKLPDDFTGCVIAWNSNNLDSKVGGNYNYLYRLFRKSNLKPFERDISTEIYQAGSTPCNGVEGFNCYFPLQSYGFQPTNGVGYQPYRVVVLSFELLHAPATVCGPKKSTNLVKNKCVNFNFNGLTGTGVLTESNKKFLPFQQFGRDIADTTDAVRDPQTLEILDITPCSFGGVSVITPGTNTSNQVAVLYQDVNCTEVPVAIHADQLTPTWRVYSTGSNVFQTRAGCLIGAEHVNNSYECDIPIGAGICASYQTQTNSPRRARSVASQSIIAYTMSLGAENSVAYSNNSIAIPTNFTISVTTEILPVSMTKTSVDCTMYICGDSTECSNLLLQYGSFCTQLNRALTGIAVEQDKNTQEVFAQVKQIYKTPPIKDFGGFNFSQILPDPSKPSKRSFIEDLLFNKVTLADAGFIKQYGDCLGDIAARDLICAQKFNGLTVLPPLLTDEMIAQYTSALLAGTITSGWTFGAGAALQIPFAMQMAYRFNGIGVTQNVLYENQKLIANQFNSAIGKIQDSLSSTASALGKLQDVVNQNAQALNTLVKQLSSNCGAISSVLNDILSRLDKVEAEVQIDRLITCRLQSLQTYVTQQLIRAAEIRASANLAATKMSECVLGQSKRFDFCGKGYHLMSFPQSAPHGVVFLHVTYVPAQEKNFTTAPAICHDGKAHFPREGVFVSNGTHWFVTQRNFYEPQIITTDNTFVSGNCDVVIGIVNNTVYDPLQPELDSGGGSGGGQIYEGKLTAEGLRFGIVASRFNHALVDRLVEGAIDAIVRHGGREEDITLVRVPGSWEIPVAAGELARKEDIDAVIAIGVLIRGATPHFDYIASEVSKGLADLSLELRKPITFGVITADTLEQAIERAGTKHGNKGWEAALSAIEMANLFKSLR

SEQ ID NO: 8418 - protein, 1307 aa, Artificial Sequence
  SARS-CoV-2/China/WF0028/2020__EPI_ISL_413791 spike protein (1-1147)(F970C_G999C) LumSynth construct
MFVFLVLLPLVSSQCVNLTTRTQLPPAYTNSFTRGVYYPDKVFRSSVLHSTQDLFLPFFSNVTWFHAIHVSGTNGTKRFDNPVLPFNDGVYFASTEKSNIIRGWIFGTTLDSKTQSLLIVNNATNVVIKVCEFQFCNDPFLGVYYHKNNKSWMESEFRVYSSANNCTFEYVSQPFLMDLEGKQGNFKNLREFVFKNIDGYFKIYSKHTPINLVRDLPQGFSALEPLVDLPIGINITRFQTLLALHRSYLTPGDSSSGWTAGAAAYYVGYLQPRTFLLKYNENGTITDAVDCALDPLSETKCTLKSFTVEKGIYQTSNFRVQPTESIVRFPNITNLCPFGEVFNATRFASVYAWNRKRISNCVADYSVLYNSASFSTFKCYGVSPTKLNDLCFTNVYADSFVIRGDEVRQIAPGQTGKIADYNYKLPDDFTGCVIAWNSNNLDSKVGGNYNYLYRLFRKSNLKPFERDISTEIYQAGSTPCNGVEGFNCYFPLQSYGFQPTNGVGYQPYRVVVLSFELLHAPATVCGPKKSTNLVKNKCVNFNFNGLTGTGVLTESNKKFLPFQQFGRDIADTTDAVRDPQTLEILDITPCSFGGVSVITPGTNTSNQVAVLYQDVNCTEVPVAIHADQLTPTWRVYSTGSNVFQTRAGCLIGAEHVNNSYECDIPIGAGICASYQTQTNSPRRARSVASQSIIAYTMSLGAENSVAYSNNSIAIPTNFTISVTTEILPVSMTKTSVDCTMYICGDSTECSNLLLQYGSFCTQLNRALTGIAVEQDKNTQEVFAQVKQIYKTPPIKDFGGFNFSQILPDPSKPSKRSFIEDLLFNKVTLADAGFIKQYGDCLGDIAARDLICAQKFNGLTVLPPLLTDEMIAQYTSALLAGTITSGWTFGAGAALQIPFAMQMAYRFNGIGVTQNVLYENQKLIANQFNSAIGKIQDSLSSTASALGKLQDVVNQNAQALNTLVKQLSSNCGAISSVLNDILSRLDKVEAEVQIDRLITCRLQSLQTYVTQQLIRAAEIRASANLAATKMSECVLGQSKRVDFCGKGYHLMSFPQSAPHGVVFLHVTYVPAQEKNFTTAPAICHDGKAHFPREGVFVSNGTHWFVTQRNFYEPQIITTDNTFVSGNCDVVIGIVNNTVYDPLQPELESGGGSGGGQIYEGKLTAEGLRFGIVASRFNHALVDRLVEGAIDAIVRHGGREEDITLVRVPGSWEIPVAAGELARKEDIDAVIAIGVLIRGATPHFDYIASEVSKGLADLSLELRKPITFGVITADTLEQAIERAGTKHGNKGWEAALSAIEMANLFKSLR

SEQ ID NO: 8419 - protein, 1307 aa, Artificial Sequence
  SARS-CoV-2/2019-nCoV/USA-CruiseA-18/2020__MT159716.1 spike protein (1-1147)(F970C_G999C) LumSynth construct
MFVFLVLLPLVSSQCVNLTTRTQLPPAYTNSFTRGVYYPDKVFRSSVLHSTQDLFLPFFSNVTWFHAIHVSGTNGTKRFDNPVLPFNDGVYFASTEKSNIIRGWIFGTTLDSKTQSLLIVNNATNVVIKVCEFQFCNDPFLGVYYHKNNKSWMESELRVYSSANNCTFEYVSQPFLMDLEGKQGNFKNLREFVFKNIDGYFKIYSKHTPINLVRDLPQGFSALEPLVDLPIGINITRFQTLLALHRSYLTPGDSSSGWTAGAAAYYVGYLQPRTFLLKYNENGTITDAVDCALDPLSETKCTLKSFTVEKGIYQTSNFRVQPTESIVRFPNITNLCPFGEVFNATRFASVYAWNRKRISNCVADYSVLYNSASFSTFKCYGVSPTKLNDLCFTNVYADSFVIRGDEVRQIAPGQTGKIADYNYKLPDDFTGCVIAWNSNNLDSKVGGNYNYLYRLFRKSNLKPFERDISTEIYQAGSTPCNGVEGFNCYFPLQSYGFQPTNGVGYQPYRVVVLSFELLHAPATVCGPKKSTNLVKNKCVNFNFNGLTGTGVLTESNKKFLPFQQFGRDIADTTDAVRDPQTLEILDITPCSFGGVSVITPGTNTSNQVAVLYQDVNCTEVPVAIHADQLTPTWRVYSTGSNVFQTRAGCLIGAEHVNNSYECDIPIGAGICASYQTQTNSPRRARSVASQSIIAYTMSLGAENSVAYSNNSIAIPTNFTISVTTEILPVSMTKTSVDCTMYICGDSTECSNLLLQYGSFCTQLNRALTGIAVEQDKNTQEVFAQVKQIYKTPPIKDFGGFNFSQILPDPSKPSKRSFIEDLLFNKVTLADAGFIKQYGDCLGDIAARDLICAQKFNGLTVLPPLLTDEMIAQYTSALLAGTITSGWTFGAGAALQIPFAMQMAYRFNGIGVTQNVLYENQKLIANQFNSAIGKIQDSLSSTASALGKLQDVVNQNAQALNTLVKQLSSNCGAISSVLNDILSRLDKVEAEVQIDRLITCRLQSLQTYVTQQLIRAAEIRASANLAATKMSECVLGQSKRVDFCGKGYHLMSFPQSAPHGVVFLHVTYVPAQEKNFTTAPAICHDGKAHFPREGVFVSNGTHWFVTQRNFYEPQIITTDNTFVSGNCDVVIGIVNNTVYDPLQPELDSGGGSGGGQIYEGKLTAEGLRFGIVASRFNHALVDRLVEGAIDAIVRHGGREEDITLVRVPGSWEIPVAAGELARKEDIDAVIAIGVLIRGATPHFDYIASEVSKGLADLSLELRKPITFGVITADTLEQAIERAGTKHGNKGWEAALSAIEMANLFKSLR

SEQ ID NO: 8420 - protein, 1307 aa, Artificial Sequence
  SARS-CoV-2/SARS-CoV-2/Yunnan-01/human/2020/CHN__MT049951.1 spike protein (1-1147)(F970C_G999C) LumSynth construct
MFVFLVLLPLVSSQCVNLTTRTQLPPANTNSFTRGVYYPDKVFRSSVLHSTQDLFLPFFSNVTWFHAIHVSGTNGTKRFDNPVLPFNDGVYFASTEKSNIIRGWIFGTTLDSKTQSLLIVNNATNVVIKVCEFQFCNDPFLGVYYHKNNKSWMESEFRVYSSANNCTFEYVSQPFLMDLEGKQGNFKNLREFVFKNIDGYFKIYSKHTPINLVRDLPQGFSALEPLVDLPIGINITRFQTLLALHRSYLTPGDSSSGWTAGAAAYYVGYLQPRTFLLKYNENGTITDAVDCALDPLSETKCTLKSFTVEKGIYQTSNFRVQPTESIVRFPNITNLCPFGEVFNATRFASVYAWNRKRISNCVADYSVLYNSASFSTFKCYGVSPTKLNDLCFTNVYADSFVIRGDEVRQIAPGQTGKIADYNYKLPDDFTGCVIAWNSNNLDSKVGGNYNYLYRLFRKSNLKPFERDISTEIYQAGSTPCNGVEGFNCYFPLQSYGFQPTNGVGYQPYRVVVLSFELLHAPATVCGPKKSTNLVKNKCVNFNFNGLTGTGVLTESNKKFLPFQQFGRDIADTTDAVRDPQTLEILDITPCSFGGVSVITPGTNTSNQVAVLYQDVNCTEVPVAIHADQLTPTWRVYSTGSNVFQTRAGCLIGAEHVNNSYECDIPIGAGICASYQTQTNSPRRARSVASQSIIAYTMSLGAENSVAYSNNSIAIPTNFTISVTTEILPVSMTKTSVDCTMYICGDSTECSNLLLQYGSFCTQLNRALTGIAVEQDKNTQEVFAQVKQIYKTPPIKDFGGFNFSQILPDPSKPSKRSFIEDLLFNKVTLADAGFIKQYGDCLGDIAARDLICAQKFNGLTVLPPLLTDEMIAQYTSALLAGTITSGWTFGAGAALQIPFAMQMAYRFNGIGVTQNVLYENQKLIANQFNSAIGKIQDSLSSTASALGKLQDVVNQNAQALNTLVKQLSSNCGAISSVLNDILSRLDKVEAEVQIDRLITCRLQSLQTYVTQQLIRAAEIRASANLAATKMSECVLGQSKRVDFCGKGYHLMSFPQSAPHGVVFLHVTYVPAQEKNFTTAPAICHDGKAHFPREGVFVSNGTHWFVTQRNFYEPQIITTDNTFVSGNCDVVIGIVNNTVYDPLQPELDSGGGSGGGQIYEGKLTAEGLRFGIVASRFNHALVDRLVEGAIDAIVRHGGREEDITLVRVPGSWEIPVAAGELARKEDIDAVIAIGVLIRGATPHFDYIASEVSKGLADLSLELRKPITFGVITADTLEQAIERAGTKHGNKGWEAALSAIEMANLFKSLR

SEQ ID NO: 8421 - protein, 1307 aa, Artificial Sequence
  SARS-CoV-2/USA/WA-UW292/2020__EPI_ISL_418077 spike protein (1-1147)(F970C_G999C) LumSynth construct
MFVFLVLLPLVSSQCVNLTTRTQLPPAYTNSFTRGVYYPDKVFRSSVLHSTQDLFLPFFSNVTWFHAIHVSGTNGTKRFDNPVLPFNDGVYFASTEKSNIIRGWIFGTTLDSKTQSLLIVNNATNVVIKVCEFQFCNDPFLGVYYHKNNKSWMESEFRVYSSANNCTFEYVSQPFLMDLEGKQGNFKNLREFVFKNIDGYFKIYSKHTPINLVRDLPQGFSALEPLVDLPIGINITRFQTLLALHRSYLTPGDSSSGWTAGAAAYYVGYLQPRTFLLKYNENGTITDAVDCALDPLSETKCTLKSFTVEKGIYQTSNFRVQPTESIVRFPNITNLCPFGEVFNATRFASVYAWNRKRISNCVADYSVLYNSASFSTFKCYGVSPTKLNDLCFTNVYADSFVIRGDEVRQIAPGQTGKIADYNYKLPDDFTGCVIAWNSNNLDSKVGGNYNYLYRLFRKSNLKPFERDISTEIYQASSTPCNGVEGFNCYFPLQSYGFQPTNGVGYQPYRVVVLSFELLHAPATVCGPKKSTNLVKNKCVNFNFNGLTGTGVLTESNKKFLPFQQFGRDIADTTDAVRDPQTLEILDITPCSFGGVSVITPGTNTSNQVAVLYQDVNCTEVPVAIHADQLTPTWRVYSTGSNVFQTRAGCLIGAEHVNNSYECDIPIGAGICASYQTQTNSPRRARSVASQSIIAYTMSLGAENSVAYSNNSIAIPTNFTISVTTEILPVSMTKTSVDCTMYICGDSTECSNLLLQYGSFCTQLNRALTGIAVEQDKNTQEVFAQVKQIYKTPPIKDFGGFNFSQILPDPSKPSKRSFIEDLLFNKVTLADAGFIKQYGDCLGDIAARDLICAQKFNGLTVLPPLLTDEMIAQYTSALLAGTITSGWTFGAGAALQIPFAMQMAYRFNGIGVTQNVLYENQKLIANQFNSAIGKIQDSLSSTASALGKLQDVVNQNAQALNTLVKQLSSNCGAISSVLNDILSRLDKVEAEVQIDRLITCRLQSLQTYVTQQLIRAAEIRASANLAATKMSECVLGQSKRVDFCGKGYHLMSFPQSAPHGVVFLHVTYVPAQEKNFTTAPAICHDGKAHFPREGVFVSNGTHWFVTQRNFYEPQIITTDNTFVSGNCDVVIGIVNNTVYDPLQPELDSGGGSGGGQIYEGKLTAEGLRFGIVASRFNHALVDRLVEGAIDAIVRHGGREEDITLVRVPGSWEIPVAAGELARKEDIDAVIAIGVLIRGATPHFDYIASEVSKGLADLSLELRKPITFGVITADTLEQAIERAGTKHGNKGWEAALSAIEMANLFKSLR

SEQ ID NO: 8422 - protein, 1307 aa, Artificial Sequence
  SARS-CoV-2/Iceland/192/2020__EPI_ISL_417819 spike protein (1-1147)(F970C_G999C) LumSynth construct
MFVFFVLLPLVSSQCVNLTTRTQLPPAYTNSFTRGVYYPDKVFRSSVLHSTQDLFLPFFSNVTWFHAIHVSGTNGTKRFDNPVLPFNDGVYFASTEKSNIIRGWIFGTTLDSKTQSLLIVNNATNVVIKVCEFQFCNDPFLGVYYHKNNKSWMESEFRVYSSANNCTFEYVSQPFLMDLEGKQGNFKNLREFVFKNIDGYFKIYSKHTPINLVRDLPQGFSALEPLVDLPIGINITRFQTLLALHRSYLTPGDSSSGWTAGAAAYYVGYLQPRTFLLKYNENGTITDAVDCALDPLSETKCTLKSFTVEKGIYQTSNFRVQPTESIVRFPNITNLCPFGEVFNATRFASVYAWNRKRISNCVADYSVLYNSASFSTFKCYGVSPTKLNDLCFTNVYADSFVIRGDEVRQIAPGQTGKIADYNYKLPDDFTGCVIAWNSNNLDSKVGGNYNYLYRLFRKSNLKPFERDISTEIYQAGSTPCNGVEGFNCYFPLQSYGFQPTNGVGYQPYRVVVLSFELLHAPATVCGPKKSTNLVKNKCVNFNFNGLTGTGVLTESNKKFLPFQQFGRDIADTTDAVRDPQTLEILDITPCSFGGVSVITPGTNTSNQVAVLYQGVNCTEVPVAIHADQLTPTWRVYSTGSNVFQTRAGCLIGAEHVNNSYECDIPIGAGICASYQTQTNSPRRARSVASQSIIAYTMSLGAENSVAYSNNSIAIPTNFTISVTTEILPVSMTKTSVDCTMYICGDSTECSNLLLQYGSFCTQLNRALTGIAVEQDKNTQEVFAQVKQIYKTPPIKDFGGFNFSQILPDPSKPSKRSFIEDLLFNKVTLADAGFIKQYGDCLGDIAARDLICAQKFNGLTVLPPLLTDEMIAQYTSALLAGTITSGWTFGAGAALQIPFAMQMAYRFNGIGVTQNVLYENQKLIANQFNSAIGKIQDSLSSTASALGKLQDVVNQNAQALNTLVKQLSSNCGAISSVLNDILSRLDKVEAEVQIDRLITCRLQSLQTYVTQQLIRAAEIRASANLAATKMSECVLGQSKRVDFCGKGYHLMSFPQSAPHGVVFLHVTYVPAQEKNFTTAPAICHDGKAHFPREGVFVSNGTHWFVTQRNFYEPQIITTDNTFVSGNCDVVIGIVNNTVYDPLQPELDSGGGSGGGQIYEGKLTAEGLRFGIVASRFNHALVDRLVEGAIDAIVRHGGREEDITLVRVPGSWEIPVAAGELARKEDIDAVIAIGVLIRGATPHFDYIASEVSKGLADLSLELRKPITFGVITADTLEQAIERAGTKHGNKGWEAALSAIEMANLFKSLR

SEQ ID NO: 8423 - protein, 1307 aa, Artificial Sequence
  SARS-CoV-2/Belgium/ULG-6939/2020__EPI_ISL_417020 spike protein (1-1147)(F970C_G999C) LumSynth construct
MFVFLVLLPLVSSQCVNLTTRTQLPPAYTNSFTRGVYYPDKVFRSSVLHSTQDLFLPFFSNVTWFHAIHVSGTNGTKRFDNPVLPFNDGVYFASTEKSNIIRGWIFGTTLDSKTQSLLIVNNATNVVIKVCEFQFCNDPFLGVYYHKNNKSWMESEFRVYSSANNCTFEYVSQPFLMDLEGKQGNFKNLREFVFKNIDGYFKIYSKHTPINLVRDLPQGFSALEPLVDLPIGINITRFQTLLALHRSYLTPGDSSSGWTAGAAAYYVGYLQPRTFLLKYNENGTITDAVDCALDPLSETKCTLKSFTVEKGIYQTSNFRVQPTESIVRFPNITNLCPFGEVFNATRFASVYAWNRKRISNCVADYSVLYNSASFSTFKCYGVSPTKLNDLCFTNVYADSFVIRGDEVRQIAPGQTGKIADYNYKLPDDFTGCVIAWNSNNLDSKVGGNYNYLYRLFRKSNLKPFERDISTEIYQAGSTPCNGVEGFNCYFPLQSYGFQPTNGVGYQPYRVVVLSFELLHAPATVCGPKKSTNLVKNKCVNFNFNGLTGTGVLTESNKKFLPFQQFGRDIADTTDAVRDPQTLEILDITPCSFGGVSVITPGTNTSNQVAVLYQGVNCTEVPVAIHADQLTPTWRVYSTGSNVFQTRAGCLIGAEHVNNSYECDIPIGAGICASYQTQTNSPRRARSVASQSIIAYTMSLGAENSVVYSNNSIAIPTNFTISVTTEILPVSMTKTSVDCTMYICGDSTECSNLLLQYGSFCTQLNRALTGIAVEQDKNTQEVFAQVKQIYKTPPIKDFGGFNFSQILPDPSKPSKRSFIEDLLFNKVTLADAGFIKQYGDCLGDIAARDLICAQKFNGLTVLPPLLTDEMIAQYTSALLAGTITSGWTFGAGAALQIPFAMQMAYRFNGIGVTQNVLYENQKLIANQFNSAIGKIQDSLSSTASALGKLQDVVNQNAQALNTLVKQLSSNCGAISSVLNDILSRLDKVEAEVQIDRLITCRLQSLQTYVTQQLIRAAEIRASANLAATKMSECVLGQSKRVDFCGKGYHLMSFPQSAPHGVVFLHVTYVPAQEKNFTTAPAICHDGKAHFPREGVFVSNGTHWFVTQRNFYEPQIITTDNTFVSGNCDVVIGIVNNTVYDPLQPELDSGGGSGGGQIYEGKLTAEGLRFGIVASRFNHALVDRLVEGAIDAIVRHGGREEDITLVRVPGSWEIPVAAGELARKEDIDAVIAIGVLIRGATPHFDYIASEVSKGLADLSLELRKPITFGVITADTLEQAIERAGTKHGNKGWEAALSAIEMANLFKSLR

SEQ ID NO: 8424 - protein, 1307 aa, Artificial Sequence
  SARS-CoV-2/France/HF2496/2020__EPI_ISL_418231 spike protein (1-1147)(F970C_G999C) LumSynth construct
MFVFLVLLPLVSSQCVNLTTRTQLPPAYTNSFTRGVYYPDKVFRSSVLHSTQDLFLPFFSNVTWFHAIHVSGTNGTKRFDNPVLPFNDGVYFASTEKSNIIRGWIFGTTLDSKTQSLLIVNNATNVVIKVCEFQFCNDPFLGVYYHKNNKSWMESEFRVYSSANNCTFEYVSQPFLMDLEGKQGNFKNLREFVFKNIDGYFKIYSKHTPINLVRDLPQGFSALEPLVDLPIGINITRFQTLLALHRSYLTPGDSSSGWTAGAAAYYVGYLQPRTFLLKYNENGTITDAVDCALDPLSETKCTLKSFTVEKGIYQTSNFRVQPTESIVRFPNITNLCPFGEVFNATRFASVYAWNRKRISNCVADYSVLYNSASFSTFKCYGVSPTKLNDLCFTNVYADSFVIRGDEVRQIAPGQTGKIADYNYKLPDDFTGCVIAWNSNNLDSKVGGNYNYLYRLFRKSNLKPFERDISTEIYQAGSTPCNGVEGFNCYFPLQSYGFQPTNGVGYQPYRVVVLSFELLHAPATVCGPKKSTNLVKNKCVNFNFNGLTGTGVLTESNKKFLPFQQFGRDIADTTDAVRDPQTLEILDITPCSFGGVSVITPGTNTSNQVAVLYQGVNCTEVPVAIHADQLTPTWRVYSTGSNVFQTRAGCLIGAEHVNNSYECDIPIGAGICASYQTQTNSPRRARSVASQSIIAYTMSLGAENSVAYSNNSIAIPTNFTISVTTEILPVSMTKTSVDCTMYICGDSTECSNLLLQYGSFCTQLNRALTGIAVEQDKNTQEVFAQVKQIYKTPPIKDFGGFNFSQILPDPSKPSKRSFIEDLLFNKVTLADAGFIKQYGDCLGDIVARDLICAQKFNGLTVLPPLLTDEMIAQYTSALLAGTITSGWTFGAGAALQIPFAMQMAYRFNGIGVTQNVLYENQKLIANQFNSAIGKIQDSLSSTASALGKLQDVVNQNAQALNTLVKQLSSNCGAISSVLNDILSRLDKVEAEVQIDRLITCRLQSLQTYVTQQLIRAAEIRASANLAATKMSECVLGQSKRVDFCGKGYHLMSFPQSAPHGVVFLHVTYVPAQEKNFTTAPAICHDGKAHFPREGVFVSNGTHWFVTQRNFYEPQIITTDNTFVSGNCDVVIGIVNNTVYDPLQPELDSGGGSGGGQIYEGKLTAEGLRFGIVASRFNHALVDRLVEGAIDAIVRHGGREEDITLVRVPGSWEIPVAAGELARKEDIDAVIAIGVLIRGATPHFDYIASEVSKGLADLSLELRKPITFGVITADTLEQAIERAGTKHGNKGWEAALSAIEMANLFKSLR

SEQ ID NO: 8425 - protein, 1307 aa, Artificial Sequence
  SARS-CoV-2/USA/WA-UW291/2020__EPI_ISL_418076 spike protein (1-1147)(F970C_G999C) LumSynth construct
MFVFLVLLPLVSSQCVNLTTRTQLPPAYTNSFTRGVYYPDKVFRSSVLHSTQDLFLPFFSNVTWFHAIHVSGTNGTKRFDNPVLPFNDGVYFASTEKSNIIRGWIFGTTLDSKTQSLLIVNNATNVVIKVCEFQFCNDPFLGVYYHKNNKSWMESEFRVYSSANNCTFEYVSQPFLMDLEGKQGNFKNLREFVFKNIDGYFKIYSKHTPINLVRDLPQGFSALEPLVDLPIGINITRFQTLLALHRSYLTPGDSSSGWTAGAAAYYVGYLQPRTFLLKYNENGTITDAVDCALDPLSETKCTLKSFTVEKGIYQTSNFRVQPTESIVRFPNITNLCPFGEVFNATRFASVYAWNRKRISNCVADYSVLYNSASFSTFKCYGVSPTKLNDLCFTNVYADSFVIRGDEVRQIAPGQTGKIADYNYKLPDDFTGCVIAWNSNNLDSKVGGNYNYLYRLFRKSNLKPFERDISTEIYQAGSTPCNGVEGFNCYFPLQSYGFQPTNGVGYQPYRVVVLSFELLHAPATVCGPKKSTNLVKNKCVNFNFNGLTGTGVLTESNKKFLPFQQFGRDIADTTDAVRDPQTLEILDITPCSFGGVSVITPGTNTSNQVAVLYQGVNCTEVPVAIHADQLTPTWRVYSTGSNVFQTRAGCLIGAEHVNNSYECDIPIGAGICASYQTQTNSPRRARSVASQSIIAYTMSLGAENSVAYSNNSIAIPTNFTISVTTEILPVSMTKTSVDCTMYICGDSTECSNLLLQYGSFCTQLNRALTGIAVEQDKNTQEVFAQVKQIYKTPPIKDFGGFNFSQILPDPSKPSKRSFIEDLLFNKVTLADAGFIKQYGDCLGDIAARDLICAQKFNGLTVLPPLLTDEMIAQYTSALLAGTITSGWTFGAGAALQIPFAMQMAYRFNGIGVTQNVLYENQKLIANQFNSAIGKIQYSLSSTASALGKLQDVVNQNAQALNTLVKQLSSNCGAISSVLNDILSRLDKVEAEVQIDRLITCRLQSLQTYVTQQLIRAAEIRASANLAATKMSECVLGQSKRVDFCGKGYHLMSFPQSAPHGVVFLHVTYVPAQEKNFTTAPAICHDGKAHFPREGVFVSNGTHWFVTQRNFYEPQIITTDNTFVSGNCDVVIGIVNNTVYDPLQPELDSGGGSGGGQIYEGKLTAEGLRFGIVASRFNHALVDRLVEGAIDAIVRHGGREEDITLVRVPGSWEIPVAAGELARKEDIDAVIAIGVLIRGATPHFDYIASEVSKGLADLSLELRKPITFGVITADTLEQAIERAGTKHGNKGWEAALSAIEMANLFKSLR

SEQ ID NO: 8426 - protein, 1307 aa, Artificial Sequence; identical to SEQ ID NO: 8389
  SARS-CoV-2/Portugal/PT0034/2020__EPI_ISL_418019 spike protein (1-1147)(F970C_G999C) LumSynth construct

SEQ ID NO: 8427 - protein, 1307 aa, Artificial Sequence; identical to SEQ ID NO: 8381
  SARS-CoV-2/Iceland/202/2020__EPI_ISL_417750 spike protein (1-1147)(F970C_G999C) LumSynth construct

SEQ ID NO: 8428 - protein, 1307 aa, Artificial Sequence
  SARS-CoV-2/USA/WA-UW261/2020__EPI_ISL_418046 spike protein (1-1147)(F970C_G999C) LumSynth construct
MFVFLVLLPLVSSQCVNLTTRTQLPPAYTNSFTRGVYYPDKVFRSSVLHSTQDLFLPFFSNVTWFHAIHVSGTNGTKRFDNPVLPFNDGVYFASTEKSNIIRGWIFGTTLDSKTQSLLIVNNATNVVIKVCEFQFCNDPFLGVYYHKNNKSWMESEFRVYSSANNCTFEYVSQPFLMDLEGKQGNFKNLREFVFKNIDGYFKIYSKHTPINLVRDLPQGFSALEPLVDLPIGINITRFQTLLALHRSYLTPGDSSSGWTAGAAAYYVGYLQPRTFLLKYNENGTITDAVDCALDPLSETKCTLKSFTVEKGIYQTSNFRVQPTESIVRFPNITNLCPFGEVFNATRFTSVYAWNRKRISNCVADYSVLYNSASFSTFKCYGVSPTKLNDLCFTNVYADSFVIRGDEVRQIAPGQTGKIADYNYKLPDDFTGCVIAWNSNNLDSKVGGNYNYLYRLFRKSNLKPFERDISTEIYQAGSTPCNGVEGFNCYFPLQSYGFQPTNGVGYQPYRVVVLSFELLHAPATVCGPKKSTNLVKNKCVNFNFNGLTGTGVLTESNKKFLPFQQFGRDIADTTDAVRDPQTLEILDITPCSFGGVSVITPGTNTSNQVAVLYQDVNCTEVPVAIHADQLTPTWRVYSTGSNVFQTRAGCLIGAEHVNNSYECDIPIGAGICASYQTQTNSPRRARSVASQSIIAYTMSLGAENSVAYSNNSIAIPTNFTISVTTEILPVSMTKTSVDCTMYICGDSTECSNLLLQYGSFCTQLNRALTGIAVEQDKNTQEVFAQVKQIYKTPPIKDFGGFNFSQILPDPSKPSKRSFIEDLLFNKVTLADAGFIKQYGDCLGDIAARDLICAQKFNGLTVLPPLLTDEMIAQYTSALLAGTITSGWTFGAGAALQIPFAMQMAYRFNGIGVTQNVLYENQKLIANQFNSAIGKIQDSLSSTASALGKLQDVVNQNAQALNTLVKQLSSNCGAISSVLNDILSRLDKVEAEVQIDRLITCRLQSLQTYVTQQLIRAAEIRASANLAATKMSECVLGQSKRVDFCGKGYHLMSFPQSAPHGVVFLHVTYVPAQEKNFTTAPAICHDGKAHFPREGVFVSNGTHWFVTQRNFYEPQIITTDNTFVSGNCDVVIGIVNNTVYDPLQPELDSGGGSGGGQIYEGKLTAEGLRFGIVASRFNHALVDRLVEGAIDAIVRHGGREEDITLVRVPGSWEIPVAAGELARKEDIDAVIAIGVLIRGATPHFDYIASEVSKGLADLSLELRKPITFGVITADTLEQAIERAGTKHGNKGWEAALSAIEMANLFKSLR

SEQ ID NO: 8429 - protein, 1307 aa, Artificial Sequence
  SARS-CoV-2/Portugal/PT0035/2020__EPI_ISL_418020 spike protein (1-1147)(F970C_G999C) LumSynth construct
MFVFLVLLPLVSSQCVNLTTRTQLPPAYTNSFTRGVYYPDKVFRSSVLHSTQDLFLPFFSNVTWFHAIHVSGTNGTKRFDNPVLPFNDGVYFASTEKSNIIRGWIFGTTLDSKTQSLLIVNNATNVVIKVCEFQFCNDPFLGVYYHKNNKSWMESEFRVYSSANNCTFEYVSQPFLMDLEGKQGNFKNLREFVFKNIDGYFKIYSKHTPINLVRDLPQGFSALEPLVDLPIGINITRFQTLLALHRSYLTPGDSSSGWTAGAAAYYVGYLQPRTFLLKYNENGTITDAVDCALDPLSETKCTLKSFTVEKGIYQTSNFRVQPTESIVRFPNITNLCPFGEVFNATRFASVYAWNRKRISNCVADYSVLYNSASFSTFKCYGVSPTKLNDLCFTNVYADSFVIRGDEVRQIAPGQTGKIADYNYKLPDDFTGCVIAWNSNNLDSKVGGNYNYLYRLFRKSNLKPFERDISTEIYQAGSTPCNGVEGFNCYFPLQSYGFQPTNGVGYQPYRVVVLSFELLHAPATVCGPKKSTNLVKNKCVNFNFNGLTGTGVLTESNKKFLPFQQFGRDIADTTDAVRDPQTLEILDITPCSFGGVSVITPGTNTSNQVAVLYQDVNCTEVPVAIHADQLTPTWRVYSTGSNVFQTRAGCLIGAEHVNNSYECDIPIGAGICASYQTQTNSPRRARSVASQSIIAYTMSLGAENSVAYSNNSIAIPTNFTISVTTEILPVSMTKTSVDCTMYICGDSTECSNLLLQYGSFCTQLNRALTGIAVEQDKNTQEVFAQVKQIYKTPPIKDFGGFNFSQILPDPSKPSKRSFIEDLLFNKVTLADAGFIKQYGDCLGDISARDLICAQKFNGLTVLPPLLTDEMIAQYTSALLAGTITSGWTFGAGAALQIPFAMQMAYRFNGIGVTQNVLYENQKLIANQFNSAIGKIQDSLSSTASALGKLQDVVNQNAQALNTLVKQLSSNCGAISSVLNDILSRLDKVEAEVQIDRLITCRLQSLQTYVTQQLIRAAEIRASANLAATKMSECVLGQSKRVDFCGKGYHLMSFPQSAPHGVVFLHVTYVPAQEKNFTTAPAICHDGKAHFPREGVFVSNGTHWFVTQRNFYEPQIITTDNTFVSGNCDVVIGIVNNTVYDPLQPELDSGGGSGGGQIYEGKLTAEGLRFGIVASRFNHALVDRLVEGAIDAIVRHGGREEDITLVRVPGSWEIPVAAGELARKEDIDAVIAIGVLIRGATPHFDYIASEVSKGLADLSLELRKPITFGVITADTLEQAIERAGTKHGNKGWEAALSAIEMANLFKSLR

SEQ ID NO: 8430 - protein, 1307 aa, Artificial Sequence
  SARS-CoV-2/USA/NY-NYUMC7/2020__EPI_ISL_418192 spike protein (1-1147)(F970C_G999C) LumSynth construct
MFVFLVLLPLVSSQCVNLTTRTQLPPAYTNSFTRGVYYPDKVFRSSVLHSTQDLFLPFFSNVTWFHAIHVSGTNGTKRFDNPVLPFNDGVYFASTEKSNIIRGWIFGTTLDSKTQSLLIVNNATNVVIKVCEFQFCNDPFLGVYHHKNNKSWMESEFRVYSSANNCTFEYVSQPFLMDLEGKQGNFKNLREFVFKNIDGYFKIYSKHTPINLVRDLPQGFSALEPLVDLPIGINITRFQTLLALHRSYLTPGDSSSGWTAGAAAYYVGYLQPRTFLLKYNENGTITDAVDCALDPLSETKCTLKSFTVEKGIYQTSNFRVQPTESIVRFPNITNLCPFGEVFNATRFASVYAWNRKRISNCVADYSVLYNSASFSTFKCYGVSPTKLNDLCFTNVYADSFVIRGDEVRQIAPGQTGKIADYNYKLPDDFTGCVIAWNSNNLDSKVGGNYNYLYRLFRKSNLKPFERDISTEIYQAGSTPCNGVEGFNCYFPLQSYGFQPTNGVGYQPYRVVVLSFELLHAPATVCGPKKSTNLVKNKCVNFNFNGLTGTGVLTESNKKFLPFQQFGRDIADTTDAVRDPQTLEILDITPCSFGGVSVITPGTNTSNQVAVLYQGVNCTEVPVAIHADQLTPTWRVYSTGSNVFQTRAGCLIGAEHVNNSYECDIPIGAGICASYQTQTNSPRRARSVASQSIIAYTMSLGAENSVAYSNNSIAIPTNFTISVTTEILPVSMTKTSVDCTMYICGDSTECSNLLLQYGSFCTQLNRALTGIAVEQDKNTQEVFAQVKQIYKTPPIKDFGGFNFSQILPDPSKPSKRSFIEDLLFNKVTLADAGFIKQYGDCLGDIAARDLICAQKFNGLTVLPPLLTDEMIAQYTSALLAGTITSGWTFGAGAALQIPFAMQMAYRFNGIGVTQNVLYENQKLIANQFNSAIGKIQDSLSSTASALGKLQDVVNQNAQALNTLVKQLSSNCGAISSVLNDILSRLDKVEAEVQIDRLITCRLQSLQTYVTQQLIRAAEIRASANLAATKMSECVLGQSKRVDFCGKGYHLMSFPQSAPHGVVFLHVTYVPAQEKNFTTAPAICHDGKAHFPREGVFVSNGTHWFVTQRNFYEPQIITTDNTFVSGNCDVVIGIVNNTVYDPLQPELDSGGGSGGGQIYEGKLTAEGLRFGIVASRFNHALVDRLVEGAIDAIVRHGGREEDITLVRVPGSWEIPVAAGELARKEDIDAVIAIGVLIRGATPHFDYIASEVSKGLADLSLELRKPITFGVITADTLEQAIERAGTKHGNKGWEAALSAIEMANLFKSLR

SEQ ID NO: 8431 - protein, 1307 aa, Artificial Sequence
  SARS-CoV-2/Iceland/189/2020__EPI_ISL_417709 spike protein (1-1147)(F970C_G999C) LumSynth construct
MFVFLVLLPLVSSQCVNLTTRTQLPPAYTNSFTRGVYYPDKVFRSSVLHSTQDLFLPFFSNVTWFHAIHVSGTNGTKRFDNPVLPFNDGVYFASTEKSNIIRGWIFGTTLDSKTQSLLIVNNATNVVIKVCEFQFCNDPFLGVYYHKNNKSWMESEFRVYSSANNCTFEYVSQPFLMDLEGKQGNFKNLREFVFKNIDGYFKIYSKHTPINLVRDLPQGFSALEPLVDLPIGINITRFQTLLALHRSYLTPGDSSSGWTAGAAAYYVGYLQPRTFLLKYNENGTITDAVDCALDPLSETKCTLKSFTVEKGIYQTSNFRVQPTESIVRFPNITNLCPFGEVFNATRFASVYAWNRKRISNCVADYSVLYNSASFSTFKCYGVSPTKLNDLCFTNVYADSFVIRGDEVRQIAPGQTGKIADYNYKLPDDFTGCVIAWNSNNLDSKVGGNYNYLYRLFRKSNLKPFERDISTEIYQAGSTPCNGVEGFNCYFPLQSYGFQPTNGVGYQPYRVVVLSFELLHAPATVCGPKKSTNLVKNKCVNFNFNGLTGTGVLTESNKKFLPFQQFGRDIADTTDAVRDPQTLEILDITPCSFGGVSVITPGTNTSNQVAVLYQGVNCTEVPVAIHADQLTPTWRVYSTGSNVFQTRAGCLIGAEHVNNSYECDIPIGAGICASYQTQTNSPRRARSVASQSIIAYTMSLGAENSVAYSNNSIAIPTNFTISVTTEILPVSMTKTSVDCTMYICGDSTECSNLLLQYGSFCTQLNRALTGIAVEQDKNTQEVFAQVKQIYKTPPIKDFGGFNFSQILPDPSKPSKRSFIEDLLFNKVTLADAGFTKQYGDCLGDIAARDLICAQKFNGLTVLPPLLTDEMIAQYTSALLAGTITSGWTFGAGAALQIPFAMQMAYRFNGIGVTQNVLYENQKLIANQFNSAIGKIQDSLSSTASALGKLQDVVNQNAQALNTLVKQLSSNCGAISSVLNDILSRLDKVEAEVQIDRLITCRLQSLQTYVTQQLIRAAEIRASANLAATKMSECVLGQSKRVDFCGKGYHLMSFPQSAPHGVVFLHVTYVPAQEKNFTTAPAICHDGKAHFPREGVFVSNGTHWFVTQRNFYEPQIITTDNTFVSGNCDVVIGIVNNTVYDPLQPELDSGGGSGGGQIYEGKLTAEGLRFGIVASRFNHALVDRLVEGAIDAIVRHGGREEDITLVRVPGSWEIPVAAGELARKEDIDAVIAIGVLIRGATPHFDYIASEVSKGLADLSLELRKPITFGVITADTLEQAIERAGTKHGNKGWEAALSAIEMANLFKSLR

SEQ ID NO: 8432 - protein, 1307 aa, Artificial Sequence
  SARS-CoV-2/Australia/NSW56/2020__EPI_ISL_417408 spike protein (1-1147)(F970C_G999C) LumSynth construct
MFVFLVLLPLVSSQCVNLTTRTQLPPAYTNSFTRGVYYPDKVFRSSVLHSTQDLFLPFFSNVTWFHAIHVSGTNGTKRFDNPVLPFNDGVYFASTEKSNIIRGWIFGTTLDSKTQSLLIVNNATNVVIKVCEFQFCNDPFLGVYYHKNNKSWMESEFRVYSSANNCTFEYVSQPFLMDLEGKQGNFKNLREFVFKNIDGYFKIYSKHTPINLVRDLPQGFSALEPLVDLPIGINITRFQTLLALHRSYLTPGDSSSGWTAGAAAYYVGYLQPRTFLLKYNENGTITDAVDCALDPLSETKCTLKSFTVEKGIYQTSNFRVQPTESIVRFPNITNLCPFGEVFNATRFASVYAWNRKRISNCVADYSVLYNSASFSTFKCYGVSPTKLNDLCFTNVYADSFVIRGDEVRQIAPGQTGKIADYNYKLPDDFTGCVIAWNSNNLDSKVGGNYNYLYRLFRKSNLKPFERDISTEIYQAGSTPCNGVEGFNCYFPLQSYGFQPTNGVGYQPYRVVVLSFELLHAPATVCGPKKSTNLVKNKCVNFNFNGLTGTGVLTESNKKFLPFQQFGRDIADTTDAVRDPQTLEILDITPCSFGGVSVITPGTNTSNQVAVLYQDVNCTEVPVAIHADQLTPTWRVYSTGSNVFQTRAGCLIGAEHVNNSYECDIPIGAGICASYQTQTNSPRRARSVASQSIIAYTMSLGAENSVAYSNNSIAIPTNFTISVTTEILPVSMTKTSVDCTMYICGDSTECSNLLLQYGSFCTQLNRALTGIAVEQDKNTQEVFAQVKQIYKTPPIKDFGGFNFSQILPDSSKPSKRSFIEDLLFNKVTLADAGFIKQYGDCLGDIAARDLICAQKFNGLTVLPPLLTDEMIAQYTSALLAGTITSGWTFGAGAALQIPFAMQMAYRFNGIGVTQNVLYENQKLIANQFNSAIGKIQDSLSSTASALGKLQDVVNQNAQALNTLVKQLSSNCGAISSVLNDILSRLDKVEAEVQIDRLITCRLQSLQTYVTQQLIRAAEIRASANLAATKMSECVLGQSKRVDFCGKGYHLMSFPQSAPHGVVFLHVTYVPAQEKNFTTAPAICHDGKAHFPREGVFVSNGTHWFVTQRNFYEPQIITTDNTFVSGNCDVVIGIVNNTVYDPLQPELDSGGGSGGGQIYEGKLTAEGLRFGIVASRFNHALVDRLVEGAIDAIVRHGGREEDITLVRVPGSWEIPVAAGELARKEDIDAVIAIGVLIRGATPHFDYIASEVSKGLADLSLELRKPITFGVITADTLEQAIERAGTKHGNKGWEAALSAIEMANLFKSLR

SEQ ID NO: 8433 - protein, 1307 aa, Artificial Sequence
  SARS-CoV-2/Iceland/280/2020__EPI_ISL_417608 spike protein (1-1147)(F970C_G999C) LumSynth construct
MFVFLVLLPLVSSQCVNLTTRTQLPPAYTNSFTRGVYYPDKVFRSSVLHSTQDLFLPFFSNVTWFHAIHVSGTNGTKRFDNPVLPFNDGVYFASTEKSNIIRGWIFGTTLDSKTQSLLIVNNATNVVIKVCEFQFCNDPFLGVYYHKNNKSWMESEFRVYSSANNCTFEYVSQPFLMDLEGKQGNFKNLREFVFKNIDGYFKIYSKHTPINLVRDLPQGFSALEPLVDLPIGINITRFQTLLALHRSYLTPGDSSSGWTAGAAAYYVGYLQPRTFLLKYNENGTITDAVDCALDPLSETKCTLKSFTVEKGIYQTSNFRVQPTESIVRFPNITNLCPFGEVFNATRFASVYAWNRKRISNCVADYSVLYNSASFSTFKCYGVSPTKLNDLCFTNVYADSFVIRGDEVRQIAPGQTGKIADYNYKLPDDFTGCVIAWNSNNLDSKVGGNYNYLYRLFRKSNLKPFERDISTEIYQAGSTPCNGVEGFNCYFPLQSYGFQPTNGVGYQPYRVVVLSFELLHAPATVCGPKKSTNLVKNKCVNFNFNGLTGTGVLTESNKKFLPFQQFGRDIADTTDAVRDPQTLEILDITPCSFGGVSVITPGTNTSNQVAVLYQGVNCTEVPVAIHADQLTPTWRVYSTGSNVFQTRAGCLIGAEHVNNSYECDIPIGAGICASYHTQTNSPRRARSVASQSIIAYTMSLGAENSVAYSNNSIAIPTNFTISVTTEILPVSMTKTSVDCTMYICGDSTECSNLLLQYGSFCTQLNRALTGIAVEQDKNTQEVFAQVKQIYKTPPIKDFGGFNFSQILPDPSKPSKRSFIEDLLFNKVTLADAGFIKQYGDCLGDIAARDLICAQKFNGLTVLPPLLTDEMIAQYTSALLAGTITSGWTFGAGAALQIPFAMQMAYRFNGIGVTQNVLYENQKLIANQFNSAIGKIQDSLSSTASALGKLQDVVNQNAQALNTLVKQLSSNCGAISSVLNDILSRLDKVEAEVQIDRLITCRLQSLQTYVTQQLIRAAEIRASANLAATKMSECVLGQSKRVDFCGKGYHLMSFPQSAPHGVVFLHVTYVPAQEKNFTTAPAICHDGKAHFPREGVFVSNGTHWFVTQRNFYEPQIITTDNTFVSGNCDVVIGIVNNTVYDPLQPELDSGGGSGGGQIYEGKLTAEGLRFGIVASRFNHALVDRLVEGAIDAIVRHGGREEDITLVRVPGSWEIPVAAGELARKEDIDAVIAIGVLIRGATPHFDYIASEVSKGLADLSLELRKPITFGVITADTLEQAIERAGTKHGNKGWEAALSAIEMANLFKSLR

SEQ ID NO: 8434 - protein, 1307 aa, Artificial Sequence; identical to SEQ ID NO: 8389
  SARS-CoV-2/Iceland/247/2020__EPI_ISL_417575 spike protein (1-1147)(F970C_G999C) LumSynth construct

SEQ ID NO: 8435 - protein, 1307 aa, Artificial Sequence
  SARS-CoV-2/Iceland/238/2020__EPI_ISL_417566 spike protein (1-1147)(F970C_G999C) LumSynth construct
MFVFLVLLPLVSSQCVNLTTRTQLPPAYTNSFTRGVYYPDKVFRSSVLHSTQDLFLPFFSNVTWFHAIHVSGTNGTKRFDNPVLPFNDGVYFASTEKSNIIRGWIFGTTLDSKTQSLLIVNNATNVVIKVCEFQFCNDPFLGVYYHKNNKSWMESEFRVYSSANNCTFEYVSQPFLMDLEGKQGNFKNLREFVFKNIDGYFKIYSKHTPINLVRDLPQGFSALEPLVDLPIGINITRFQTLLALHRSYLTPGDSSSGWTAGAAAYYVGYLQPRTFLLKYNENGTITDAVDCALDPLSETKCTLKSFTVEKGIYQTSNFRVQPTESIVRFPNITNLCPFGEVFNATRFASVYAWNRKRISNCVADYSVLYNSASFSTFKCYGVSPTKLNDLCFTNVYADSFVIRGDEVRQIAPGQTGKIADYNYKLPDDFTGCVIAWNSNNLDSKVGGNYNYLYRLFRKSNLKPFERDISTEIYQAGSTPCNGVEGFNCYFPLQSYGFQPTNGVGYQPYRVVVLSFELLHAPATVCGPKKSTNLVKNKCVNFNFNGLTGTGVLTESNKKFLPFQQFGRDIADTTDAVRDPQTLEILDITPCSFGGVSVITPGTNTSNQVAVLYQGVNCTEVPVAIHADQLTPTWRVYSTGSNVFQTRAGCLIGAEHVNNSYECDIPIGAGICASYQTQTNSPRRARSVASQSIIAYTMSLGAENSVAYSNNSIAIPTNFTISVTTEILPVSMTKTSVDCTMYICGDSTECSNLLLQYGSFCTQLNRALTGIAVEQDKNTQEVFAQVKQIYKTPPIKDFGGFNFSQILPDPSKPSKRSFIEDLLFNKVTLADVGFIKQYGDCLGDIAARDLICAQKFNGLTVLPPLLTDEMIAQYTSALLAGTITSGWTFGAGAALQIPFAMQMAYRFNGIGVTQNVLYENQKLIANQFNSAIGKIQDSLSSTASALGKLQDVVNQNAQALNTLVKQLSSNCGAISSVLNDILSRLDKVEAEVQIDRLITCRLQSLQTYVTQQLIRAAEIRASANLAATKMSECVLGQSKRVDFCGKGYHLMSFPQSAPHGVVFLHVTYVPAQEKNFTTAPAICHDGKAHFPREGVFVSNGTHWFVTQRNFYEPQIITTDNTFVSGNCDVVIGIVNNTVYDPLQPELDSGGGSGGGQIYEGKLTAEGLRFGIVASRFNHALVDRLVEGAIDAIVRHGGREEDITLVRVPGSWEIPVAAGELARKEDIDAVIAIGVLIRGATPHFDYIASEVSKGLADLSLELRKPITFGVITADTLEQAIERAGTKHGNKGWEAALSAIEMANLFKSLR

SEQ ID NO: 8436 - protein, 1307 aa, Artificial Sequence
  SARS-CoV-2/Greece/16/2020__EPI_ISL_418265 spike protein (1-1147)(F970C_G999C) LumSynth construct
MFVFLVLLPLVSSQCVNLTTRTQLPPAYTNSFTRGVYYPDKVFRSSVLHSTQDLFLPFFSNVTWFHAIHVSGTNGTKRFDNPVLPFNDGVYFASTEKSNIIRGWIFGTTLDSKTQSLLIVNNATNVVIKVCEFQFCNDPFLGVYYHKNNKSWMESEFRVYSSANNCTFEYVSQPFLMDLEGKQGNFKNLREFVFKNVDGYFKIYSKHTPINLVRDLPQGFSALEPLVDLPIGINITRFQTLLALHRSYLTPGDSSSGWTAGAAAYYVGYLQPRTFLLKYNENGTITDAVDCALDPLSETKCTLKSFTVEKGIYQTSNFRVQPTESIVRFPNITNLCPFGEVFNATRFASVYAWNRKRISNCVADYSVLYNSASFSTFKCYGVSPTKLNDLCFTNVYADSFVIRGDEVRQIAPGQTGKIADYNYKLPDDFTGCVIAWNSNNLDSKVGGNYNYLYRLFRKSNLKPFERDISTEIYQAGSTPCNGVEGFNCYFPLQSYGFQPTNGVGYQPYRVVVLSFELLHAPATVCGPKKSTNLVKNKCVNFNFNGLTGTGVLTESNKKFLPFQQFGRDIADTTDAVRDPQTLEILDITPCSFGGVSVITPGTNTSNQVAVLYQDVNCTEVPVAIHADQLTPTWRVYSTGSNVFQTRAGCLIGAEHVNNSYECDIPIGAGICASYQTQTNSPRRARSVASQSIIAYTMSLGAENSVAYSNNSIAIPTNFTISVTTEILPVSMTKTSVDCTMYICGDSTECSNLLLQYGSFCTQLNRALTGIAVEQDKNTQEVFAQVKQIYKTPPIKDFGGFNFSQILPDPSKPSKRSFIEDLLFNKVTLADAGFIKQYGDCLGDIAARDLICAQKFNGLTVLPPLLTDEMIAQYTSALLAGTITSGWTFGAGAALQIPFAMQMAYRFNGIGVTQNVLYENQKLIANQFNSAIGKIQDSLSSTASALGKLQDVVNQNAQALNTLVKQLSSNCGAISSVLNDILSRLDKVEAEVQIDRLITCRLQSLQTYVTQQLIRAAEIRASANLAATKMSECVLGQSKRVDFCGKGYHLMSFPQSAPHGVVFLHVTYVPAQEKNFTTAPAICHDGKAHFPREGVFVSNGTHWFVTQRNFYEPQIITTDNTFVSGNCDVVIGIVNNTVYDPLQPELDSGGGSGGGQIYEGKLTAEGLRFGIVASRFNHALVDRLVEGAIDAIVRHGGREEDITLVRVPGSWEIPVAAGELARKEDIDAVIAIGVLIRGATPHFDYIASEVSKGLADLSLELRKPITFGVITADTLEQAIERAGTKHGNKGWEAALSAIEMANLFKSLR

SEQ ID NO: 8437 - protein, 1307 aa, Artificial Sequence
  SARS-CoV-2/Iceland/319/2020__EPI_ISL_417648 spike protein (1-1147)(F970C_G999C) LumSynth construct
MFVFLVLLPLVSSQCVNLTTRTQLPPAYTNSFTRGVYYPDKVFRSSVLHSTQDLFLPFFSNVTWFHAIHVSGTNGTKRFDNPVLPFNDGVYFASTEKSNIIRGWIFGTTLDSKTQSLLIVNNATNVVIKVCEFQFCNDPFLGVYYHKNNKSWMESEFRVYSSANNCTFEYVSQPFLIDLEGKQGNFKNLREFVFKNIDGYFKIYSKHTPINLVRDLPQGFSALEPLVDLPIGINITRFQTLLALHRSYLTPGDSSSGWTAGAAAYYVGYLQPRTFLLKYNENGTITDAVDCALDPLSETKCTLKSFTVEKGIYQTSNFRVQPTESIVRFPNITNLCPFGEVFNATRFASVYAWNRKRISNCVADYSVLYNSASFSTFKCYGVSPTKLNDLCFTNVYADSFVIRGDEVRQIAPGQTGKIADYNYKLPDDFTGCVIAWNSNNLDSKVGGNYNYLYRLFRKSNLKPFERDISTEIYQAGSTPCNGVEGFNCYFPLQSYGFQPTNGVGYQPYRVVVLSFELLHAPATVCGPKKSTNLVKNKCVNFNFNGLTGTGVLTESNKKFLPFQQFGRDIADTTDAVRDPQTLEILDITPCSFGGVSVITPGTNTSNQVAVLYQGVNCTEVPVAIHADQLTPTWRVYSTGSNVFQTRAGCLIGAEHVNNSYECDIPIGAGICASYQTQTNSPRRARSVASQSIIAYTMSLGAENSVAYSNNSIAIPTNFTISVTTEILPVSMTKTSVDCTMYICGDSTECSNLLLQYGSFCTQLNRALTGIAVEQDKNTQEVFAQVKQIYKTPPIKDFGGFNFSQILPDPSKPSKRSFIEDLLFNKVTLADAGFIKQYGDCLGDIAARDLICAQKFNGLTVLPPLLTDEMIAQYTSALLAGTITSGWTFGAGAALQIPFAMQMAYRFNGIGVTQNVLYENQKLIANQFNSAIGKIQDSLSSTASALGKLQDVVNQNAQALNTLVKQLSSNCGAISSVLNDILSRLDKVEAEVQIDRLITCRLQSLQTYVTQQLIRAAEIRASANLAATKMSECVLGQSKRVDFCGKGYHLMSFPQSAPHGVVFLHVTYVPAQEKNFTTAPAICHDGKAHFPREGVFVSNGTHWFVTQRNFYEPQIITTDNTFVSGNCDVVIGIVNNTVYDPLQPELDSGGGSGGGQIYEGKLTAEGLRFGIVASRFNHALVDRLVEGAIDAIVRHGGREEDITLVRVPGSWEIPVAAGELARKEDIDAVIAIGVLIRGATPHFDYIASEVSKGLADLSLELRKPITFGVITADTLEQAIERAGTKHGNKGWEAALSAIEMANLFKSLR

SEQ ID NO: 8438 - protein, 1307 aa, Artificial Sequence
  SARS-CoV-2/Congo/94/2020__EPI_ISL_417947 spike protein (1-1147)(F970C_G999C) LumSynth construct
MFVFLVLLPLVSSQCVNLTTRTQLPPAYTNSFTRGVYYPDKVFRSSVLHSTQDLFLPFFSNVTWFHAIHVSGTNGTKRFDNPVLPFNDGVYFASTEKSNIIRGWIFGTTLDSKTQSLLIVNNATNVVIKVCEFQFCNDPFLGVYYHKNNKSWMESEFRVYSSANNCTFEYVSQPFLMDLEGKQGNFKNLREFVFKNIDGYFKIYSKHTPINLVRDLPQGFSALEPLVDLPIGINITRFQTLLALHRSYLTPGDSSSGWTAGAAAYYVGYLQPRTFLLKYNENGTITDAVDCALDPLSETKCTLKSFTVEKGIYQTSNFRVQPTESIVRFPNITNLCPFGEVFNATRFASVYAWNRKRISNCVADYSVLYNSASFSTFKCYGVSPTKLNDLCFTNVYADSFVIRGDEVRQIAPGQTGKIADYNYKLPDDFTGCVIAWNSNNLDSKVGGNYNYLYRLFRKSNLKPFERDISTEIYQAGSTPCNGVEGFNCYFPLQSYGFQPTNGVGYQPYRVVVLSFELLHAPATVCGPKKSTNLVKNKCVNFNFNGLTGTGVLTESNKKFLPFQQFGRDIADTTDAVRDPQTLEILDITPCSFGGVSVITPGTNTSNQVAVLYQGVNCTEVPVAIHADQLTPTWRVYSTGSNVFQTRAGCLIGAEHVNNSYECDIPIGAGICASYQTQTNSPRRARSVASQSIIAYTMSLGAENSVAYSNNSIAIPTNFTISVTTEILPVSMTKTSVDCTMYICGDSTECSNLLLQYGSFCTQLNRALTGIAVEQDKNTQEVFAQVKQIYKTPPIKDFGGFNFSQILPDPSKPSKRSFIEDILFNKVTLADAGFIKQYGDCLGDIAARDLICAQKFNGLTVLPPLLTDEMIAQYTSALLAGTITSGWTFGAGAALQIPFAMQMAYRFNGIGVTQNVLYENQKLIANQFNSAIGKIQDSLSSTASALGKLQDVVNQNAQALNTLVKQLSSNCGAISSVLNDILSRLDKVEAEVQIDRLITCRLQSLQTYVTQQLIRAAEIRASANLAATKMSECVLGQSKRVDFCGKGYHLMSFPQSAPHGVVFLHVTYVPAQEKNFTTAPAICHDGKAHFPREGVFVSNGTHWFVTQRNFYEPQIITTDNTFVSGNCDVVIGIVNNTVYDPLQPELDSGGGSGGGQIYEGKLTAEGLRFGIVASRFNHALVDRLVEGAIDAIVRHGGREEDITLVRVPGSWEIPVAAGELARKEDIDAVIAIGVLIRGATPHFDYIASEVSKGLADLSLELRKPITFGVITADTLEQAIERAGTKHGNKGWEAALSAIEMANLFKSLR

SEQ ID NO: 8439 - protein, 1307 aa, Artificial Sequence
  SARS-CoV-2/Congo/158/2020__EPI_ISL_417950 spike protein (1-1147)(F970C_G999C) LumSynth construct
MFVFLVLLPLVSSQCVNLTTRTQLPPAYTNSFTRGVYYPDKVFRSSVLHSTQDLFLPFFSNVTWFHAIHVSGTNGTKRFDNPVLPFNDGVYFASTEKSNIIRGWIFGTTLDSKTQSLLIVNNATNVVIKVCEFQFCNDPFLGVYYHKNNKSWMESEFRVYSSANNCTFEYVSQPFLMDLEGKQGNFKNLREFVFKNIDGYFKIYSKHTPINLVRDLPQGFSALEPLVDLPIGINITRFQTLLALHRSYLTPGDSSSGWTAGAAAYYVGYLQPRTFLLKYNENGTITDAVDCALDPLSETKCTLKSFTVEKGIYQTSNFRVQPTESIVRFPNITNLCPFGEVFNATRFASVYAWNRKRISNCVADYSVLYNSASFSTFKCYGVSPTKLNDLCFTNVYADSFVIRGDEVRQIAPGQTGKIADYNYKLPDDFTGCVIAWNSNNLDSKVGGNYNYLYRLFRKSNLKPFERDISTEIYQAGSTPCNGVEGFNCYFPLQSYGFQPTNGVGYQPYRVVVLSFELLHAPATVCGPKKSTNLVKNKCVNFNFNGLTGTGVLTESNKKFLPFQQFGRDIADTTDAVRDPQTLEILDITPCSFGGVSVITPGTNTSNQVAVLYQDVNCTEVPVAIHADQLTPTWRVYSTGSNVFQTRAGCLIGAEHVNNSYECDIPIGAGICASYQTQTNSPRRARSVASQSIIAYTMSLGAENSVAYSNNSIAIPTNFTISVTTEILPVSMTKTSVDCTMYICGDSTECSNLLLQYGSFCTQLNRALTGIAVEQDKNTQEVFAQVKQIYKTPPIKDFGGFNFSQILPDPSKPSKRSFIEDLLFNKVTLADAGFIKQYGDCLGDIAARDLICAQKFNGLTVLPPLLTDEMIAQYTSALLAGTITSGWTFGAGAALQIPFAMQMAYRFNGIGVTQNVLYENQKLIANQFNSAIGKIQDSLSSTASALGKLQDVVNQNAQALNTLVKQLSSNCGAISSVLNDILSRLDKVEAEVQIDRLITCRLQSLQTYVTQQLIRAAEIRASANLAATKMSECVLGQSKRVDFCGKGYHLMSFPQSAPHGVVFLHVTYVPAQEKNFTTAPAICHDGKAHFPREGVFVSNGTHWFVTQRNFYEPQIITTDNTFLSGNCDVVIGIVNNTVYDPLQPELDSGGGSGGGQIYEGKLTAEGLRFGIVASRFNHALVDRLVEGAIDAIVRHGGREEDITLVRVPGSWEIPVAAGELARKEDIDAVIAIGVLIRGATPHFDYIASEVSKGLADLSLELRKPITFGVITADTLEQAIERAGTKHGNKGWEAALSAIEMANLFKSLR

SEQ ID NO: 8440 - protein, 1307 aa, Artificial Sequence
  SARS-CoV-2/USA/UT-00034/2020__EPI_ISL_417977 spike protein (1-1147)(F970C_G999C) LumSynth construct
MFVFLVLLPLVSSQCVNLTTRTQLPPAYTNSFTRGVYYPDKVFRSSVLHSTQDLFLPFFSNVTWFHAIHVSGTNGTKRFDNPVLPFNDGVYFASTEKSNIIRGWIFGTTLDSKTQSLLIVNNATNVVIKVCEFQFCNDPFLGVYYYKNNKSWMESEFRVYSSANNCTFEYVSQPFLMDLEGKQGNFKNLREFVFKNIDGYFKIYSKHTPINLVRDLPQGFSALEPLVDLPIGINITRFQTLLALHRSYLTPGDSSSGWTAGAAAYYVGYLQPRTFLLKYNENGTITDAVDCALDPLSETKCTLKSFTVEKGIYQTSNFRVQPTESIVRFPNITNLCPFGEVFNATRFASVYAWNRKRISNCVADYSVLYNSASFSTFKCYGVSPTKLNDLCFTNVYADSFVIRGDEVRQIAPGQTGKIADYNYKLPDDFTGCVIAWNSNNLDSKVGGNYNYLYRLFRKSNLKPFERDISTEIYQAGSTPCNGVEGFNCYFPLQSYGFQPTNGVGYQPYRVVVLSFELLHAPATVCGPKKSTNLVKNKCVNFNFNGLTGTGVLTESNKKFLPFQQFGRDIADTTDAVRDPQTLEILDITPCSFGGVSVITPGTNTSNQVAVLYQGVNCTEVPVAIHADQLTPTWRVYSTGSNVFQTRAGCLIGAEHVNNSYECDIPIGAGICASYQTQTNSPRRARSVASQSIIAYTMSLGAENSVAYSNNSIAIPTNFTISVTTEILPVSMTKTSVDCTMYICGDSTECSNLLLQYGSFCTQLNRALTGIAVEQDKNTQEVFAQVKQIYKTPPIKDFGGFNFSQILPDPSKPSKRSFIEDLLFNKVTLADAGFIKQYGDCLGDIAARDLICAQKFNGLTVLPPLLTDEMIAQYTSALLAGTITSGWTFGAGAALQIPFAMQMAYRFNGIGVTQNVLYENQKLIANQFNSAIGKIQDSLSSTASALGKLQDVVNQNAQALNTLVKQLSSNCGAISSVLNDILSRLDKVEAEVQIDRLITCRLQSLQTYVTQQLIRAAEIRASANLAATKMSECVLGQSKRVDFCGKGYHLMSFPQSAPHGVVFLHVTYVPAQEKNFTTAPAICHDGKAHFPREGVFVSNGTHWFVTQRNFYEPQIITTDNTFVSGNCDVVIGIVNNTVYDPLQPELDSGGGSGGGQIYEGKLTAEGLRFGIVASRFNHALVDRLVEGAIDAIVRHGGREEDITLVRVPGSWEIPVAAGELARKEDIDAVIAIGVLIRGATPHFDYIASEVSKGLADLSLELRKPITFGVITADTLEQAIERAGTKHGNKGWEAALSAIEMANLFKSLR

SEQ ID NO: 8441 - protein, 1307 aa, Artificial Sequence
  SARS-CoV-2/USA/UT-00033/2020__EPI_ISL_417976 spike protein (1-1147)(F970C_G999C) LumSynth construct
MFVFLVLLPLVSSQCVNLTTRTQLPPAYTNSFTRGVYYPDKVFRSSVLHSTQDLFLPFFSNVTWFHAIHVSGTNGTKRFDNPVLPFNDGVYFASTEKSNIIRGWIFGTTLDSKTQSLLIVNNATNVVIKVCEFQFCNDPFLGVYYHKNNKSWMESEFRVYSSANNCTFEYVSQPFLMDLEGKQGNFKNLREFVFKNIDGYFKIYSKHTPINLVRDLPQGFSALEPLVDLPIGINITRFQTLLALHRSYLTPGDSSSGLTAGAAAYYVGYLQPRTFLLKYNENGTITDAVDCALDPLSETKCTLKSFTVEKGIYQTSNFRVQPTESIVRFPNITNLCPFGEVFNATRFASVYAWNRKRISNCVADYSVLYNSASFSTFKCYGVSPTKLNDLCFTNVYADSFVIRGDEVRQIAPGQTGKIADYNYKLPDDFTGCVIAWNSNNLDSKVGGNYNYLYRLFRKSNLKPFERDISTEIYQAGSTPCNGVEGFNCYFPLQSYGFQPTNGVGYQPYRVVVLSFELLHAPATVCGPKKSTNLVKNKCVNFNFNGLTGTGVLTESNKKFLPFQQFGRDIADTTDAVRDPQTLEILDITPCSFGGVSVITPGTNTSNQVAVLYQGVNCTEVPVAIHADQLTPTWRVYSTGSNVFQTRAGCLIGAEHVNNSYECDIPIGAGICASYQTQTNSPRRARSVASQSIIAYTMSLGAENSVAYSNNSIAIPTNFTISVTTEILPVSMTKTSVDCTMYICGDSTECSNLLLQYGSFCTQLNRALTGIAVEQDKNTQEVFAQVKQIYKTPPIKDFGGFNFSQILPDPSKPSKRSFIEDLLFNKVTLADAGFIKQYGDCLGDIAARDLICAQKFNGLTVLPPLLTDEMIAQYTSALLAGTITSGWTFGAGAALQIPFAMQMAYRFNGIGVTQNVLYENQKLIANQFNSAIGKIQDSLSSTASALGKLQDVVNQNAQALNTLVKQLSSNCGAISSVLNDILSRLDKVEAEVQIDRLITCRLQSLQTYVTQQLIRAAEIRASANLAATKMSECVLGQSKRVDFCGKGYHLMSFPQSAPHGVVFLHVTYVPAQEKNFTTAPAICHDGKAHFPREGVFVSNGTHWFVTQRNFYEPQIITTDNTFVSGNCDVVIGIVNNTVYDPLQPELDSGGGSGGGQIYEGKLTAEGLRFGIVASRFNHALVDRLVEGAIDAIVRHGGREEDITLVRVPGSWEIPVAAGELARKEDIDAVIAIGVLIRGATPHFDYIASEVSKGLADLSLELRKPITFGVITADTLEQAIERAGTKHGNKGWEAALSAIEMANLFKSLR

SEQ ID NO: 8442 - protein, 1307 aa, Artificial Sequence
  SARS-CoV-2/USA/WI-13/2020__EPI_ISL_417516 spike protein (1-1147)(F970C_G999C) LumSynth construct
MFVFLVLLPLVSSQCVNLTTRTQLPPAYTNSFTRGVYYPDKVFRSSVLHSTQDLFLPFFSNVTWFHAIHVSGTNGTKRFDNPVLPFNDGVYFASTEKSNIIRGWIFGTTLDSKTQSLLIVNNATNVVIKVCEFQFCNDPFLGVYYHKNNKSWMESEFRVYSSANNCTFEYVSQPFLMDLEGKQGNFKNLREFVFKNIDGYFKIYSKHTPINLVRDLPQGFSALEPLVDLPIGINITRFQTLLALHRSYLTPGDSSSGWTAGAAAYYVGYLQPRTFLLKYNENGTITDAVDCALDPLSETKCTLKSFTVEKGIYQTSNFRVLPTESIVRFPNITNLCPFGEVFNATRFASVYAWNRKRISNCVADYSVLYNSASFSTFKCYGVSPTKLNDLCFTNVYADSFVIRGDEVRQIAPGQTGKIADYNYKLPDDFTGCVIAWNSNNLDSKVGGNYNYLYRLFRKSNLKPFERDISTEIYQAGSTPCNGVEGFNCYFPLQSYGFQPTNGVGYQPYRVVVLSFELLHAPATVCGPKKSTNLVKNKCVNFNFNGLTGTGVLTESNKKFLPFQQFGRDIADTTDAVRDPQTLEILDITPCSFGGVSVITPGTNTSNQVAVLYQGVNCTEVPVAIHADQLTPTWRVYSTGSNVFQTRAGCLIGAEHVNNSYECDIPIGAGICASYQTQTNSPRRARSVASQSIIAYTMSLGAENSVAYSNNSIAIPTNFTISVTTEILPVSMTKTSVDCTMYICGDSTECSNLLLQYGSFCTQLNRALTGIAVEQDKNTQEVFAQVKQIYKTPPIKDFGGFNFSQILPDPSKPSKRSFIEDLLFNKVTLADAGFIKQYGDCLGDIAARDLICAQKFNGLTVLPPLLTDEMIAQYTSALLAGTITSGWTFGAGAALQIPFAMQMAYRFNGIGVTQNVLYENQKLIANQFNSAIGKIQDSLSSTASALGKLQDVVNQNAQALNTLVKQLSSNCGAISSVLNDILSRLDKVEAEVQIDRLITCRLQSLQTYVTQQLIRAAEIRASANLAATKMSECVLGQSKRVDFCGKGYHLMSFPQSAPHGVVFLHVTYVPAQEKNFTTAPAICHDGKAHFPREGVFVSNGTHWFVTQRNFYEPQIITTDNTFVSGNCDVVIGIVNNTVYDPLQPELDSGGGSGGGQIYEGKLTAEGLRFGIVASRFNHALVDRLVEGAIDAIVRHGGREEDITLVRVPGSWEIPVAAGELARKEDIDAVIAIGVLIRGATPHFDYIASEVSKGLADLSLELRKPITFGVITADTLEQAIERAGTKHGNKGWEAALSAIEMANLFKSLR

SEQ ID NO: 8443 - protein, 1306 aa, Artificial Sequence
  SARS-CoV-2/India/1-27/2020__EPI_ISL_413522 spike protein (1-1146)(F969C_G998C) LumSynth construct
MFVFLVLLPLVSSQCVNLTTRTQLPPAYTNSFTRGVYYPDKVFRSSVLHSTQDLFLPFFSNVTWFHAIHVSGTNGTKRFDNPVLPFNDGVYFASTEKSNIIRGWIFGTTLDSKTQSLLIVNNATNVVIKVCEFQFCNDPFLGVYHKNNKSWMESEFRVYSSANNCTFEYVSQPFLMDLEGKQGNFKNLREFVFKNIDGYFKIYSKHTPINLVRDLPQGFSALEPLVDLPIGINITRFQTLLALHRSYLTPGDSSSGWTAGAAAYYVGYLQPRTFLLKYNENGTITDAVDCALDPLSETKCTLKSFTVEKGIYQTSNFRVQPTESIVRFPNITNLCPFGEVFNATRFASVYAWNRKRISNCVADYSVLYNSASFSTFKCYGVSPTKLNDLCFTNVYADSFVIRGDEVIQIAPGQTGKIADYNYKLPDDFTGCVIAWNSNNLDSKVGGNYNYLYRLFRKSNLKPFERDISTEIYQAGSTPCNGVEGFNCYFPLQSYGFQPTNGVGYQPYRVVVLSFELLHAPATVCGPKKSTNLVKNKCVNFNFNGLTGTGVLTESNKKFLPFQQFGRDIADTTDAVRDPQTLEILDITPCSFGGVSVITPGTNTSNQVAVLYQDVNCTEVPVAIHADQLTPTWRVYSTGSNVFQTRAGCLIGAEHVNNSYECDIPIGAGICASYQTQTNSPRRARSVASQSIIAYTMSLGAENSVAYSNNSIAIPTNFTISVTTEILPVSMTKTSVDCTMYICGDSTECSNLLLQYGSFCTQLNRALTGIAVEQDKNTQEVFAQVKQIYKTPPIKDFGGFNFSQILPDPSKPSKRSFIEDLLFNKVTLADAGFIKQYGDCLGDIAARDLICAQKFNGLTVLPPLLTDEMIAQYTSALLAGTITSGWTFGAGAALQIPFAMQMAYRFNGIGVTQNVLYENQKLIANQFNSAIGKIQDSLSSTASALGKLQDVVNQNAQALNTLVKQLSSNCGAISSVLNDILSRLDKVEAEVQIDRLITCRLQSLQTYVTQQLIRAAEIRASANLAATKMSECVLGQSKRVDFCGKGYHLMSFPQSAPHGVVFLHVTYVPAQEKNFTTAPAICHDGKAHFPREGVFVSNGTHWFVTQRNFYEPQIITTDNTFVSGNCDVVIGIVNNTVYDPLQPELDSGGGSGGGQIYEGKLTAEGLRFGIVASRFNHALVDRLVEGAIDAIVRHGGREEDITLVRVPGSWEIPVAAGELARKEDIDAVIAIGVLIRGATPHFDYIASEVSKGLADLSLELRKPITFGVITADTLEQAIERAGTKHGNKGWEAALSAIEMANLFKSLR

SEQ ID NO: 8444 - protein, 1301 aa, Artificial Sequence
  SARS-CoV-2/pangolin/Guangxi/P4L/2017__EPI_ISL_410538 spike protein (1-1141)(F964C_G993C) LumSynth construct
MFVFLFVLPLVSSQCVNLTTRTGIPPGYTNSSTRGVYYPDKVFRSSILHLTQDLFLPFFSNVTWFNTINYQGGFKKFDNPVLPFNDGVYFASTEKSNIIRGWIFGTTLDARTQSLLIVNNATNVVIKVCEFQFCTDPFLGVYYHNNNKTWVENEFRVYSSANNCTFEYISQPFLMDLEGKQGNFKNLREFVFKNVDGYFKIYSKHTPIDLVRDLPRGFAALEPLVDLPIGINITRFQTLLALHRSYLTPGNLESGWTTGAAAYYVGYLQQRTFLLSYNQNGTITDAVDCSLDPLSETKCTLKSLTVEKGIYQTSNFRVQPTISIVRFPNITNLCPFGEVFNASKFASVYAWNRKRISNCVADYSVLYNSTSFSTFKCYGVSPTKLNDLCFTNVYADSFVVKGDEVRQIAPGQTGVIADYNYKLPDDFTGCVIAWNSVKQDALTGGNYGYLYRLFRKSKLKPFERDISTEIYQAGSTPCNGQVGLNCYYPLERYGFHPTTGVNYQPFRVVVLSFELLNGPATVCGPKLSTTLVKDKCVNFNFNGLTGTGVLTTSKKQFLPFQQFGRDISDTTDAVRDPQTLEILDITPCSFGGVSVITPGTNTSNQVAVLYQDVNCTEVPMAIHAEQLTPAWRVYSAGANVFQTRAGCLVGAEHVNNSYECDIPVGAGICASYHSMSSLRSVNQRSIIAYTMSLGAENSVAYSNNSIAIPTNFTISVTTEILPVSMTKTSVDCTMYICGDSIECSNLLLQYGSFCTQLNRALTGIAVEQDKNTQEVFAQVKQIYKTPPIKDFGGFNFSQILPDPSKPSKRSFIEDLLFNKVTLADAGFIKQYGDCLGDIAARDLICAQKFNGLTVLPPLLTDEMIAQYTSALLAGTITSGWTFGAGAALQIPFAMQMAYRFNGIGVTQNVLYENQKLIANQFNSAIGKIQDSLSSTASALGKLQDVVNQNAQALNTLVKQLSSNCGAISSVLNDILSRLDKVEAEVQIDRLITCRLQSLQTYVTQQLIRAAEIRASANLAATKMSECVLGQSKRVDFCGKGYHLMSFPQSAPHGVVFLHVTYVPAQEKNFTTAPAICHEGKAHFPREGVFVSNGTHWFITQRNFYEPQIITTDNTFVSGSCDVVIGIVNNTVYDPLQPELDSGGGSGGGQIYEGKLTAEGLRFGIVASRFNHALVDRLVEGAIDAIVRHGGREEDITLVRVPGSWEIPVAAGELARKEDIDAVIAIGVLIRGATPHFDYIASEVSKGLADLSLELRKPITFGVITADTLEQAIERAGTKHGNKGWEAALSAIEMANLFKSLR

SEQ ID NO: 8445 - protein, 1301 aa, Artificial Sequence
  SARS-CoV-2/pangolin/Guangxi/P5L/2017__EPI_ISL_410540 spike protein (1-1141)(F964C_G993C) LumSynth construct
MFVFLFVLPLVSSQCVNLTTRTGIPPGYTNSSTRGVYYPDKVFRSSILHLTQDLFLPFFSNVTWFNTINYQGGFKKFDNPVLPFNDGVYFASTEKSNIIRGWIFGTTLDARTQSLLIVNNATNVVIKVCEFQFCTDPFLGVYYHNNNKTWVENEFRVYSSANNCTFEYISQPFLMDLEGKQGNFKNLREFVFKNVDGYFKIYSKHTPIDLVRDLPRGFAALEPLVDLPIGINITRFQTLLALHRSYLTPGKLESGWTTGAAAYYVGYLQQRTFLLSYNQNGTITDAVDCSLDPLSETKCTLKSLTVEKGIYQTSNFRVQPTISIVRFPNITNLCPFGEVFNASKFASVYAWNRKRISNCVADYSVLYNSTSFSTFKCYGVSPTKLNDLCFTNVYADSFVVKGDEVRQIAPGQTGVIADYNYKLPDDFTGCVIAWNSVKQDALTGGNYGYLYRLFRKSKLKPFERDISTEIYQAGSTPCNGQVGLNCYYPLERYGFHPTTGVNYQPFRVVVLSFELLNGPATVCGPKLSTTLVKDKCVNFNFNGLTGTGVLTTSKKQFLPFQQFGRDISDTTDAVRDPQTLEILDITPCSFGGVSVITPGTNTSNQVAVLYQDVNCTEVPMAIHAEQLTPAWRVYSAGANVFQTRAGCLVGAEHVNNSYECDIPVGAGICASYHSMSSFRSVNQRSIIAYTMSLGAENSVAYSNNSIAIPTNFTISVTTEILPVSMTKTSVDCTMYICGDSIECSNLLLQYGSFCTQLNRALTGIAVEQDKNTQEVFAQVKQIYKTPPIKDFGGFNFSQILPDPSKPSKRSFIEDLLFNKVTLADAGFIKQYGDCLGDIAARDLICAQKFNGLTVLPPLLTDEMIAQYTSALLAGTITSGWTFGAGAALQIPFAMQMAYRFNGIGVTQNVLYENQKLIANQFNSAIGKIQDSLSSTASALGKLQDVVNQNAQALNTLVKQLSSNCGAISSVLNDILSRLDKVEAEVQIDRLITCRLQSLQTYVTQQLIRAAEIRASANLAATKMSECVLGQSKRVDFCGKGYHLMSFPQSAPHGVVFLHVTYVPAQEKNFTTAPAICHEGKAHFPREGVFVSNGTHWFITQRNFYEPQIITTDNTFVSGSCDVVIGIVNNTVYDPLQPELDSGGGSGGGQIYEGKLTAEGLRFGIVASRFNHALVDRLVEGAIDAIVRHGGREEDITLVRVPGSWEIPVAAGELARKEDIDAVIAIGVLIRGATPHFDYIASEVSKGLADLSLELRKPITFGVITADTLEQAIERAGTKHGNKGWEAALSAIEMANLFKSLR

SEQ ID NO: 8446 - protein, 1301 aa, Artificial Sequence
  SARS-CoV-2/pangolin/Guangxi/P5E/2017__EPI_ISL_410541 spike protein (1-1141)(F964C_G993C) LumSynth construct
MFVFLFVLPLVSSQCVNLTTRTGIPPGYTNSSTRGVYYPDKVFRSSILHLTQDLFLPFFSNVTWFNTITYQGGSKKFDNPVLPFNDGVYFASTEKSNIIRGWIFGTTLDARTQSLLIVNNATNVVIKVCEFQFCTDPFLGVYYHNNNKTWVENEFRVYSSANNCTFEYISQPFLMDLEGKQGNFKNLREFVFKNVDGYFKIYSKHTPIDLVRDLPRGFAALEPLVDLPIGINITRFQTLLALHRSYLTPGKLESGWTTGAAAYYVGYLQQRTFLLSYNQNGTITDAVDCSLDPLSETKCTLKSLTVEKGIYQTSNFRVQPTISIVRFPNITNLCPFGEVFNASKFASVYAWNRKRISNCVADYSVLYNSTSFSTFKCYGVSPTKLNDLCFTNVYADSFVVKGDEVRQIAPGQTGVIADYNYKLPDDFTGCVIAWNSVKQDALTGDNYGYLYRLFRKSKLKPFERDISTEIYQAGSTPCNGQVGLNCYYPLERYGFHPTTGVNYQPFRVVVLSFELLNGPATVCGPKLSTTLVKDKCVNFNFNGLTGTGVLTTSKKQFLPFQQFGRDISDTTDAVRDPQTLEILDITPCSFGGVSVITPGTNTSNQVAVLYQDVNCTEVPMAIHAEQLTPAWRVYSAGANVFQTRAGCLVGAEHVNNSYECDIPVGAGICASYHSMSSFRSVNQRSIIAYTMSLGAENSVAYSNNSIAIPTNFTISVTTEILPVSMTKTSVDCTMYICGDSIECSNLLLQYGSFCTQLNRALTGIAVEQDKNTQEVFAQVKQIYKTPPIKDFGGFNFSQILPDPSKPSKRSFIEDLLFNKVTLADAGFIKQYGDCLGDIAARDLICAQKFNGLTVLPPLLTDEMIAQYTSALLAGTITSGWTFGAGAALQIPFAMQMAYRFNGIGVTQNVLYENQKLIANQFNSAIGKIQDSLSSTASALGKLQDVVNQNAQALNTLVKQLSSNCGAISSVLNDILSRLDKVEAEVQIDRLITCRLQSLQTYVTQQLIRAAEIRASANLAATKMSECVLGQSKRVDFCGKGYHLMSFPQSAPHGVVFLHVTYVPAQEKNFTTAPAICHEGKAHFPREGVFVSNGTHWFITQRNFYEPQIITTDNTFVSGSCDVVIGIVNNTVYDPLQPELDSGGGSGGGQIYEGKLTAEGLRFGIVASRFNHALVDRLVEGAIDAIVRHGGREEDITLVRVPGSWEIPVAAGELARKEDIDAVIAIGVLIRGATPHFDYIASEVSKGLADLSLELRKPITFGVITADTLEQAIERAGTKHGNKGWEAALSAIEMANLFKSLR

SEQ ID NO: 8447 - protein, 1299 aa, Artificial Sequence
  SARS-CoV-2/pangolin/Guangxi/P1E/2017__EPI_ISL_410539 spike protein (1-1139)(F962C_G991C) LumSynth construct
MFVFLFVLPLVSSQCVNLTTRTGIQPGYTNSSTRGVYYPDKVFRSSILHLTQDLFLPFFSNVTWFNTINYQGGFKKFDNPVLPFNDGVYFASTEKSNIIRGWIFGTTLDARTQSLLIVNNATNVVIKVCEFQFCTDPFLGVYYHNNNKTWVENEFRVYSSANNCTFEYISQPFLMDLEGKQGNFKNLREFVFKNVDGYFKIYSKHTPIDLVRDLPRGFAALEPLVDLPIGINITRFQTLLALHRSYLTPGKLESGWTTGAAAYYVGYLQQRTFLLSYNQNGTITDAVDCSLDPLSETKCTLKSLTVEKGIYQTSNFRVQPTISIVRFPNITNLCPFGEVFNASKFASVYAWNRKRISNCVADYSVLYNSTSFSTFKCYGVSPTKLNDLCFTNVYADSFVVKGDEVRQIAPGQTGVIADYNYKLPDDFTGCVIAWNSVKQDALTGGNYLYRLFRKSKLKPFERDISTEIYQAGSTPCNGQVGLNCYYPLERYGFHPTTGVNYQPFRVVVLSFELLNGPATVCGPKLSTTLVKDKCVNFNFNGLTGTGVLTTSKKQFLPFQQFGRDISDTTDAVRDPQTLEILDITPCSFGGVSVITPGTNTSNQVAVLYQDVNCTEVPMAIHAEQLTPAWRVYSAGANVFQTRAGCLVGAEHVNNSYECDIPVGAGICASYHSMSSLRSVNQRSIIAYTMSLGAENSVAYSNNSIAIPTNFTISVTTEILPVSMTKTSVDCTMYICGDSIECSNLLLQYGSFCTQLNRALTGIAVEQDKNTQEVFAQVKQIYKTPPIKDFGGFNFSQILPDPSKPSKRSFIEDLLFNKVTLADAGFIKQYGDCLGDIAARDLICAQKFNGLTVLPPLLTDEMIAQYTSALLAGTITSGWTFGAGAALQIPFAMQMAYRFNGIGVTQNVLYENQKLIANQFNSAIGKIQDSLSSTASALGKLQDVVNQNAQALNTLVKQLSSNCGAISSVLNDILSRLDKVEAEVQIDRLITCRLQSLQTYVTQQLIRAAEIRASANLAATKMSECVLGQSKRVDFCGKGYHLMSFPQSAPHGVVFLHVTYVPAQEKNFTTAPAICHEGKAHFPREGVFVSNGTHWFITQRNFYEPQIITTDNTFVSGSCDVVIGIVNNTVYDPLQPELDSGGGSGGGQIYEGKLTAEGLRFGIVASRFNHALVDRLVEGAIDAIVRHGGREEDITLVRVPGSWEIPVAAGELARKEDIDAVIAIGVLIRGATPHFDYIASEVSKGLADLSLELRKPITFGVITADTLEQAIERAGTKHGNKGWEAALSAIEMANLFKSLR

SEQ ID NO: 8448 - protein, 1307 aa, Artificial Sequence
  SARS-CoV-2/Wuhan/WIV05/2019__EPI_ISL_402128 spike protein (1-1147)(A972C_R995C) LumSynth construct
MFVFLVLLPLVSSQCVNLTTRTQLPPAYTNSFTRGVYYPDKVFRSSVLHSTQDLFLPFFSNVTWFHAIHVSGTNGTKRFDNPVLPFNDGVYFASTEKSNIIRGWIFGTTLDSKTQSLLIVNNATNVVIKVCEFQFCNDPFLGVYYHKNNKSWMESEFRVYSSANNCTFEYVSQPFLMDLEGKQGNFKNLREFVFKNIDGYFKIYSKHTPINLVRDLPQGFSALEPLVDLPIGINITRFQTLLALHRSYLTPGDSSSGWTAGAAAYYVGYLQPRTFLLKYNENGTITDAVDCALDPLSETKCTLKSFTVEKGIYQTSNFRVQPTESIVRFPNITNLCPFGEVFNATRFASVYAWNRKRISNCVADYSVLYNSASFSTFKCYGVSPTKLNDLCFTNVYADSFVIRGDEVRQIAPGQTGKIADYNYKLPDDFTGCVIAWNSNNLDSKVGGNYNYLYRLFRKSNLKPFERDISTEIYQAGSTPCNGVEGFNCYFPLQSYGFQPTNGVGYQPYRVVVLSFELLHAPATVCGPKKSTNLVKNKCVNFNFNGLTGTGVLTESNKKFLPFQQFGRDIADTTDAVRDPQTLEILDITPCSFGGVSVITPGTNTSNQVAVLYQDVNCTEVPVAIHADQLTPTWRVYSTGSNVFQTRAGCLIGAEHVNNSYECDIPIGAGICASYQTQTNSPRRARSVASQSIIAYTMSLGAENSVAYSNNSIAIPTNFTISVTTEILPVSMTKTSVDCTMYICGDSTECSNLLLQYGSFCTQLNRALTGIAVEQDKNTQEVFAQVKQIYKTPPIKDFGGFNFSQILPDPSKPSKRSFIEDLLFNKVTLADAGFIKQYGDCLGDIAARDLICAQKFNGLTVLPPLLTDEMIAQYTSALLAGTITSGWTFGAGAALQIPFAMQMAYRFNGIGVTQNVLYENQKLIANQFNSAIGKIQDSLSSTASALGKLQDVVNQNAQALNTLVKQLSSNFGCISSVLNDILSRLDKVEAEVQIDCLITGRLQSLQTYVTQQLIRAAEIRASANLAATKMSECVLGQSKRVDFCGKGYHLMSFPQSAPHGVVFLHVTYVPAQEKNFTTAPAICHDGKAHFPREGVFVSNGTHWFVTQRNFYEPQIITTDNTFVSGNCDVVIGIVNNTVYDPLQPELDSGGGSGGGQIYEGKLTAEGLRFGIVASRFNHALVDRLVEGAIDAIVRHGGREEDITLVRVPGSWEIPVAAGELARKEDIDAVIAIGVLIRGATPHFDYIASEVSKGLADLSLELRKPITFGVITADTLEQAIERAGTKHGNKGWEAALSAIEMANLFKSLR

SEQ ID NO: 8449 - protein, 1303 aa, Artificial Sequence
  SARS-CoV-2/bat/Yunnan/RaTG13/2013__EPI_ISL_402131 spike protein (1-1143)(A968C_R991C) LumSynth construct
MFVFLVLLPLVSSQCVNLTTRTQLPPAYTNSSTRGVYYPDKVFRSSVLHLTQDLFLPFFSNVTWFHAIHVSGTNGIKRFDNPVLPFNDGVYFASTEKSNIIRGWIFGTTLDSKTQSLLIVNNATNVVIKVCEFQFCNDPFLGVYYHKNNKSWMESEFRVYSSANNCTFEYVSQPFLMDLEGKQGNFKNLREFVFKNIDGYFKIYSKHTPINLVRDLPPGFSALEPLVDLPIGINITRFQTLLALHRSYLTPGDSSSGWTAGAAAYYVGYLQPRTFLLKYNENGTITDAVDCALDPLSETKCTLKSFTVEKGIYQTSNFRVQPTDSIVRFPNITNLCPFGEVFNATTFASVYAWNRKRISNCVADYSVLYNSTSFSTFKCYGVSPTKLNDLCFTNVYADSFVITGDEVRQIAPGQTGKIADYNYKLPDDFTGCVIAWNSKHIDAKEGGNFNYLYRLFRKANLKPFERDISTEIYQAGSKPCNGQTGLNCYYPLYRYGFYPTDGVGHQPYRVVVLSFELLNAPATVCGPKKSTNLVKNKCVNFNFNGLTGTGVLTESNKKFLPFQQFGRDIADTTDAVRDPQTLEILDITPCSFGGVSVITPGTNASNQVAVLYQDVNCTEVPVAIHADQLTPTWRVYSTGSNVFQTRAGCLIGAEHVNNSYECDIPIGAGICASYQTQTNSRSVASQSIIAYTMSLGAENSVAYSNNSIAIPTNFTISVTTEILPVSMTKTSVDCTMYICGDSTECSNLLLQYGSFCTQLNRALTGIAVEQDKNTQEVFAQVKQIYKTPPIKDFGGFNFSQILPDPSKPSKRSFIEDLLFNKVTLADAGFIKQYGDCLGDIAARDLICAQKFNGLTVLPPLLTDEMIAQYTSALLAGTITSGWTFGAGAALQIPFAMQMAYRFNGIGVTQNVLYENQKLIANQFNSAIGKIQDSLSSTASALGKLQDVVNQNAQALNTLVKQLSSNFGCISSVLNDILSRLDKVEAEVQIDCLITGRLQSLQTYVTQQLIRAAEIRASANLAATKMSECVLGQSKRVDFCGKGYHLMSFPQSAPHGVVFLHVTYVPAQEKNFTTAPAICHDGKAHFPREGVFVSNGTHWFVTQRNFYEPQIITTDNTFVSGSCDVVIGIVNNTVYDPLQPELDSGGGSGGGQIYEGKLTAEGLRFGIVASRFNHALVDRLVEGAIDAIVRHGGREEDITLVRVPGSWEIPVAAGELARKEDIDAVIAIGVLIRGATPHFDYIASEVSKGLADLSLELRKPITFGVITADTLEQAIERAGTKHGNKGWEAALSAIEMANLFKSLR

SEQ ID NO: 8450 - protein, 1307 aa, Artificial Sequence
  SARS-CoV-2/Wuhan/HBCDC-HB-01/2019__EPI_ISL_402132 spike protein (1-1147)(A972C_R995C) LumSynth construct
MFVFLVLLPLVSSQCVNLTTRTQLPPAYTNSITRGVYYPDKVFRSSVLHSTQDLFLPFFSNVTWFHAIHVSGTNGTKRFDNPVLPFNDGVYFASTEKSNIIRGWIFGTTLDSKTQSLLIVNNATNVVIKVCEFQFCNDPFLGVYYHKNNKSWMESEFRVYSSANNCTFEYVSQPFLMDLEGKQGNFKNLREFVFKNIDGYFKIYSKHTPINLVRDLPQGFSALEPLVDLPIGINITRFQTLLALHRSYLTPGDSSSGWTAGAAAYYVGYLQPRTFLLKYNENGTITDAVDCALDPLSETKCTLKSFTVEKGIYQTSNFRVQPTESIVRFPNITNLCPFGEVFNATRFASVYAWNRKRISNCVADYSVLYNSASFSTFKCYGVSPTKLNDLCFTNVYADSFVIRGDEVRQIAPGQTGKIADYNYKLPDDFTGCVIAWNSNNLDSKVGGNYNYLYRLFRKSNLKPFERDISTEIYQAGSTPCNGVEGFNCYFPLQSYGFQPTNGVGYQPYRVVVLSFELLHAPATVCGPKKSTNLVKNKCVNFNFNGLTGTGVLTESNKKFLPFQQFGRDIADTTDAVRDPQTLEILDITPCSFGGVSVITPGTNTSNQVAVLYQDVNCTEVPVAIHADQLTPTWRVYSTGSNVFQTRAGCLIGAEHVNNSYECDIPIGAGICASYQTQTNSPRRARSVASQSIIAYTMSLGAENSVAYSNNSIAIPTNFTISVTTEILPVSMTKTSVDCTMYICGDSTECSNLLLQYGSFCTQLNRALTGIAVEQDKNTQEVFAQVKQIYKTPPIKDFGGFNFSQILPDPSKPSKRSFIEDLLFNKVTLADAGFIKQYGDCLGDIAARDLICAQKFNGLTVLPPLLTDEMIAQYTSALLAGTITSGWTFGAGAALQIPFAMQMAYRFNGIGVTQNVLYENQKLIANQFNSAIGKIQDSLSSTASALGKLQDVVNQNAQALNTLVKQLSSNFGCISSVLNDILSRLDKVEAEVQIDCLITGRLQSLQTYVTQQLIRAAEIRASANLAATKMSECVLGQSKRVDFCGKGYHLMSFPQSAPHGVVFLHVTYVPAQEKNFTTAPAICHDGKAHFPREGVFVSNGTHWFVTQRNFYEPQIITTDNTFVSGNCDVVIGIVNNTVYDPLQPELDSGGGSGGGQIYEGKLTAEGLRFGIVASRFNHALVDRLVEGAIDAIVRHGGREEDITLVRVPGSWEIPVAAGELARKEDIDAVIAIGVLIRGATPHFDYIASEVSKGLADLSLELRKPITFGVITADTLEQAIERAGTKHGNKGWEAALSAIEMANLFKSLR

SEQ ID NO: 8451 - protein, 1307 aa, Artificial Sequence
  SARS-CoV-2/Guangdong/20SF028/2020__EPI_ISL_403936 spike protein (1-1147)(A972C_R995C) LumSynth construct
MFVFLVLLPLVSSQCVNLTTRTQLPPAYTNSFTRGVYYPDKVFRSSVLYSTQDLFLPFFSNVTWFHAIHVSGTNGTKRFDNPVLPFNDGVYFASTEKSNIIRGWIFGTTLDSKTQSLLIVNNATNVVIKVCEFQFCNDPFLGVYYHKNNKSWMESEFRVYSSANNCTFEYVSQPFLMDLEGKQGNFKNLREFVFKNIDGYFKIYSKHTPINLVRDLPQGFSALEPLVDLPIGINITRFQTLLALHRSYLTPGDSSSGWTAGAAAYYVGYLQPRTFLLKYNENGTITDAVDCALDPLSETKCTLKSFTVEKGIYQTSNFRVQPTESIVRFPNITNLCPFGEVFNATRFASVYAWNRKRISNCVADYSVLYNSASFSTFKCYGVSPTKLNDLCFTNVYADSFVIRGDEVRQIAPGQTGKIADYNYKLPDDFTGCVIAWNSNNLDSKVGGNYNYLYRLFRKSNLKPFERDISTEIYQAGSTPCNGVEGFNCYFPLQSYGFQPTNGVGYQPYRVVVLSFELLHAPATVCGPKKSTNLVKNKCVNFNFNGLTGTGVLTESNKKFLPFQQFGRDIADTTDAVRDPQTLEILDITPCSFGGVSVITPGTNTSNQVAVLYQDVNCTEVPVAIHADQLTPTWRVYSTGSNVFQTRAGCLIGAEHVNNSYECDIPIGAGICASYQTQTNSPRRARSVASQSIIAYTMSLGAENSVAYSNNSIAIPTNFTISVTTEILPVSMTKTSVDCTMYICGDSTECSNLLLQYGSFCTQLNRALTGIAVEQDKNTQEVFAQVKQIYKTPPIKDFGGFNFSQILPDPSKPSKRSFIEDLLFNKVTLADAGFIKQYGDCLGDIAARDLICAQKFNGLTVLPPLLTDEMIAQYTSALLAGTITSGWTFGAGAALQIPFAMQMAYRFNGIGVTQNVLYENQKLIANQFNSAIGKIQDSLSSTASALGKLQDVVNQNAQALNTLVKQLSSNFGCISSVLNDILSRLDKVEAEVQIDCLITGRLQSLQTYVTQQLIRAAEIRASANLAATKMSECVLGQSKRVDFCGKGYHLMSFPQSAPHGVVFLHVTYVPAQEKNFTTAPAICHDGKAHFPREGVFVSNGTHWFVTQRNFYEPQIITTDNTFVSGNCDVVIGIVNNTVYDPLQPELDSGGGSGGGQIYEGKLTAEGLRFGIVASRFNHALVDRLVEGAIDAIVRHGGREEDITLVRVPGSWEIPVAAGELARKEDIDAVIAIGVLIRGATPHFDYIASEVSKGLADLSLELRKPITFGVITADTLEQAIERAGTKHGNKGWEAALSAIEMANLFKSLR

SEQ ID NO: 8452 - protein, 1307 aa, Artificial Sequence
  SARS-CoV-2/Shenzhen/SZTH-001/2020__EPI_ISL_406592 spike protein (1-1147)(A972C_R995C) LumSynth construct
MFVFLVLLPLVSSQCVNLTTRTQLPPAYTNSFTRGVYYPDKVFRSSVLHSTQDLFLPFFSNVTWFHAIHVSGTNGTKRFDNPVLPFNDGVYFASTEKSNIIRGWIFGTTLDSKTQSLLIVNNATNVVIKVCEFQFCNDPFLGVYYHKNNKSWMESEFRVYSSANNCTFEYVSQPFLMDLEGKQGNFKNLREFVFKNIDGYFKIYSKHTPINLVRDLPQGFSALEPLVDLPIGINITRFQTLLALHRSYLTPGDSSSGWTAGAAAYYVGYLQPRTFLLKYNENGTITDAVDCALDPLSETKCTLKSFTVEKGIYQTSNFRVQPTESIVRFPNITNLCPFGEVFNATRFASVYAWNRKRISNCVADYSVLYNSASFSTFKCYGVSPTKLNDLCFTNVYADSFVIRGDEVRQIAPGQTGKIADYNYKLPDDFTGCVIAWNSNNLDSKVGGNYNYLYRLFRKSNLKPFERDISTEIYQAGSTPCNGVEGFNCYFPLQSYGFQPTNGVGYQPYRVVVLSFELLHAPATVCGPKKSTNLVKNKCVNFNFNGLTGTGVLTESNKKFLPFQQFGRDIADTTDAVRDPQTLEILDITPCSFGGVSVITPGTNTSNQVAVLYQDVNCTEVPVAIHADQLTPTWRVYSTGSNVFQTRAGCLIGAEHVNNSYECDIPIGAGICASYQTQTNSPRRARSVASQSIIAYTMSLGAENSVAYSNNSIAIPTNFTISVTTEILPVSMTKTSVDCTMYICGDSTECSNLLLQYGSFCTQLNRALTGIAVEQDKNTQEVFAQVKQIYKTPPIKDFGGFNFSQILPDPSKPSKRSFIEDLLFNKVTLADAGFIKQYGDCLGDIAARDLICAQKFNGLTVLPPLLTDEMIAQYTSALLAGTITSGWTFGAGAALQIPFAMQMAYRFNGIGVTQNVLYENQKLIANQFNSAIGKIQDSLSSTASALGKLQDVVNQNAQALNTLVKQLSSNFGCISSVLNDILSRLDKVEAEVQIDCLITGRLQSLQTYVTQQLIRAAEIRASANLAATKMSECVLGQSKRVDFCGKGYHLMSFPQSAPHGVVFLHVTYVPAQEKNFTTAPAICHDGKAHFPREGVFVSNGTHWFVTQRNFYEPQIITTDNTFVSGNCDVLIGIVNNTVYDPLQPELDSGGGSGGGQIYEGKLTAEGLRFGIVASRFNHALVDRLVEGAIDAIVRHGGREEDITLVRVPGSWEIPVAAGELARKEDIDAVIAIGVLIRGATPHFDYIASEVSKGLADLSLELRKPITFGVITADTLEQAIERAGTKHGNKGWEAALSAIEMANLFKSLR

SEQ ID NO: 8453 - protein, 1307 aa, Artificial Sequence
  SARS-CoV-2/Shenzhen/SZTH-004/2020__EPI_ISL_406595 spike protein (1-1147)(A972C_R995C) LumSynth construct
MFVFLVLLPLVSSQCVNLTTRTQLPPAYTNSFTRGVYYPDKVFRSSVLHSTQDLFLPFFSNVTWFHAIHVSGTNGTKRFDNPVLPFNDGVYFASTEKSNIIRGWIFGTTLDSKTQSLLIVNNATNVVIKVCEFQFCNDPFLGVYYHKNNKSWMESEFRVYSSANNCTFEYVSQPFLMDLEGKQGNFKNLREFVFKNIDGYFKIYSKHTPINLVRDLPQGFSALEPLVDLPIGINITRFQTLLALHRSYLTPGDSSSGWTAGAAAYYVGYLQPRTFLLKYNENGTITDAVDCALDPLSETKCTLKSFTVEKGIYQTSNFRVQPTESIVRFPNITNLCPFGEVFNATRFASVYAWDRKRISNCVAYYSVLYNSASFSTFKCYGVSPTKLNDLCFTNVYADSFVIRGDEVRQIAPGQTGKIADYNYKLPDDFTGCVIAWNSNNLDSKVGGNYNYLYRLFRKSNLKPFERDISTEIYQAGSTPCNGVEGFNCYFPLQSYGFQPTNGVGYQPYRVVVLSFELLHAPATVCGPKKSTNLVKNKCVNFNFNGLTGTGVLTESNKKFLPFQQFGRDIADTTDAVRDPQTLEILDITPCSFGGVSVITPGTNTSNQVAVLYQDVNCTEVPVAIHADQLTPTWRVYSTGSNVFQTRAGCLIGAEHVNNSYECDIPIGAGICASYQTQTNSPRRARSVASQSIIAYTMSLGAENSVAYSNNSIAIPTNFTISVTTEILPVSMTKTSVDCTMYICGDSTECSNLLLQYGSFCTQLNRALTGIAVEQDKNTQEVFAQVKQIYKTPPIKDFGGFNFSQILPDPSKPSKRSFIEDLLFNKVTLADAGFIKQYGDCLGDIAARDLICAQKFNGLTVLPPLLTDEMIAQYTSALLAGTITSGWTFGAGAALQIPFAMQMAYRFNGIGVTQNVLYENQKLIANQFNSAIGKIQDSLSSTASALGKLQDVVNQNAQALNTLVKQLSSNFGCISSVLNDILSRLDKVEAEVQIDCLITGRLQSLQTYVTQQLIRAAEIRASANLAATKMSECVLGQSKRVDFCGKGYHLMSFPQSAPHGVVFLHVTYVPAQEKNFTTAPAICHDGKAHFPREGVFVSNGTHWFVTQRNFYEPQIITTDNTFVSGNCDVVIGIVNNTVYDPLQPELDSGGGSGGGQIYEGKLTAEGLRFGIVASRFNHALVDRLVEGAIDAIVRHGGREEDITLVRVPGSWEIPVAAGELARKEDIDAVIAIGVLIRGATPHFDYIASEVSKGLADLSLELRKPITFGVITADTLEQAIERAGTKHGNKGWEAALSAIEMANLFKSLR

SEQ ID NO: 8454 - protein, 1307 aa, Artificial Sequence
  SARS-CoV-2/France/IDF0372/2020__EPI_ISL_406596 spike protein (1-1147)(A972C_R995C) LumSynth construct
MFVFLVLLPLVSSQCVNLTTRTQLPPAYTNSFTRGVYYPDKVFRSSVLHSTQDLFLPFFSNVTWFHAIHVSGTNGTKRFDNPVLPFNDGVYFASTEKSNIIRGWIFGTTLDSKTQSLLIVNNATNVVIKVCEFQFCNDPFLGVYYHKNNKSWMESEFRVYSSANNCTFEYVSQPFLMDLEGKQGNFKNLREFVFKNIDGYFKIYSKHTPINLVRDLPQGFSALEPLVDLPIGINITRFQTLLALHRSYLTPGDSSSGWTAGAAAYYVGYLQPRTFLLKYNENGTITDAVDCALDPLSETKCTLKSFTVEKGIYQTSNFRVQPTESIVRFPNITNLCPFGEVFNATRFASVYAWNRKRISNCVADYSFLYNSASFSTFKCYGVSPTKLNDLCFTNVYADSFVIRGDEVRQIAPGQTGKIADYNYKLPDDFTGCVIAWNSNNLDSKVGGNYNYLYRLFRKSNLKPFERDISTEIYQAGSTPCNGVEGFNCYFPLQSYGFQPTNGVGYQPYRVVVLSFELLHAPATVCGPKKSTNLVKNKCVNFNFNGLTGTGVLTESNKKFLPFQQFGRDIADTTDAVRDPQTLEILDITPCSFGGVSVITPGTNTSNQVAVLYQDVNCTEVPVAIHADQLTPTWRVYSTGSNVFQTRAGCLIGAEHVNNSYECDIPIGAGICASYQTQTNSPRRARSVASQSIIAYTMSLGAENSVAYSNNSIAIPTNFTISVTTEILPVSMTKTSVDCTMYICGDSTECSNLLLQYGSFCTQLNRALTGIAVEQDKNTQEVFAQVKQIYKTPPIKDFGGFNFSQILPDPSKPSKRSFIEDLLFNKVTLADAGFIKQYGDCLGDIAARDLICAQKFNGLTVLPPLLTDEMIAQYTSALLAGTITSGWTFGAGAALQIPFAMQMAYRFNGIGVTQNVLYENQKLIANQFNSAIGKIQDSLSSTASALGKLQDVVNQNAQALNTLVKQLSSNFGCISSVLNDILSRLDKVEAEVQIDCLITGRLQSLQTYVTQQLIRAAEIRASANLAATKMSECVLGQSKRVDFCGKGYHLMSFPQSAPHGVVFLHVTYVPAQEKNFTTAPAICHDGKAHFPREGVFVSNGTHWFVTQRNFYEPQIITTDNTFVSGNCDVVIGIVNNTVYDPLQPELDSGGGSGGGQIYEGKLTAEGLRFGIVASRFNHALVDRLVEGAIDAIVRHGGREEDITLVRVPGSWEIPVAAGELARKEDIDAVIAIGVLIRGATPHFDYIASEVSKGLADLSLELRKPITFGVITADTLEQAIERAGTKHGNKGWEAALSAIEMANLFKSLR

SEQ ID NO: 8455 - protein, 1307 aa, Artificial Sequence
  SARS-CoV-2/Australia/VIC01/2020__EPI_ISL_406844 spike protein (1-1147)(A972C_R995C) LumSynth construct
MFVFLVLLPLVSSQCVNLTTRTQLPPAYTNSFTRGVYYPDKVFRSSVLHSTQDLFLPFFSNVTWFHAIHVSGTNGTKRFDNPVLPFNDGVYFASTEKSNIIRGWIFGTTLDSKTQSLLIVNNATNVVIKVCEFQFCNDPFLGVYYHKNNKSWMESEFRVYSSANNCTFEYVSQPFLMDLEGKQGNFKNLREFVFKNIDGYFKIYSKHTPINLVRDLPQGFSALEPLVDLPIGINITRFQTLLALHRRYLTPGDSSSGWTAGAAAYYVGYLQPRTFLLKYNENGTITDAVDCALDPLSETKCTLKSFTVEKGIYQTSNFRVQPTESIVRFPNITNLCPFGEVFNATRFASVYAWNRKRISNCVADYSVLYNSASFSTFKCYGVSPTKLNDLCFTNVYADSFVIRGDEVRQIAPGQTGKIADYNYKLPDDFTGCVIAWNSNNLDSKVGGNYNYLYRLFRKSNLKPFERDISTEIYQAGSTPCNGVEGFNCYFPLQSYGFQPTNGVGYQPYRVVVLSFELLHAPATVCGPKKSTNLVKNKCVNFNFNGLTGTGVLTESNKKFLPFQQFGRDIADTTDAVRDPQTLEILDITPCSFGGVSVITPGTNTSNQVAVLYQDVNCTEVPVAIHADQLTPTWRVYSTGSNVFQTRAGCLIGAEHVNNSYECDIPIGAGICASYQTQTNSPRRARSVASQSIIAYTMSLGAENSVAYSNNSIAIPTNFTISVTTEILPVSMTKTSVDCTMYICGDSTECSNLLLQYGSFCTQLNRALTGIAVEQDKNTQEVFAQVKQIYKTPPIKDFGGFNFSQILPDPSKPSKRSFIEDLLFNKVTLADAGFIKQYGDCLGDIAARDLICAQKFNGLTVLPPLLTDEMIAQYTSALLAGTITSGWTFGAGAALQIPFAMQMAYRFNGIGVTQNVLYENQKLIANQFNSAIGKIQDSLSSTASALGKLQDVVNQNAQALNTLVKQLSSNFGCISSVLNDILSRLDKVEAEVQIDCLITGRLQSLQTYVTQQLIRAAEIRASANLAATKMSECVLGQSKRVDFCGKGYHLMSFPQSAPHGVVFLHVTYVPAQEKNFTTAPAICHDGKAHFPREGVFVSNGTHWFVTQRNFYEPQIITTDNTFVSGNCDVVIGIVNNTVYDPLQPELDSGGGSGGGQIYEGKLTAEGLRFGIVASRFNHALVDRLVEGAIDAIVRHGGREEDITLVRVPGSWEIPVAAGELARKEDIDAVIAIGVLIRGATPHFDYIASEVSKGLADLSLELRKPITFGVITADTLEQAIERAGTKHGNKGWEAALSAIEMANLFKSLR

SEQ ID NO: 8456 - protein, 1307 aa, Artificial Sequence
  SARS-CoV-2/Germany/BavPat1/2020__EPI_ISL_406862 spike protein (1-1147)(A972C_R995C) LumSynth construct
MFVFLVLLPLVSSQCVNLTTRTQLPPAYTNSFTRGVYYPDKVFRSSVLHSTQDLFLPFFSNVTWFHAIHVSGTNGTKRFDNPVLPFNDGVYFASTEKSNIIRGWIFGTTLDSKTQSLLIVNNATNVVIKVCEFQFCNDPFLGVYYHKNNKSWMESEFRVYSSANNCTFEYVSQPFLMDLEGKQGNFKNLREFVFKNIDGYFKIYSKHTPINLVRDLPQGFSALEPLVDLPIGINITRFQTLLALHRSYLTPGDSSSGWTAGAAAYYVGYLQPRTFLLKYNENGTITDAVDCALDPLSETKCTLKSFTVEKGIYQTSNFRVQPTESIVRFPNITNLCPFGEVFNATRFASVYAWNRKRISNCVADYSVLYNSASFSTFKCYGVSPTKLNDLCFTNVYADSFVIRGDEVRQIAPGQTGKIADYNYKLPDDFTGCVIAWNSNNLDSKVGGNYNYLYRLFRKSNLKPFERDISTEIYQAGSTPCNGVEGFNCYFPLQSYGFQPTNGVGYQPYRVVVLSFELLHAPATVCGPKKSTNLVKNKCVNFNFNGLTGTGVLTESNKKFLPFQQFGRDIADTTDAVRDPQTLEILDITPCSFGGVSVITPGTNTSNQVAVLYQGVNCTEVPVAIHADQLTPTWRVYSTGSNVFQTRAGCLIGAEHVNNSYECDIPIGAGICASYQTQTNSPRRARSVASQSIIAYTMSLGAENSVAYSNNSIAIPTNFTISVTTEILPVSMTKTSVDCTMYICGDSTECSNLLLQYGSFCTQLNRALTGIAVEQDKNTQEVFAQVKQIYKTPPIKDFGGFNFSQILPDPSKPSKRSFIEDLLFNKVTLADAGFIKQYGDCLGDIAARDLICAQKFNGLTVLPPLLTDEMIAQYTSALLAGTITSGWTFGAGAALQIPFAMQMAYRFNGIGVTQNVLYENQKLIANQFNSAIGKIQDSLSSTASALGKLQDVVNQNAQALNTLVKQLSSNFGCISSVLNDILSRLDKVEAEVQIDCLITGRLQSLQTYVTQQLIRAAEIRASANLAATKMSECVLGQSKRVDFCGKGYHLMSFPQSAPHGVVFLHVTYVPAQEKNFTTAPAICHDGKAHFPREGVFVSNGTHWFVTQRNFYEPQIITTDNTFVSGNCDVVIGIVNNTVYDPLQPELDSGGGSGGGQIYEGKLTAEGLRFGIVASRFNHALVDRLVEGAIDAIVRHGGREEDITLVRVPGSWEIPVAAGELARKEDIDAVIAIGVLIRGATPHFDYIASEVSKGLADLSLELRKPITFGVITADTLEQAIERAGTKHGNKGWEAALSAIEMANLFKSLR

SEQ ID NO: 8457 - protein, 1307 aa, Artificial Sequence
  SARS-CoV-2/Wuhan/HBCDC-HB-02/2020__EPI_ISL_412978 spike protein (1-1147)(A972C_R995C) LumSynth construct
MFVFLVLLPLVSSQCVNLTTRTQLPPAYTNSFTRGVYYPDKVFRSSVLHSTQDLFLPFFSNVTWFHAIHVSGTNGTKRFDNPVLPFNDGVYFASTEKSNIIRGWIFGTTLDSKTQSLLIVNNATNVVIKVCEFQFCNDPFLGVYYHKNNKSWMESEFRVYSSANNCTFEYVSQPFLMDLEGKQGNFKNLREFVFKNIDGYFKIYSKHTPINLVRDLPQGFSALEPLVDLPIGINITRFQTLLALHRSYLTPGDSSSGWTAGAAAYYVGYLQPRTFLLKYNENGTITDAVDCALDPLSETKCTLKSFTVEKGIYQTSNFRVQPTESIVRFPNITNLCPFGEVFNATRFASVYAWNRKRISNCVADYSVLYNSASFSTFKCYGVSPTKLNDLCFTNVYADSFVIRGDEVRQIAPGQTGKIADYNYKLPDDFTGCVIAWNSNNLDSKVGGNYNYLYRLFRKSNLKPFERDISTEIYQAGSTPCNGVEGFNCYFPLQSYGFQPTNGVGYQPYRVVVLSFELLHAPATVCGPKKSTNLVKNKCVNFNFNGLTGTGVLTESNKKFLPFQQFGRDIADTTDAVRDPQTLEILDITPCSFGGVSVITPGTNTSNQVAVLYQDVNCTEVPVAIHADQLTPTWRVYSTGSNVFQTRAGCLIGAEHVNNSYECDIPIGAGICASYQTQTNSPRRARSVASQSIIAYTMSLGAENSVAYSNNSIAIPTNFTISVTTEILPVSMTKTSVDCTMYICGDSTECSNFLLQYGSFCTQLNRALTGIAVEQDKNTQEVFAQVKQIYKTPPIKDFGGFNFSQILPDPSKPSKRSFIEDLLFNKVTLADAGFIKQYGDCLGDIAARDLICAQKFNGLTVLPPLLTDEMIAQYTSALLAGTITSGWTFGAGAALQIPFAMQMAYRFNGIGVTQNVLYENQKLIANQFNSAIGKIQDSLSSTASALGKLQDVVNQNAQALNTLVKQLSSNFGCISSVLNDILSRLDKVEAEVQIDCLITGRLQSLQTYVTQQLIRAAEIRASANLAATKMSECVLGQSKRVDFCGKGYHLMSFPQSAPHGVVFLHVTYVPAQEKNFTTAPAICHDGKAHFPREGVFVSNGTHWFVTQRNFYEPQIITTDNTFVSGNCDVVIGIVNNTVYDPLQPELDSGGGSGGGQIYEGKLTAEGLRFGIVASRFNHALVDRLVEGAIDAIVRHGGREEDITLVRVPGSWEIPVAAGELARKEDIDAVIAIGVLIRGATPHFDYIASEVSKGLADLSLELRKPITFGVITADTLEQAIERAGTKHGNKGWEAALSAIEMANLFKSLR

SEQ ID NO: 8458 - protein, 1307 aa, Artificial Sequence
  SARS-CoV-2/Australia/QLD02/2020__EPI_ISL_407896 spike protein (1-1147)(A972C_R995C) LumSynth construct
MFVFLVLLPLVSSQCVNLTTRTQLPPAYTNSFTRGVYYPDKVFRSSVLHSTQDLFLPFFSNVTWFHAIHVSGTNGTKRFDNPVLPFNDGVYFASTEKSNIIRGWIFGTTLDSKTQSLLIVNNATNVVIKVCEFQFCNDPFLGVYYHKNNKSWMESEFRVYSSANNCTFEYVSQPFLMDLEGKQGNFKNLREFVFKNIDGYFKIYSKHTPINLVRDLPQGFSALEPLVDLPIGINITRFQTLLALHRSYLTPGDSSSGWTAGAAAYYVGYLQPRTFLLKYNENGTITDAVDCALDPLSETKCTLKSFTVEKGIYQTSNFRVQPTESIVRFPNITNLCPFGEVFNATRFASVYAWNRKRISNCVADYSVLYNSASFSTFKCYGVSPTKLNDLCFTNVYADSFVIRGDEVRQIAPGQTGKIADYNYKLPDDFTGCVIAWNSNNLDSKVGGNYNYLYRLFRKSNLKPFERDISTEIYQAGSTPCNGVEGFNCYFPLQSYGFQPTNGVGYQPYRVVVLSFELLHAPATVCGPKKSTNLVKNKCVNFNFNGLTGTGVLTESNKKFLPFQQFGRDIADTTDAVRDPQTLEILDITPCSFGGVSVITPGTNTSNQVAVLYQDVNCTEVPVAIHADQLTPTWRVYSTGSNVFQTRAGCLIGAEHVNNSYECDIPIGAGICASYQTQTNSPRRARSVASQSIIAYTMSLGAENSVAYSNNSIAIPTNFTISVTTEILPVSMTKTSVDCTMYICGDSTECSNLLLQYGSFCTQLNRALTGIAVEQDKNTQEVFAQVKQIYKTPPIKDFGGFNFSQILPDPSKPSKRSFIEDLLFNKVTLADAGFIKQYGDCLGDIAARDLICAQKFNGLTVLPPLLTDEMIAQYTSALLAGTITSGWTFGAGAALQIPFAMQMAYRFNGIGVTQNVLYENQKLIANQFNSAIGKIQDSLSSTASALGKLQDVVNQNAQALNTLVKQLSSNFGCISSVLNDILSRLDKVEAEVQIDCLITGRLQSLQTYVTQQLIRAAEIRASANLAATKMSECVLGQSKRVDFCGKGYHLMSFPQSAPHGVVFLHVTYVPAQEKNFTTAPAICHDGKAHFPREGVFVSNGTHWFVTQRNFYEPQIITTDNTFVSGNCDVVIGIVNNTVYDPLQLELDSGGGSGGGQIYEGKLTAEGLRFGIVASRFNHALVDRLVEGAIDAIVRHGGREEDITLVRVPGSWEIPVAAGELARKEDIDAVIAIGVLIRGATPHFDYIASEVSKGLADLSLELRKPITFGVITADTLEQAIERAGTKHGNKGWEAALSAIEMANLFKSLR

SEQ ID NO: 8459 - protein, 1307 aa, Artificial Sequence
  SARS-CoV-2/India/1-31/2020__EPI_ISL_413523 spike protein (1-1147)(A972C_R995C) LumSynth construct
MFVFLVLLPLVSSQCVNLTTRTQLPPAYTNSFTRGVYYPDKVFRSSVLHSTQDLFLPFFSNVTWFHAIHVSGTNGTKRFDNPVLPFNDGVYFASTEKSNIIRGWIFGTTLDSKTQSLLIVNNATNVVIKVCEFQFCNDPFLGVYYHKNNKSWMESEFRVYSSANNCTFEYVSQPFLMDLEGKQGNFKNLREFVFKNIDGYFKIYSKHTPINLVRDLPQGFSALEPLVDLPIGINITRFQTLLALHRSYLTPGDSSSGWTAGAAAYYVGYLQPRTFLLKYNENGTITDAVDCALDPLSETKCTLKSFTVEKGIYQTSNFRVQPTESIVRFPNITNLCPFGEVFNATRFASVYAWNRKRISNCVADYSVLYNSASFSTFKCYGVSPTKLNDLCFTNVYADSFVIRGDEVRQIAPGQTGKIADYNYKLPDDFTGCVIAWNSNNLDSKVGGNYNYLYRLFRKSNLKPFERDISTEIYQAGSTPCNGVEGFNCYFPLQSYGFQPTNGVGYQPYRVVVLSFELLHAPATVCGPKKSTNLVKNKCVNFNFNGLTGTGVLTESNKKFLPFQQFGRDIADTTDAVRDPQTLEILDITPCSFGGVSVITPGTNTSNQVAVLYQDVNCTEVPVAIHADQLTPTWRVYSTGSNVFQTRAGCLIGAEHVNNSYECDIPIGAGICASYQTQTNSPRRARSVASQSIIAYTMSLGAENSVAYSNNSIAIPTNFTISVTTEILPVSMTKTSVDCTMYICGDSTECSNLLLQYGSFCTQLNRALTGIAVEQDKNTQEVFAQVKQIYKTPPIKDFGGFNFSQILPDPSKPSKRSFIEDLLFNKVTLADAGFIKQYGDCLGDIAARDLICAQKFNGLTVLPPLLTDEMIAQYTSALLAGTITSGWTFGAGAALQIPFAMQMAYRFNGIGVTQNVLYENQKLIANQFNSVIGKIQDSLSSTASALGKLQDVVNQNAQALNTLVKQLSSNFGCISSVLNDILSRLDKVEAEVQIDCLITGRLQSLQTYVTQQLIRAAEIRASANLAATKMSECVLGQSKRVDFCGKGYHLMSFPQSAPHGVVFLHVTYVPAQEKNFTTAPAICHDGKAHFPREGVFVSNGTHWFVTQRNFYEPQIITTDNTFVSGNCDVVIGIVNNTVYDPLQPELDSGGGSGGGQIYEGKLTAEGLRFGIVASRFNHALVDRLVEGAIDAIVRHGGREEDITLVRVPGSWEIPVAAGELARKEDIDAVIAIGVLIRGATPHFDYIASEVSKGLADLSLELRKPITFGVITADTLEQAIERAGTKHGNKGWEAALSAIEMANLFKSLR

SEQ ID NO: 8460 - protein, 1307 aa, Artificial Sequence
  SARS-CoV-2/Guangdong/GD2020087-P0008/2020__EPI_ISL_413863 spike protein (1-1147)(A972C_R995C) LumSynth construct
MFVFLVLLPLVSSQCVNLTTRTQLPPAYTNSFTRGVYYPDKVFRSSVLHSTQDLFLPFFSNVTWFHAIHVSGTNGTKRFDNPVLPFNDGVYFASTEKSNIIRGWIFGTTLDSKTQSLLIVNNATNVVIKVCEFQFCNDPFLGVYYHKNNKSWMESEFRVYSSANNCTFEYVSQPFLMDLEGKQGNFKNLREFVFKNIDGYFKIYSKHTPINLVRDLPQGFSALEPLVDLPIGINITRFQTLLALHRSYLTPGDSSSGWTAGAAAYYVGYLQPRTFLLKYNENGTITDAVDCALDPLSETKCTLKSFTVEKGIYQTSNFRVQPTESIVRFPNITNLCPFGEVFNATRFASVYAWNRKRISNCVADYSVLYNSASFSTFKCYGVSPTKLNDLCFTNVYADSFVIRGDEVREIAPGQTGKIADYNYKLPDDFTGCVIAWNSNNLDSKVGGNYNYLYRLFRKSNLKPFERDISTEIYQAGSTPCNGVEGFNCYFPLQSYGFQPTNGVGYQPYRVVVLSFELLHAPATVCGPKKSTNLVKNKCVNFNFNGLTGTGVLTESNKKFLPFQQFGRDIADTTDAVRDPQTLEILDITPCSFGGVSVITPGTNTSNQVAVLYQDVNCTEVPVAIHADQLTPTWRVYSTGSNVFQTRAGCLIGAEHVNNSYECDIPIGAGICASYQTQTNSPRRARSVASQSIIAYTMSLGAENSVAYSNNSIAIPTNFTISVTTEILPVSMTKTSVDCTMYICGDSTECSNLLLQYGSFCTQLNRALTGIAVEQDKNTQEVFAQVKQIYKTPPIKDFGGFNFSQILPDPSKPSKRSFIEDLLFNKVTLADAGFIKQYGDCLGDIAARDLICAQKFNGLTVLPPLLTDEMIAQYTSALLAGTITSGWTFGAGAALQIPFAMQMAYRFNGIGVTQNVLYENQKLIANQFNSAIGKIQDSLSSTASALGKLQDVVNQNAQALNTLVKQLSSNFGCISSVLNDILSRLDKVEAEVQIDCLITGRLQSLQTYVTQQLIRAAEIRASANLAATKMSECVLGQSKRVDFCGKGYHLMSFPQSAPHGVVFLHVTYVPAQEKNFTTAPAICHDGKAHFPREGVFVSNGTHWFVTQRNFYEPQIITTDNTFVSGNCDVVIGIVNNTVYDPLQPELDSGGGSGGGQIYEGKLTAEGLRFGIVASRFNHALVDRLVEGAIDAIVRHGGREEDITLVRVPGSWEIPVAAGELARKEDIDAVIAIGVLIRGATPHFDYIASEVSKGLADLSLELRKPITFGVITADTLEQAIERAGTKHGNKGWEAALSAIEMANLFKSLR

SEQ ID NO: 8461 - protein, 1307 aa, Artificial Sequence
  SARS-CoV-2/Sweden/01/2020__EPI_ISL_411951 spike protein (1-1147)(A972C_R995C) LumSynth construct
MFVFLVLLPLVSSQCVNLTTRTQLPPAYTNSFTRGVYYPDKVFRSSVLHSTQDLFLPFFSNVTWFHAIHVSGTNGTKRFDNPVLPFNDGVYFASTEKSNIIRGWIFGTTLDSKTQSLLIVNNATNVVIKVCEFQFCNDPFLGVYYHKNNKSWMESEFRVYSSANNCTFEYVSQPFLMDLEGKQGNFKNLREFVFKNIDGYFKIYSKHTPINLVRDLPQGFSALEPLVDLPIGINITRFQTLLALHRSYLTPGDSSSGWTAGAAAYYVGYLQPRTFLLKYNENGTITDAVDCALDPLSETKCTLKSFTVEKGIYQTSNFRVQPTESIVRFPNITNLCPFGEVFNATRFASVYAWNRKRISNCVADYSVLYNSASFSTFKCYGVSPTKLNDLCFTNVYADSFVIRGDEVRQIAPGQTGKIADYNYKLPDDFTGCVIAWNSNNLDSKVGGNYNYLYRLFRKSNLKPFERDISTEIYQAGSTPCNGVEGFNCYFPLQSYGFQPTNGVGYQPYRVVVLSFELLHAPATVCGPKKSTNLVKNKCVNFNFNGLTGTGVLTESNKKFLPFQQFGRDIADTTDAVRDPQTLEILDITPCSFGGVSVITPGTNTSNQVAVLYQDVNCTEVPVAIHADQLTPTWRVYSTGSNVFQTRAGCLIGAEHVNNSYECDIPIGAGICASYQTQTNSPRRARSVASQSIIAYTMSLGAENSVAYSNNSIAIPTNFTISVTTEILPVSMTKTSVDCTMYICGDSTECSNLLLQYGSFCTQLNRALTGIAVEQDKNTQEVFAQVKQIYKTPPIKDCGGFNFSQILPDPSKPSKRSFIEDLLFNKVTLADAGFIKQYGDCLGDIAARDLICAQKFNGLTVLPPLLTDEMIAQYTSALLAGTITSGWTFGAGAALQIPFAMQMAYRFNGIGVTQNVLYENQKLIANQFNSAIGKIQDSLSSTASALGKLQDVVNQNAQALNTLVKQLSSNFGCISSVLNDILSRLDKVEAEVQIDCLITGRLQSLQTYVTQQLIRAAEIRASANLAATKMSECVLGQSKRVDFCGKGYHLMSFPQSAPHGVVFLHVTYVPAQEKNFTTAPAICHDGKAHFPREGVFVSNGTHWFVTQRNFYEPQIITTDNTFVSGNCDVVIGIVNNTVYDPLQPELDSGGGSGGGQIYEGKLTAEGLRFGIVASRFNHALVDRLVEGAIDAIVRHGGREEDITLVRVPGSWEIPVAAGELARKEDIDAVIAIGVLIRGATPHFDYIASEVSKGLADLSLELRKPITFGVITADTLEQAIERAGTKHGNKGWEAALSAIEMANLFKSLR

SEQ ID NO: 8462 - protein, 1307 aa, Artificial Sequence
  SARS-CoV-2/Tianmen/HBCDC-HB-07/2020__EPI_ISL_412983 spike protein (1-1147)(A972C_R995C) LumSynth construct
MFVFLVLLPLVSSQCVNLTTRTQLPPAYTNSFTRGVYYPDKVFRSSVLHSTQDLFLPFFSNVTWFHAIHVSGTNGTKRFDNPVLPFNDGVYFASTEKSNIIRGWIFGTTLDSKTQSLLIVNNATNVVIKVCEFQFCNDPFLGVYYHKNNKSWMESEFRVYSSANNCTFEYVSQPFLMDLEGKQGNFKNLREFVFKNIDGYFKIYSKHTPINLVRDLPQGFSALEPLVDLPIGINITRFQTLLALHRSYLTPGDSSSGWTAGAAAYYVGYLQPRTFLLKYNENGTITDAVDCALDPLSETKCTLKSFTVEKGIYQTSNFRVQPTESIVRFPNITNLCPFGEVFNATRFASVYAWNRKRISNCVADYSVLYNSASFSTFKCYGVSPTKLNDLCFTNVYADSFVIRGDEVRQIAPGQTGKIADYNYKLPDDFTGCVIAWNSNNLDSKVGGNYNYLYRLFRKSNLKPFERDISTEIYQAGSTPCNGVEGFNCYFPLQSYGFQPTNGVGYQPYRVVVLSFELLHAPATVCGPKKSTNLVKNKCVNFNFNGLTGTGVLTESNKKFLPFQQFGRDIADTTDAVRDPQTLEILDITPCSFGGVSVITPGTNTSNQVAVLYQDLNCTEVPVAIHADQLTPTWRVYSTGSNVFQTRAGCLIGAEHVNNSYECDIPIGAGICASYQTQTNSPRRARSVASQSIIAYTMSLGAENSVAYSNNSIAIPTNFTISVTTEILPVSMTKTSVDCTMYICGDSTECSNLLLQYGSFCTQLNRALTGIAVEQDKNTQEVFAQVKQIYKTPPIKDFGGFNFSQILPDPSKPSKRSFIEDLLFNKVTLADAGFIKQYGDCLGDIAARDLICAQKFNGLTVLPPLLTDEMIAQYTSALLAGTITSGWTFGAGAALQIPFAMQMAYRFNGIGVTQNVLYENQKLIANQFNSAIGKIQDSLSSTASALGKLQDVVNQNAQALNTLVKQLSSNFGCISSVLNDILSRLDKVEAEVQIDCLITGRLQSLQTYVTQQLIRAAEIRASANLAATKMSECVLGQSKRVDFCGKGYHLMSFPQSAPHGVVFLHVTYVPAQEKNFTTAPAICHDGKAHFPREGVFVSNGTHWFVTQRNFYEPQIITTDNTFVSGNCDVVIGIVNNTVYDPLQPELDSGGGSGGGQIYEGKLTAEGLRFGIVASRFNHALVDRLVEGAIDAIVRHGGREEDITLVRVPGSWEIPVAAGELARKEDIDAVIAIGVLIRGATPHFDYIASEVSKGLADLSLELRKPITFGVITADTLEQAIERAGTKHGNKGWEAALSAIEMANLFKSLR

SEQ ID NO: 8463 - protein, 1307 aa, Artificial Sequence
  SARS-CoV-2/Hong Kong/case42_VM20002493/2020__EPI_ISL_414527 spike protein (1-1147)(A972C_R995C) LumSynth construct
MFVFLVLLPLVSSQCVNLTTRTQLPPAYTNSFTRGVYYPDKVFRSSVLHSTQDLFLPFFSNVTWFHAIHVSGTNGTKRFDNPVLPFNDGVYFASTEKSNIIRGWIFGTTLDSKTQSLLIVNNATNVVIKVCEFQFCNDPFLGVYYHKNNKSWMESEFRVYSSANNCTFEYVSQPFLMDLEGKQGNFKNLREFVFKNIDGYFKIYSKHTPINLVRDLPQGFSALEPLVDLPIGINITRFQTLLALHRSYLTPGDSSSGWTAGAAAYYVGYLQPRTFLLKYNENGTITDAVDCALDPLSETKCTLKSFTVEKGIYQTSNFRVQPTESIVRFPNITNLCPFGEVFNATRFASVYAWNRKRISNCVADYSVLYNSASFSTFKCYGVSPTKLNDLCFTNVYADSFVIRGDEVRQIAPGQTGKIADYNYKLPDDFTGCVIAWNSNNLDSKVGGNYNYLYRLFRKSNLKPFERDISTEIYQAGSTPCNGVEGFNCYFPLQSYGFQPTNGVGYQPYRVVVLSFELLHAPATVCGPKKSTNLVKNKCVNFNFNGLTGTGVLTESNKKFLPFQQFGRDIADTTDAVRDPQTLEILDITPCSFGGVSVITPGTNTSNQVAVLYQDVNCTEVPVAIHADQLTPTWRVYSTGSNVFQTRAGCLIGAEHVNNSYECDIPIGAGICASYQTQTNSPRRARSVASQSIIAYTMSLGAENSVAYSNNSIAIPTNFAISVTTEILPVSMTKTSVDCTMYICGDSTECSNLLLQYGSFCTQLNRALTGIAVEQDKNTQEVFAQVKQIYKTPPIKDFGGFNFSQILPDPSKPSKRSFIEDLLFNKVTLADAGFIKQYGDCLGDIAARDLICAQKFNGLTVLPPLLTDEMIAQYTSALLAGTITSGWTFGAGAALQIPFAMQMAYRFNGIGVTQNVLYENQKLIANQFNSAIGKIQDSLSSTASALGKLQDVVNQNAQALNTLVKQLSSNFGCISSVLNDILSRLDKVEAEVQIDCLITGRLQSLQTYVTQQLIRAAEIRASANLAATKMSECVLGQSKRVDFCGKGYHLMSFPQSAPHGVVFLHVTYVPAQEKNFTTAPAICHDGKAHFPREGVFVSNGTHWFVTQRNFYEPQIITTDNTFVSGNCDVVIGIVNNTVYDPLQPELDSGGGSGGGQIYEGKLTAEGLRFGIVASRFNHALVDRLVEGAIDAIVRHGGREEDITLVRVPGSWEIPVAAGELARKEDIDAVIAIGVLIRGATPHFDYIASEVSKGLADLSLELRKPITFGVITADTLEQAIERAGTKHGNKGWEAALSAIEMANLFKSLR

SEQ ID NO: 8464 - protein, 1307 aa, Artificial Sequence
  SARS-CoV-2/USA/CruiseA-23/2020__EPI_ISL_414482 spike protein (1-1147)(A972C_R995C) LumSynth construct
MFVFLVLLPLVSSQCVNLTTRTQLPPAYTNSFTRGVYYPDKVFRSSVLHSTQDLFLPFFSNVTWFHAIHVSGTNGTKRFDNPVLPFNDGVYFASTEKSNIIRGWIFGTTLDSKTQSLLIVNNATNVVIKVCEFQFCNDPFLGVYYHKNNKSWMESEFRVYSSANNCTFEYVSQPFLMDLEVKQGNFKNLREFVFKNIDGYFKIYSKHTPINLVRDLPQGFSALEPLVDLPIGINITRFQTLLALHRSYLTPGDSSSGWTAGAAAYYVGYLQPRTFLLKYNENGTITDAVDCALDPLSETKCTLKSFTVEKGIYQTSNFRVQPTESIVRFPNITNLCPFGEVFNATRFASVYAWNRKRISNCVADYSVLYNSASFSTFKCYGVSPTKLNDLCFTNVYADSFVIRGDEVRQIAPGQTGKIADYNYKLPDDFTGCVIAWNSNNLDSKVGGNYNYLYRLFRKSNLKPFERDISTEIYQAGSTPCNGVEGFNCYFPLQSYGFQPTNGVGYQPYRVVVLSFELLHAPATVCGPKKSTNLVKNKCVNFNFNGLTGTGVLTESNKKFLPFQQFGRDIADTTDAVRDPQTLEILDITPCSFGGVSVITPGTNTSNQVAVLYQDVNCTEVPVAIHADQLTPTWRVYSTGSNVFQTRAGCLIGAEHVNNSYECDIPIGAGICASYQTQTNSPRRARSVASQSIIAYTMSLGAENSVAYSNNSIAIPTNFTISVTTEILPVSMTKTSVDCTMYICGDSTECSNLLLQYGSFCTQLNRALTGIAVEQDKNTQEVFAQVKQIYKTPPIKDFGGFNFSQILPDPSKPSKRSFIEDLLFNKVTLADAGFIKQYGDCLGDIAARDLICAQKFNGLTVLPPLLTDEMIAQYTSALLAGTITSGWTFGAGAALQIPFAMQMAYRFNGIGVTQNVLYENQKLIANQFNSAIGKIQDSLSSTASALGKLQDVVNQNAQALNTLVKQLSSNFGCISSVLNDILSRLDKVEAEVQIDCLITGRLQSLQTYVTQQLIRAAEIRASANLAATKMSECVLGQSKRVDFCGKGYHLMSFPQSAPHGVVFLHVTYVPAQEKNFTTAPAICHDGKAHFPREGVFVSNGTHWFVTQRNFYEPQIITTDNTFVSGNCDVVIGIVNNTVYDPLQPELDSGGGSGGGQIYEGKLTAEGLRFGIVASRFNHALVDRLVEGAIDAIVRHGGREEDITLVRVPGSWEIPVAAGELARKEDIDAVIAIGVLIRGATPHFDYIASEVSKGLADLSLELRKPITFGVITADTLEQAIERAGTKHGNKGWEAALSAIEMANLFKSLR

SEQ ID NO: 8465 - protein, 1307 aa, Artificial Sequence
  SARS-CoV-2/Hong Kong/case85_VM20002868/2020__EPI_ISL_414519 spike protein (1-1147)(A972C_R995C) LumSynth construct
MFVFLVLVPLVSSQCVNLTTRTQLPPAYTNSFTRGVYYPDKVFRSSVLHSTQDLFLPFFSNVTWFHAIHVSGTNGTKRFDNPVLPFNDGVYFASTEKSNIIRGWIFGTTLDSKTQSLLIVNNATNVVIKVCEFQFCNDPFLGVYYHKNNKSWMESEFRVYSSANNCTFEYVSQPFLMDLEGKQGNFKNLREFVFKNIDGYFKIYSKHTPINLVRDLPQGFSALEPLVDLPIGINITRFQTLLALHRSYLTPGDSSSGWTAGAAAYYVGYLQPRTFLLKYNENGTITDAVDCALDPLSETKCTLKSFTVEKGIYQTSNFRVQPTESIVRFPNITNLCPFGEVFNATRFASVYAWNRKRISNCVADYSVLYNSASFSTFKCYGVSPTKLNDLCFTNVYADSFVIRGDEVRQIAPGQTGKIADYNYKLPDDFTGCVIAWNSNNLDSKVGGNYNYLYRLFRKSNLKPFERDISTEIYQAGSTPCNGVEGFNCYFPLQSYGFQPTNGVGYQPYRVVVLSFELLHAPATVCGPKKSTNLVKNKCVNFNFNGLTGTGVLTESNKKFLPFQQFGRDIADTTDAVRDPQTLEILDITPCSFGGVSVITPGTNTSNQVAVLYQDVNCTEVPVAIHADQLTPTWRVYSTGSNVFQTRAGCLIGAEHVNNSYECDIPIGAGICASYQTQTNSPRRARSVASQSIIAYTMSLGAENSVAYSNNSIAIPTNFTISVTTEILPVSMTKTSVDCTMYICGDSTECSNLLLQYGSFCTQLNRALTGIAVEQDKNTQEVFAQVKQIYKTPPIKDFGGFNFSQILPDPSKPSKRSFIEDLLFNKVTLADAGFIKQYGDCLGDIAARDLICAQKFNGLTVLPPLLTDEMIAQYTSALLAGTITSGWTFGAGAALQIPFAMQMAYRFNGIGVTQNVLYENQKLIANQFNSAIGKIQDSLSSTASALGKLQDVVNQNAQALNTLVKQLSSNFGCISSVLNDILSRLDKVEAEVQIDCLITGRLQSLQTYVTQQLIRAAEIRASANLAATKMSECVLGQSKRVDFCGKGYHLMSFPQSAPHGVVFLHVTYVPAQEKNFTTAPAICHDGKAHFPREGVFVSNGTHWFVTQRNFYEPQIITTDNTFVSGNCDVVIGIVNNTVYDPLQPELDSGGGSGGGQIYEGKLTAEGLRFGIVASRFNHALVDRLVEGAIDAIVRHGGREEDITLVRVPGSWEIPVAAGELARKEDIDAVIAIGVLIRGATPHFDYIASEVSKGLADLSLELRKPITFGVITADTLEQAIERAGTKHGNKGWEAALSAIEMANLFKSLR

SEQ ID NO: 8466 - protein, 1307 aa, Artificial Sequence; identical to SEQ ID NO: 8456
  SARS-CoV-2/England/200990660/2020__EPI_ISL_414523 spike protein (1-1147)(A972C_R995C) LumSynth construct

SEQ ID NO: 8467 - protein, 1307 aa, Artificial Sequence
  SARS-CoV-2/Australia/NSW09/2020__EPI_ISL_413595 spike protein (1-1147)(A972C_R995C) LumSynth construct
MFVFLVLLPLVSSQCVNLTTRTQLPPAYTNSFTRGVYYPDKVFRSSVLHSTQDLFLPFFSNVTWFHAIHVSGTNGTKRFDNPVLPFNDGVYFASTEKSNIIRGWIFGTTLDSKTQSLLIVNNATNVVIKVCEFQFCNDPFLGVYYHKNNKSWMESEFRVYSSANNCTFEYVSQPFLMDLEGKQGNFKNLREFVFKNIDGYFKIYSKHTPINLVRDLPQGFSALEPLVDLPIGINITRFQTLLALHRSYLTPGDSSSGWTAGAAAYYVGYLQPRTFLLKYNENGTITDAVDCALDPLSETKCTLKSFTVEKGIYQTSNFRVQPTESIVRFPNITNLCPFGEVFNATRFASVYAWNRKRISNCVADYSVLYNSASFSTFKCYGVSPTKLNDLCFTNVYADSFVIRGDEVRQIAPGQTGKIADYNYKLPDDFTGCVIAWNSNNLDSKVGGNYNYLYRLFRKSNLKPFERDISTEIYQAGSTPCNGVEGFNCYFPLQSYGFQPTNGVGYQPYRVVVLSFELLHAPATVCGPKKSTNLVKNKCVNFNFNGLTGTGVLTESNKKFLPFQQFGRDIADTTDAVRDPQTLEILDITPCSFGGVSVITPGTNTSNQVAVLYQDVNCTEVPVAIHADQLTPTWRVYSTGSNVFQTRAGCLIGAEHVNNSYECDIPIGAGICASYQTQTNSPRRARSVASQSIIAYTMSLGAENSVAYSNNSIAIPTNFTISVTTEILPVSMTKTSVDCTMYICGDSTECSNLLLQYGSFCTQLNRALTGIAVEQDKNTQEVFAQVKQIYKTPPIKDFGGFNFSQILPDPSKPSKRSFIEDLLFNKVTLADAGFIKQYGDCLGDIAARDLICAQKFNGLTVLPPLLTDEMIAQYTSALLAGTITSGWTFGAGAALQIPFAMQMAYRFNGIGVTQNVLYENQKLIANQFNSAIGKIQDSLSFTASALGKLQDVVNQNAQALNTLVKQLSSNFGCISSVLNDILSRLDKVEAEVQIDCLITGRLQSLQTYVTQQLIRAAEIRASANLAATKMSECVLGQSKRVDFCGKGYHLMSFPQSAPHGVVFLHVTYVPAQEKNFTTAPAICHDGKAHFPREGVFVSNGTHWFVTQRNFYEPQIITTDNTFVSGNCDVVIGIVNNTVYDPLQPELDSGGGSGGGQIYEGKLTAEGLRFGIVASRFNHALVDRLVEGAIDAIVRHGGREEDITLVRVPGSWEIPVAAGELARKEDIDAVIAIGVLIRGATPHFDYIASEVSKGLADLSLELRKPITFGVITADTLEQAIERAGTKHGNKGWEAALSAIEMANLFKSLR

SEQ ID NO: 8468 - protein, 1307 aa, Artificial Sequence; identical to SEQ ID NO: 8448
  SARS-CoV-2/Australia/NSW10/2020__EPI_ISL_413596 spike protein (1-1147)(A972C_R995C) LumSynth construct

SEQ ID NO: 8469 - protein, 1307 aa, Artificial Sequence
  SARS-CoV-2/Switzerland/1000477797/2020__EPI_ISL_413023 spike protein (1-1147)(A972C_R995C) LumSynth construct
MFVFLVLLPLVSSQCVNLTTRTQLPPAYTNSFTRGVYYPDKVFRSSVLHSTQDLFLPFFSNVTWFHAIHVSGTNGTKRFDNPVLPFNDGVYFASTEKSNIIRGWIFGTTLDSKTQSLLIVNNATNVVIKVCEFQFCNDPFLGVYYHKNNKSWMESEFRVYSSANNCTFEYVSQPFLMDLEGKQGNFKNLREFVFKNIDGYFNIYSKHTPINLVRDLPQGFSALEPLVDLPIGINITRFQTLLALHRSYLTPGDSSSGWTAGAAAYYVGYLQPRTFLLKYNENGTITDAVDCALDPLSETKCTLKSFTVEKGIYQTSNFRVQPTESIVRFPNITNLCPFGEVFNATRFASVYAWNRKRISNCVADYSVLYNSASFSTFKCYGVSPTKLNDLCFTNVYADSFVIRGDEVRQIAPGQTGKIADYNYKLPDDFTGCVIAWNSNNLDSKVGGNYNYLYRLFRKSNLKPFERDISTEIYQAGSTPCNGVEGFNCYFPLQSYGFQPTNGVGYQPYRVVVLSFELLHAPATVCGPKKSTNLVKNKCVNFNFNGLTGTGVLTESNKKFLPFQQFGRDIADTTDAVRDPQTLEILDITPCSFGGVSVITPGTNTSNQVAVLYQGVNCTEVPVAIHADQLTPTWRVYSTGSNVFQTRAGCLIGAEHVNNSYECDIPIGAGICASYQTQTNSPRRARSVASQSIIAYTMSLGAENSVAYSNNSIAIPTNFTISVTTEILPVSMTKTSVDCTMYICGDSTECSNLLLQYGSFCTQLNRALTGIAVEQDKNTQEVFAQVKQIYKTPPIKDFGGFNFSQILPDPSKPSKRSFIEDLLFNKVTLADAGFIKQYGDCLGDIAARDLICAQKFNGLTVLPPLLTDEMIAQYTSALLAGTITSGWTFGAGAALQIPFAMQMAYRFNGIGVTQNVLYENQKLIANQFNSAIGKIQDSLSSTASALGKLQDVVNQNAQALNTLVKQLSSNFGCISSVLNDILSRLDKVEAEVQIDCLITGRLQSLQTYVTQQLIRAAEIRASANLAATKMSECVLGQSKRVDFCGKGYHLMSFPQSAPHGVVFLHVTYVPAQEKNFTTAPAICHDGKAHFPREGVFVSNGTHWFVTQRNFYEPQIITTDNTFVSGNCDVVIGIVNNTVYDPLQPELDSGGGSGGGQIYEGKLTAEGLRFGIVASRFNHALVDRLVEGAIDAIVRHGGREEDITLVRVPGSWEIPVAAGELARKEDIDAVIAIGVLIRGATPHFDYIASEVSKGLADLSLELRKPITFGVITADTLEQAIERAGTKHGNKGWEAALSAIEMANLFKSLR

SEQ ID NO: 8470 - protein, 1307 aa, Artificial Sequence
  SARS-CoV-2/Belgium/BA-02291/2020__EPI_ISL_415159 spike protein (1-1147)(A972C_R995C) LumSynth construct
MFVFLVLLPLVSSQCVNLTTRTQLPPAYTNSFTRGVYYPDKVFRSSVLHSTQDLFLPFFSNVTWFHAIHVSGTNGTKRFDNPVLPFNDGVYFASTEKSNIIRGWIFGTTLDSKTQSLLIVNNATNVVIKVCEFQFCNDPFLGVYYHKNNKSWMESEFRVYSSANNCTFEYVSQPFLMDLEGKQGNFKNLREFVFKNIDGYFKIYSKHTPINLVRDLPQGFSALEPLVDLPIGINITRFQTLLALHRSYLTPGDSSSGWTAGAAAYYVGYLQPRTFLLKYNENGTITDAVDCALDPLSETKCTLKSFTVEKGIYQTSNFRVQPTESIVRFPNITNLCPFGEVFNATRFASVYAWNRKRISNCVADYSVLYNSASFSTFKCYGVSPTKLNDLCFTNVYADSFVIRGDEVRQIAPGQTGKIADYNYKLPDDFTGCVIAWNSNNLDSKVGGNYNYLYRLFRRSNLKPFERDISTEIYQAGSTPCNGVEGFNCYFPLQSYGFQPTNGVGYQPYRVVVLSFELLPAPATVCGPKKSTNLVKNKCVNFNFNGLTGTGVLTESNKKFLPFQQFGRDIADTTDAVRDPQTLEILDITPCSFGGVSVITPGTNTSNQVAVLYQGVNCTEVPVAIHADQLTPTWRVYSTGSNVFQTRAGCLIGAEHVNNSYECDIPIGAGICASYQTQTNSPRRARSVASQSIIAYTMSLGAENSVAYSNNSIAIPTNFTISVTTEILPVSMTKTSVDCTMYICGDSTECSNLLLQYGSFCTQLNRALTGIAVEQDKNTQEVFAQVKQIYKTPPIKDFGGFNFSQILPDPSKPSKRSFIEDLLFNKVTLADAGFIKQYGDCLGDIAARDLICAQKFNGLTVLPPLLTDEMIAQYTSALLAGTITSGWTFGAGAALQIPFAMQMAYRFNGIGVTQNVLYENQKLIANQFNSAIGKIQDSLSSAAPALGKLQDVVNQNAQALNTLVKQLSSNFGCISSVLNDILSRLDKVEAEVQIDCLITGRLQSLQTYVTQQLIRAAEIRASANLAATKMSECVLGQSKRVDFCGKGYHLMSFPQSAPHGVVFLHVTYVPAQEKNFTTAPAICHDGKAHFPREGVFVSNGTHWFVTQRNFYEPQIITTDNTFVSGNCDVVIGIVNNTVYDPLQPELDSGGGSGGGQIYEGKLTAEGLRFGIVASRFNHALVDRLVEGAIDAIVRHGGREEDITLVRVPGSWEIPVAAGELARKEDIDAVIAIGVLIRGATPHFDYIASEVSKGLADLSLELRKPITFGVITADTLEQAIERAGTKHGNKGWEAALSAIEMANLFKSLR

SEQ ID NO: 8471 - protein, 1307 aa, Artificial Sequence
  SARS-CoV-2/USA/WA8-UW5/2020__EPI_ISL_413486 spike protein (1-1147)(A972C_R995C) LumSynth construct
MFVFLVLLPLVSSQCVNLTTRTQLPPAYTNSFTRGVYYPDKVFRSSVLHSTQDLFLPFFSNVTWFHAIHVSGTNGTKRFDNPVLPFNDGVYFASTEKSNIIRGWIFGTTLDSKTQSLLIVNNATNVVIKVCEFQFCNDPFLGVYYHKNNKSWMESEFRVYSSANNCTFEYVSQPFLMDLEGKQGNFKNLREFVFKNIDGYFKIYSKHTPINLVRDLPQGFSALEPLVDLPIGINITRFQTLLALHRSYLTPGDSSSGWTAGAAAYYVGYLQPRTFLLKYNENGTITDAVDCALDPLSETKCTLKSFTVEKGIYQTSNFRVQPTESIVRFPNITNLCPFGEVFNATRFASVYAWNRKRISNCVADYSVLYNSASFSTFKCYGVSPTKLNDLCFTNVYADSFVIRGDEVRQIAPGQTGKIADYNYKLPDDFTGCVIAWNSNNLDSKVGGNYNYLYRLFRKSNLKPFERDISTEIYQAGSTPCNGVEGFNCYFPLQSYGFQPTNGVGYQPYRVVVLSFELLHAPATVCGPKKSTNLVKNKCVNFNFNGLTGTGVLTESNKKFLPFQQFGRDIADTTDAVRDPQTLEILDITPCSFGGVSVITPGTNTSNQVAVLYQDVNCTEVPVAIHADQLTPTWRVYSTGSNVFQTRAGCLIGAEYVNNSYECDIPIGAGICASYQTQTNSPRRARSVASQSIIAYTMSLGAENSVAYSNNSIAIPTNFTISVTTEILPVSMTKTSVDCTMYICGDSTECSNLLLQYGSFCTQLNRALTGIAVEQDKNTQEVFAQVKQIYKTPPIKDFGGFNFSQILPDPSKPSKRSFIEDLLFNKVTLADAGFIKQYGDCLGDIAARDLICAQKFNGLTVLPPLLTDEMIAQYTSALLAGTITSGWTFGAGAALQIPFAMQMAYRFNGIGVTQNVLYENQKLIANQFNSAIGKIQDSLSSTASALGKLQDVVNQNAQALNTLVKQLSSNFGCISSVLNDILSRLDKVEAEVQIDCLITGRLQSLQTYVTQQLIRAAEIRASANLAATKMSECVLGQSKRVDFCGKGYHLMSFPQSAPHGVVFLHVTYVPAQEKNFTTAPAICHDGKAHFPREGVFVSNGTHWFVTQRNFYEPQIITTDNTFVSGNCDVVIGIVNNTVYDPLQPELDSGGGSGGGQIYEGKLTAEGLRFGIVASRFNHALVDRLVEGAIDAIVRHGGREEDITLVRVPGSWEIPVAAGELARKEDIDAVIAIGVLIRGATPHFDYIASEVSKGLADLSLELRKPITFGVITADTLEQAIERAGTKHGNKGWEAALSAIEMANLFKSLR

SEQ ID NO: 8472 - protein, 1307 aa, Artificial Sequence
  SARS-CoV-2/England/20102000506/2020__EPI_ISL_415147 spike protein (1-1147)(A972C_R995C) LumSynth construct
MFVFLVLLPLVSSQCVNLTTRTQLPPAYTNSFTRGVYYPDKVFRSSVLHSTQDLFLPFFSNVTWFHAIHVSGTNGTKRFDNPVLPFNDGVYFASTEKSNIIRGWIFGTTLDSKTQSLLIVNNATNVVIKVCEFQFCNDPFLGVYYHKNNKSWMESEFRVYSSANNCTFEYVSQPFLMDLEGKQGNFKNLREFVFKNIDGYFKIYSKHTPINLVRDLPQGFSALEPLVDLPIGINITRFQTLLALHRSYLTPGDSSSGWTAGAAAYYVGYLQPRTFLLKYNENGTITDAVDCALDPLSETKCTLKSFTVEKGIYQTSNFRVQPTESIVRFPNITNLCPFGEVFNATRFASVYAWNRKRISNCVADYSVLYNSASFSTFKCYGVSPTKLNDLCFTNVYADSFVIRGDEVRQIAPGQTGKIADYNYKLPDDFTGCVIAWNSNNLDSKVGGNYNYLYRLFRKSNLKPFERDISTEIYQAGSTPCNGVEGFNCYFPLQSYGFQPTNGVGYQPYRVVVLSFELLHAPATVCGPKKSTNLVKNKCVNFNFNGLTGTGVLTESNKKFLPFQQFGRDIADTTDAVRDPQTLEILDITPCSFGGVSVITPGTNTSNQVAVLYQGVNCTEVPVAIHADQLTPTWRVYSTGSNVFQTRAGCLIGAEHVNNSYECDIPIGAGICASYQTQTNSPRRARSVASQSIIAYTMSLGAENSVAYSNNSIAIPTNFTISVTTEILPVSMTKTSVDCTMYICGDSTECSNLLLQYGSFCTQLNRALTGIAVEQDKNTQEVFAQVKQIYKTPPIKDFGGFNFSQILPDPSKPSKRSFIEDLLFNKVTLADAGFIKQYGYCLGDIAARDLICAQKFNGLTVLPPLLTDEMIAQYTSALLAGTITSGWTFGAGAALQIPFAMQMAYRFNGIGVTQNVLYENQKLIANQFNSAIGKIQDSLSSTASALGKLQDVVNQNAQALNTLVKQLSSNFGCISSVLNDILSRLDKVEAEVQIDCLITGRLQSLQTYVTQQLIRAAEIRASANLAATKMSECVLGQSKRVDFCGKGYHLMSFPQSAPHGVVFLHVTYVPAQEKNFTTAPAICHDGKAHFPREGVFVSNGTHWFVTQRNFYEPQIITTDNTFVSGNCDVVIGIVNNTVYDPLQPELDSGGGSGGGQIYEGKLTAEGLRFGIVASRFNHALVDRLVEGAIDAIVRHGGREEDITLVRVPGSWEIPVAAGELARKEDIDAVIAIGVLIRGATPHFDYIASEVSKGLADLSLELRKPITFGVITADTLEQAIERAGTKHGNKGWEAALSAIEMANLFKSLR

SEQ ID NO: 8473 - protein, 1307 aa, Artificial Sequence
  SARS-CoV-2/Belgium/VAG-03013/2020__EPI_ISL_415155 spike protein (1-1147)(A972C_R995C) LumSynth construct
MFVFLVLLPLVSSQCVNLTTRTQLPPAYTNSFTRGVYYPDKVFRSSVLHSTQDLFLPFFSNVTWFHAIHVSGTNGTKRFDNPVLPFNDGVYFASTEKSNIIRGWIFGTTLDSKTQSLLIVNNATNVVIKVCEFQFCNDPFLGVYYHKNNKSWMESEFRVYSSANNCTFEYVSQPFLMDLEGKQGNFKNLREFVFKNIDGYFKIYSKHTPINLVRDLPQGFSALEPLVDLPIGINITRFQTLLALHRSYLTPGDSSSGWTAGAAAYYVGYLQPRTFLLKYNENGTITDAVDCALDPLSETKCTLKSFTVEKGIYQTSNFRVQPTESIVRFPNITNLCPFGEVFNATRFASVYAWNRKRISNCVADYSVLYNSASFSTFKCYGVSPTKLNDLCFTNVYADSFVIRGDEVRQIAPGQTGKIADYNYKLPDDFTGCVIAWNSNNLDSKVGGNYNYLYRLFRKSNLKPFERDISTEIYQAGSTPCNGVEGFNCYFPLQSYGFQPTNGVGYQPYRVVVLSFELLHAPATVCGPKKSTNLVKNKCVNFNFNGLTGTGVLTESNKKFLPFQQFGRDIADTTDAVRDPQTLEILDITPCSFGGVSVITPGTNTSNQVAVLYQGVNCTEVPVAIHADQLTPTWRVYSTGSNVFQTRAGCLIGAEHVNNSYECDIPIGAGICASYQTQTNSPRRARSVASQSIIAYTMSLGAENSVAYSNNSIAIPTNFTISVTTEILPVSMTKTSVDCTMYICGDSTECSNLLLQYGSFCTQLNRALTGIAVEQDKNTQEVFAQVKQIYKTPPIKDFGGFNFSQILPDPSKPSKRSFIEDLLFNKVTLADAGFIKQYGDCLGDIAARDLICAQKFNGLTVLPPLLTDEMIAQYTSALLAGTITSGWTFGAGAALQIPFAMQMAYRFNGIGVTQNVLYENQKLIANQFNSAIGKIQDSLSSTATALGKLQDVVNQNAQALNTLVKQLSSNFGCISSVLNDILSRLDKVEAEVQIDCLITGRLQSLQTYVTQQLIRAAEIRASANLAATKMSECVLGQSKRVDFCGKGYHLMSFPQSAPHGVVFLHVTYVPAQEKNFTTAPAICHDGKAHFPREGVFVSNGTHWFVTQRNFYEPQIITTDNTFVSGNCDVVIGIVNNTVYDPLQPELDSGGGSGGGQIYEGKLTAEGLRFGIVASRFNHALVDRLVEGAIDAIVRHGGREEDITLVRVPGSWEIPVAAGELARKEDIDAVIAIGVLIRGATPHFDYIASEVSKGLADLSLELRKPITFGVITADTLEQAIERAGTKHGNKGWEAALSAIEMANLFKSLR

SEQ ID NO: 8474 - protein, 1307 aa, Artificial Sequence
  SARS-CoV-2/Belgium/BC-03016/2020__EPI_ISL_415157 spike protein (1-1147)(A972C_R995C) LumSynth construct
MFVFLVLLPLVSSQCVNLTTRTQLPPAYTNSFTRGVYYPDKVFRSSVLHSTQDLFLPFFSNVTWFHAIHVSGTNGTKRFDNPVLPFNDGVYFASTEKSNIIRGWIFGTTLDSKTQSLLIVNNATNVVIKVCEFQFCNDPFLGVYYHKNNKSWMESEFRVYSSANNCTFEYVSQPFLMDLEGKQGNFKNLREFVFKNIDGYFKIYSKHTPINLVRDLPQGFSALEPLVDLPIGINITRFQTLLALHRSYLTPGDSSSGWTAGAAAYYVGYLQPRTFLLKYNENGTITDAVDCALDPLSETKCTLKSFTVEKGIYQTSNFRVQPTESIVRFPNITNLCPFGEVFNATRFASVYAWNRKRISNCVADYSVLYNSASFSTFKCYGVSPTKLNDLCFTNVYADSFVIRGDEVRQIAPGQTGKIADYNYKLPDDFTGCVIAWNSNNLDSKVGGNYNYLYRLFRKSNLKPFERDISTEIYQAGSTPCNGVEGFNCYFPLQSYGFQPTNGVGYQPYRVVVLSFELLHAPATVCGPKKSTNLVKNKCVNFNFNGLTGTGVLTESNKKFLPFQQFGRDIADTTDAVRDPQTLEILDITPCSFGGVSVITPGTNTSNQVAVLYQGVNCTEVPVAIHADQLTPTWRVYSTGSNVFQTRAGCLIGAEHVNNSYECDIPIGAGICASYQTQTNSPRRARSVASQSIIAYTMSLGAENSVAYSNNSIAIPTNFTISVTTEILPVSMTKTSVDCTMYICGDSTECSNLLLQYGSFCTQLNRALTGIAVEQDKNTQEVFAQVKQIYKTPPIKDFGGFNFSQILPDPSKPSKRSFIEDLLFNKVTLADAGFIKQYGDCLGDIAARDLICAQKFNGLTVLPPLLTDEMIAQYTSALLAGTITSGWTFGAGAALQIPFAMQMAYRFNGIGVTQNVLYENQKLIANQFNSAIGKIQDSLSSTAPALGKLQDVVNQNAQALNTLVKQLSSNFGCISSVLNDILSRLDKVEAEVQIDCLITGRLQSLQTYVTQQLIRAAEIRASANLAATKMSECVLGQSKRVDFCGKGYHLMSFPQSAPHGVVFLHVTYVPAQEKNFTTAPAICHDGKAHFPREGVFVSNGTHWFVTQRNFYEPQIITTDNTFVSGNCDVVIGIVNNTVYDPLQPELDSGGGSGGGQIYEGKLTAEGLRFGIVASRFNHALVDRLVEGAIDAIVRHGGREEDITLVRVPGSWEIPVAAGELARKEDIDAVIAIGVLIRGATPHFDYIASEVSKGLADLSLELRKPITFGVITADTLEQAIERAGTKHGNKGWEAALSAIEMANLFKSLR

SEQ ID NO: 8475 - protein, 1307 aa, Artificial Sequence
  SARS-CoV-2/Germany/BavPat3/2020__EPI_ISL_414521 spike protein (1-1147)(A972C_R995C) LumSynth construct
MFVFLVLLPLVSSQCVNLTTRTQLPPAYTNSFTRGVYYPDKVFRSSVLHSTQDLFLPFFSNVTWFHAIHVSGTNGTKRFDNPVLPFNDGVYFASTEKSNIIRGWIFGTTLDSKTQSLLIVNNATNVVIKVCEFQFCNDPFLGVYYHKNNKSWMESEFRVYSSANNCTFEYVSQPFLMDLEGKQGNFKNLREFVFKNIDGYFKIYSKHTPINLVRDLPQGFSALEPLVDLPIGINITRFQTLLALHRSYLTPGDSSSGWTAGAAAYYVGYLQPRTFLLKYNENGTITDAVDCALDPLSETKCTLKSFTVEKGIYQTSNFRVQPTESIVRFPNITNLCPFGEVFNATRFASVYAWNRKRISNCVADYSVLYNSASFSTFKCYGVSPTKLNDLCFTNVYADSFVIRGDEVRQIAPGQTGKIADYNYKLPDDFTGCVIAWNSNNLDSKVGGNYNYLYRLFRKSNLKPFERDISTEIYQAGSTPCNGVEGFNCYFPLQSYGFQPTNGVGYQPYRVVVLSFELLHAPATVCGPKKSTNLVKNKCVNFNFNGLTGTGVLTESNKKFLPFQQFGRDIADTTDAVRDPQTLEILDITPCSFGGVSVITPGTNTSNQVAVLYQDVNCTEVPVAIHADQLTPTWRVYSTGSNVFQTRAGCLIGAEHVNNSYECDIPIGAGICASYQTQTNSPRRARSVASQSIIAYTMSLGAENSVAYSNNSIAIPTNFTISVTTEILPVSMTKTSVDCTMYICGDSTECSNLLLQYGSFCTQLNRALTGIAVEQDKNTQQVFAQVKQIYKTPPIKDFGGFNFSQILPDPSKPSKRSFIEDLLFNKVTLADAGFIKQYGDCLGDIAARDLICAQKFNGLTVLPPLLTDEMIAQYTSALLAGTITSGWTFGAGAALQIPFAMQMAYRFNGIGVTQNVLYENQKLIANQFNSAIGKIQDSLSSTASALGKLQDVVNQNAQALNTLVKQLSSNFGCISSVLNDILSRLDKVEAEVQIDCLITGRLQSLQTYVTQQLIRAAEIRASANLAATKMSECVLGQSKRVDFCGKGYHLMSFPQSAPHGVVFLHVTYVPAQEKNFTTAPAICHDGKAHFPREGVFVSNGTHWFVTQRNFYEPQIITTDNTFVSGNCDVVIGIVNNTVYDPLQPELDSGGGSGGGQIYEGKLTAEGLRFGIVASRFNHALVDRLVEGAIDAIVRHGGREEDITLVRVPGSWEIPVAAGELARKEDIDAVIAIGVLIRGATPHFDYIASEVSKGLADLSLELRKPITFGVITADTLEQAIERAGTKHGNKGWEAALSAIEMANLFKSLR

SEQ ID NO: 8476 - protein, 1307 aa, Artificial Sequence
  SARS-CoV-2/France/HF1805/2020__EPI_ISL_414628 spike protein (1-1147)(A972C_R995C) LumSynth construct
MFVFLVLLPLVSSQCVNLTTRTQLPPAYTNSFTRGVYYPDKVFRSSVLHSTQDLFLPFFSNVTWFHAIHVSGTNGTKRFDNPVLPFNDGVYFASTEKSNIIRGWIFGTTLDSKTQSLLIVNNATNVVIKVCEFQFCNDPFLGVYYHKNNKSWMESEFRVYSSANNCTFEYVSQPFLMDLEGKQGNFKNLREFVFKNIDGYFKIYSKHTPINLVRDLPQGFSALEPLVDLPIGINITRFQTLLALHRSYLTPGDSSSGWTAGAAAYYVGYLQPRTFLLKYNENGTITDAVDCALDPLSETKCTLKSFTVEKGIYQTSNFRVQPTESIVRFPNITNLCPFGEVFNATRFASVYAWNRKRISNCVADYSVLYNSASFSTFKCYGVSPTKLNDLCFTNVYADSFVIRGDEVRQIAPGQTGKIADYNYKLPDDFTGCVIAWNSNNLDSKVGGNYNYLYRLFRKSNLKPFERDISTEIYQAGSTPCNGVEGFNCYFPLQSYGFQPTNGVGYQPYRVVVLSFELLHAPATVCGPKKSTNLVKNKCVNFNFNGLTGTGVLTESNKKFLPFQQFGRDIADTTDAVRDPQTLEILDITPCSFGGVSVITPGTNTSNQVAVLYQGVNCTEVPVAIHADQLTPTWRVYSTGSNVFQTRAGCLIGAEHVNNSYECDIPIGAGICASYQTQTNSPRRARSVASQSIIAYTMSLGAENSVAYSNNSIAIPTNFTISVTTEILPVSMTKTSVDCTMYICGDSTECSNLLLQYGSFCTQLNRALTGIAVEQDKNTQEVFAQVKQIYKTPPIKDFGGFNFSQILPDPSKPSKRSFIEDLLFNKVTLADAGFIKQYGDCLGDIAARDLICAQKFNGLTVLPPLLTDEMIAQYTSALLAGTITSGWTFGAGAALQIPFAMQMAYRFNGIGVTQNVLYENQKLIANQFNSAIGKIQDSLSSTASALGKLQDVVNQNAQALNTLVKQLSSNFGCISSVLNDILSRLDKVEAEVQIDCLITGRLQSLQTYVTQQLIRAAEIRASANLAATKMSECVLGQSKRVDFCGKGYHLMSFPQSAPHGVVFLHVTYVPAQEKNFTTAPAICHDGKAHFPREGVFVSNGTHWFVTQRNFYEPQIITTDNTFVSGNCDVVIGVVNNTVYDPLQPELDSGGGSGGGQIYEGKLTAEGLRFGIVASRFNHALVDRLVEGAIDAIVRHGGREEDITLVRVPGSWEIPVAAGELARKEDIDAVIAIGVLIRGATPHFDYIASEVSKGLADLSLELRKPITFGVITADTLEQAIERAGTKHGNKGWEAALSAIEMANLFKSLR

SEQ ID NO: 8477 - protein, 1307 aa, Artificial Sequence
  SARS-CoV-2/Netherlands/ZuidHolland_9/2020__EPI_ISL_414445 spike protein (1-1147)(A972C_R995C) LumSynth construct
MFVFLVLLPLVSSQCVNLTTRTQLPPAYTNSFTRGVYYPDKVFRSSVLHSTQDLFLPFFSNVTWFHAIHVSGTNGTKRFDNPVLPFNDGVYFASTEKSNIIRGWIFGTTLDSKTQSLLIVNNATNVVIKVCEFQFCNDPFLGVYYHKNNKSWMESEFRVYSSANNCTFEYVSQPFLMDLEGKQGNFKNLREFVFKNIDGYFKIYSKHTPINLVRDLPQGFSALEPLVDLPIGINITRFQTLLALHRSYLTPGDSSSGWTAGAAAYYVGYLQPRTFLLKYNENGTITDAVDCALDPLSETKCTLKSFTVEKGIYQTSNFRVQPTESIVRFPNITNLCPFGEVFNATRFASVYAWNRKRISNCVADYSVLYNSASFSTFKCYGVSPTKLNDLCFTNVYADSFVIRGDEVRQIAPGQTGKIADYNYKLPDDFTGCVIAWNSNNLDSKVGGNYNYLYRLFRKSNLKPFERDISTEIYQAGSTPCNGVEGFNCYFPLQSYGFQPTNGVGYQPYRVVVLSFELLHAPATVCGPKKSTNLVKNKCVNFNFNGLTGTGVLTESNKKFLPFQQFGRDIADTTDAVRDPQTLEILDITPCSFGGVSVITPGTNTSNQVAVLYQGVNCTEVPVAIHADQLTPTWRVYSTGSNVFQTRAGCLIGAEHVNNSYECDIPIGAGICASYQTQTNSPRRARSVASQSIIAYTMSLGAENSVAYSNNSIAIPTNFTISVTTEILPVSMTKTSVDCTMYICGDSTECSNLLLQYGSFCTQLNRALTGIAVEQDKNTQEVFAQVKQIYKTPPIKDFGGFNFSQILPDPSKPSKRSFIEDLLFNKVTLADAGFIKQYGDCLGDIAARDLICVQKFNGLTVLPPLLTDEMIAQYTSALLAGTITSGWTFGAGAALQIPFAMQMAYRFNGIGVTQNVLYENQKLIANQFNSAIGKIQDSLSSTASALGKLQDVVNQNAQALNTLVKQLSSNFGCISSVLNDILSRLDKVEAEVQIDCLITGRLQSLQTYVTQQLIRAAEIRASANLAATKMSECVLGQSKRVDFCGKGYHLMSFPQSAPHGVVFLHVTYVPAQEKNFTTAPAICHDGKAHFPREGVFVSNGTHWFVTQRNFYEPQIITTDNTFVSGNCDVVIGIVNNTVYDPLQPELDSGGGSGGGQIYEGKLTAEGLRFGIVASRFNHALVDRLVEGAIDAIVRHGGREEDITLVRVPGSWEIPVAAGELARKEDIDAVIAIGVLIRGATPHFDYIASEVSKGLADLSLELRKPITFGVITADTLEQAIERAGTKHGNKGWEAALSAIEMANLFKSLR

SEQ ID NO: 8478 - protein, 1307 aa, Artificial Sequence
  SARS-CoV-2/Finland/FIN03032020A/2020__EPI_ISL_413602 spike protein (1-1147)(A972C_R995C) LumSynth construct
MFVFLVLLPLVSSQCVNLTTRTQLPPAYTNSFTRGVYYPDKVFRSSVLHSTQDLFLPFFSNVTWFHAIHVSGTNGTKRFDNPVLPFNDGVYFASTEKSNIIRGWIFGTTLDSKTQSLLIVNNATNVVIKVCEFQFCNDPFLGVYYHKNNKSWMESEFRVYSSANNCTFEYVSQPFLMDLEGKQGNFKNLREFVFKNIDGYFKIYSKHTPINLVRDLPQGFSALEPLVDLPIGINITRFQTLLALHRSYLTPGDSSSGWTAGAAAYYVGYLQPRTFLLKYNENGTITDAVDCALDPLSETKCTLKSFTVEKGIYQTSNFRVQPTESIVRFPNITNLCPFGEVFNATRFASVYAWNRKRISNCVADYSVLYNSASFSTFKCYGVSPTKLNDLCFTNVYADSFVIRGDEVRQIAPGQTGKIADYNYKLPDDFTGCVISWNSNNLDSKVGGNYNYLYRLFRKSNLKPFERDISTEIYQAGSTPCNGVEGFNCYFPLQSYGFQPTNGVGYQPYRVVVLSFELLHAPATVCGPKKSTNLVKNKCVNFNFNGLTGTGVLTESNKKFLPFQQFGRDIADTTDAVRDPQTLEILDITPCSFGGVSVITPGTNTSNQVAVLYQGVNCTEVPVAIHADQLTPTWRVYSTGSNVFQTRAGCLIGAEHVNNSYECDIPIGAGICASYQTQTNSPRRARSVASQSIIAYTMSLGAENSVAYSNNSIAIPTNFTISVTTEILPVSMTKTSVDCTMYICGDSTECSNLLLQYGSFCTQLNRALTGIAVEQDKNTQEVFAQVKQIYKTPPIKDFGGFNFSQILPDPSKPSKRSFIEDLLFNKVTLADAGFIKQYGDCLGDIAARDLICAQKFNGLTVLPPLLTDEMIAQYTSALLAGTITSGWTFGAGAALQIPFAMQMAYRFNGIGVTQNVLYENQKLIANQFNSAIGKIQDSLSSTASALGKLQDVVNQNAQALNTLVKQLSSNFGCISSVLNDILSRLDKVEAEVQIDCLITGRLQSLQTYVTQQLIRAAEIRASANLAATKMSECVLGQSKRVDFCGKGYHLMSFPQSAPHGVVFLHVTYVPAQEKNFTTAPAICHDGKAHFPREGVFVSNGTHWFVTQRNFYEPQIITTDNTFVSGNCDVVIGIVNNTVYDPLQPELDSGGGSGGGQIYEGKLTAEGLRFGIVASRFNHALVDRLVEGAIDAIVRHGGREEDITLVRVPGSWEIPVAAGELARKEDIDAVIAIGVLIRGATPHFDYIASEVSKGLADLSLELRKPITFGVITADTLEQAIERAGTKHGNKGWEAALSAIEMANLFKSLR

SEQ ID NO: 8479 - protein, 1307 aa, Artificial Sequence
  SARS-CoV-2/France/GE1977/2020__EPI_ISL_414632 spike protein (1-1147)(A972C_R995C) LumSynth construct
MFVFLVLLPLVSSQCVNLTTRTQLPPAYTNSFTRGVYYPDKVFRSSVLHSTQDLFLPFFSNVTWFHAIHVSGTNGTKRFDNPVLPFNDGVYFASTEKSNIIRGWIFGTTLDSKTQSLLIVNNATNVVIKVCEFQFCNDPFLGVYYHKNNKSWMESEFRVYSSANNCTFEYVSQPFLMDLEGKQGNFKNLREFVFKNIDGYFKIYSKHTPINLVRDLPQGFSALEPLVDLPIGINITRFQTLLALHRSYLTPGDSSSGWTAGAAAYYVGYLQPRTFLLKYNENGTITDAVDCALDPLSETKCTLKSFTVEKGIYQTSNFRVQPTESIVRFPNITNLCPFGEVFNATRFASVYAWNRKRISNCVADYSVLYNSASFSTFKCYGVSPTKLNDLCFTNVYADSFVIRGDEVRQIAPGQTGKIADYNYKLPDDFTGCVIAWNSNNLDSKVGGNYNYLYRLFRKSNLKPFERDISTEIYQAGSTPCNGVEGFNCYFPLQSYGFQPTNGVGYQPYRVVVLSFELLHAPATVCGPKKSTNLVKNKCVNFNFNGLTGTGVLTESNKKFLPFQQFGRDIADTTDAVRDPQTLEILDITPCSFGGVSVITPGTNTSNQVAVLYQGVNCTEVPVAIHADQLTPTWRVYSTGSNVFQTRAGCLIGAEHVNNSYECDIPIGAGICASYQTQTNSPRRARSVASQSIIAYTMSLGAENSVAYSNNSIAIPTNFTISVTTEILPVSMTKTSVDCTMYICGDSTECSNLLLQYGSFCTQLNRALTGIAVEQDKNTQEVFAQVKQIYKTPPIKDFGGFNFSQILPDPSKPSKRSFIEDLLFNKVTLADAGFIKQYGDCLGDIAARDLICAQKFNGLTVLPPLLTDEMIAQYTSALLAGTITSGWTFGAGAALQIPFAMQMAYRFNGIGVTQNVLYENQKLIANQFNSAIGKIQDSLFSTASALGKLQDVVNQNAQALNTLVKQLSSNFGCISSVLNDILSRLDKVEAEVQIDCLITGRLQSLQTYVTQQLIRAAEIRASANLAATKMSECVLGQSKRVDFCGKGYHLMSFPQSAPHGVVFLHVTYVPAQEKNFTTAPAICHDGKAHFPREGVFVSNGTHWFVTQRNFYEPQIITTDNTFVSGNCDVVIGIVNNTVYDPLQPELDSGGGSGGGQIYEGKLTAEGLRFGIVASRFNHALVDRLVEGAIDAIVRHGGREEDITLVRVPGSWEIPVAAGELARKEDIDAVIAIGVLIRGATPHFDYIASEVSKGLADLSLELRKPITFGVITADTLEQAIERAGTKHGNKGWEAALSAIEMANLFKSLR

SEQ ID NO: 8480 - protein, 1307 aa, Artificial Sequence
  SARS-CoV-2/Finland/FIN-313/2020__EPI_ISL_414641 spike protein (1-1147)(A972C_R995C) LumSynth construct
MFVFLVLLPLVSSQCVNLTTRTQLPPAYTNSFTRGVYYPDKVFRSSVLHSTQDLFLPFFSNVTWFHAIHVSGTNGTKRFDNPVLPFNDGVYFASTEKSNIIRGWIFGTTLDSKTQSLLIVNNATNVVIKVCEFQFCNDPFLGVYYHKNNKSWMESEFRVYSSANNCTFEYVSQPFLMDLEGKQGNFKNLREFVFKNIDGYFKIYSKHTPINLVRDLPQGFSALEPLVDLPIGINITRFKTLLALHRSYLTPGDSSSGWTAGAAAYYVGYLQPRTFLLKYNENGTITDAVDCALDPLSETKCTLKSFTVEKGIYQTSNFRVQPTESIVRFPNITNLCPFGEVFNATRFASVYAWNRKRISNCVADYSVLYNSASFSTFKCYGVSPTKLNDLCFTNVYADSFVIRGDEVRQIAPGQTGKIADYNYKLPDDFTGCVIAWNSNNLDSKVGGNYNYLYRLFRKSNLKPFERDISTEIYQAGSTPCNGVEGFNCYFPLQSYGFQPTNGVGYQPYRVVVLSFELLHAPATVCGPKKSTNLVKNKCVNFNFNGLTGTGVLTESNKKFLPFQQFGRDIADTTDAVRDPQTLEILDITPCSFGGVSVITPGTNTSNQVAVLYQGVNCTEVPVAIHADQLTPTWRVYSTGSNVFQTRAGCLIGAEHVNNSYECDIPIGAGICASYQTQTNSPRRARSVASQSIIAYTMSLGAENSVAYSNNSIAIPTNFTISVTTEILPVSMTKTSVDCTMYICGDSTECSNLLLQYGSFCTQLNRALTGIAVEQDKNTQEVFAQVKQIYKTPPIKDFGGFNFSQILPDPSKPSKRSFIEDLLFNKVTLADAGFIKQYGDCLGDIAARDLICAQKFNGLTVLPPLLTDEMIAQYTSALLAGTITSGWTFGAGAALQIPFAMQMAYRFNGIGVTQNVLYENQKLIANQFNSAIGKIQDSLSSTASALGKLQDVVNQNAQALNTLVKQLSSNFGCISSVLNDILSRLDKVEAEVQIDCLITGRLQSLQTYVTQQLIRAAEIRASANLAATKMSECVLGQSKRVDFCGKGYHLMSFPQSAPHGVVFLHVTYVPAQEKNFTTAPAICHDGKAHFPREGVFVSNGTHWFVTQRNFYEPQIITTDNTFVSGNCDVVIGIVNNTVYDPLQPELDSGGGSGGGQIYEGKLTAEGLRFGIVASRFNHALVDRLVEGAIDAIVRHGGREEDITLVRVPGSWEIPVAAGELARKEDIDAVIAIGVLIRGATPHFDYIASEVSKGLADLSLELRKPITFGVITADTLEQAIERAGTKHGNKGWEAALSAIEMANLFKSLR

SEQ ID NO: 8481 - protein, 1307 aa, Artificial Sequence
  SARS-CoV-2/Netherlands/ZuidHolland_2/2020__EPI_ISL_414556 spike protein (1-1147)(A972C_R995C) LumSynth construct
MFVFLVLLPLVSSQCVNLTTRTQLPPAYTNSFTRGVYYPDKVFRSSVLHSTQDLFLPFFSNVTWFHAIHVSGTNGTKRFDNPVLPFNDGVYFASTEKSNIIRGWIFGTTLDSKTQSLLIVNNATNVVIKVCEFQFCNDPFLGVYYHKNNKSWMESEFRVYSSANNCTFEYVSQPFLMDLEGKQGNFKNLREFVFKNIDGYFKIYSKHTPINLVRDLPQGFSALEPLVDLPIGINITRFQTLLALHRSYLTPGDSSSGWTAGAAAYYVGYLQPRTFLLKYNENGTITDAVDCALDPLSETKCTLKSFTVEKGIYQTSNFRVQPTESIVRFPNITNLCPFGEVFNATRFASVYAWNRKRISNCVADYSVLYNSASFSTFKCYGVSPTKLNDLCFTNVYADSFVIRGDEVRQIAPGQTGKIADYNYKLPDDFTGCVIAWNSNNLDSKVGGNYNYLYRLFRKSNLKPFERDISTEIYQAGSTPCNGVEGFNCYFPLQSYGFQPTNGVGYQPYRVVVLSFELLHAPATVCGPKKSTNLVKNKCVNFNFNGLTGTGVLTESNKKFLPFQQFGRDIADTTDAVRDPQTLEILDITPCSFGGVSVITPGTNTSNQVAVLYQGVNCTEVPVAIHADQLTPTWRVYSTGSNVFQTRAGCLIGAEHVNNSYECDIPIGAGICASYQTQTNSPRRARSVASQSIIAYTMSLGAENSVAYSNNSIAIPTNFTISVTTEILPVSMTKTSVDCTMYICGDSTECSNLLLQYGSFCTQLNRALTGIALEQDKNTQEVFAQVKQIYKTPPIKDFGGFNFSQILPDPSKPSKRSFIEDLLFNKVTLADAGFIKQYGDCLGDIAARDLICAQKFNGLTVLPPLLTDEMIAQYTSALLAGTITSGWTFGAGAALQIPFAMQMAYRFNGIGVTQNVLYENQKLIANQFNSAIGKIQDSLSSTASALGKLQDVVNQNAQALNTLVKQLSSNFGCISSVLNDILSRLDKVEAEVQIDCLITGRLQSLQTYVTQQLIRAAEIRASANLAATKMSECVLGQSKRVDFCGKGYHLMSFPQSAPHGVVFLHVTYVPAQEKNFTTAPAICHDGKAHFPREGVFVSNGTHWFVTQRNFYEPQIITTDNTFVSGNCDVVIGIVNNTVYDPLQPELDSGGGSGGGQIYEGKLTAEGLRFGIVASRFNHALVDRLVEGAIDAIVRHGGREEDITLVRVPGSWEIPVAAGELARKEDIDAVIAIGVLIRGATPHFDYIASEVSKGLADLSLELRKPITFGVITADTLEQAIERAGTKHGNKGWEAALSAIEMANLFKSLR

SEQ ID NO: 8482 - protein, 1307 aa, Artificial Sequence
  SARS-CoV-2/USA/WA-UW31/2020__EPI_ISL_414618 spike protein (1-1147)(A972C_R995C) LumSynth construct
MFVFLVLLPLVSSQCVNLTTRTQLPPAYTNSFTRGVYYPDKVFRSSVLHSTQDLFLPFFSNVTWFHAIHVSGTNGTKRFDNPVLPFNDGVYFASTEKSNIIRGWIFGTTLDSKTQSLLIVNNATNVVIKVCEFQFCNDPFLGVYYHKNNKSWMESEFRVYSSANNCTFEYVSQPFLMDLEGKQGNFKNLREFVFKNIDGYFKIYSKHTPINLVRDLPQGFSALEPLVDLPIGINITRFQTLLALHRSYLTPGDSSSGWTAGAAAYYVGYLQPRTFLLKYNENGTITDAVDCALDPLSETKCTLKSFTVEKGIYQTSNFRVQPTESIVRFPNITNLCPFGEVFNATRFASVYAWNRKRISNCVADYSVLYNSASFSTFKCYGVSPTKLNDLCFTNVYADSFVIRGDEVRQIAPGQTGKIADYNYKLPDDFTGCVIAWNSNNLDSKVGGNYNYLYRLFRKSNLKPFERDISTEIYQAGSTPCNGAEGFNCYFPLQSYGFQPTNGVGYQPYRVVVLSFELLHAPATVCGPKKSTNLVKNKCVNFNFNGLTGTGVLTESNKKFLPFQQFGRDIADTTDAVRDPQTLEILDITPCSFGGVSVITPGTNTSNQVAVLYQDVNCTEVPVAIHADQLTPTWRVYSTGSNVFQTRAGCLIGAEHVNNSYECDIPIGAGICASYQTQTNSPRRARSVASQSIIAYTMSLGAENSVAYSNNSIAIPTNFTISVTTEILPVSMTKTSVDCTMYICGDSTECSNLLLQYGSFCTQLNRALTGIAVEQDKNTQEVFAQVKQIYKTPPIKDFGGFNFSQILPDPSKPSKRSFIEDLLFNKVTLADAGFIKQYGDCLGDIAARDLICAQKFNGLTVLPPLLTDEMIAQYTSALLAGTITSGWTFGAGAALQIPFAMQMAYRFNGIGVTQNVLYENQKLIANQFNSAIGKIQDSLSSTASALGKLQDVVNQNAQALNTLVKQLSSNFGCISSVLNDILSRLDKVEAEVQIDCLITGRLQSLQTYVTQQLIRAAEIRASANLAATKMSECVLGQSKRVDFCGKGYHLMSFPQSAPHGVVFLHVTYVPAQEKNFTTAPAICHDGKAHFPREGVFVSNGTHWFVTQRNFYEPQIITTDNTFVSGNCDVVIGIVNNTVYDPLQPELDSGGGSGGGQIYEGKLTAEGLRFGIVASRFNHALVDRLVEGAIDAIVRHGGREEDITLVRVPGSWEIPVAAGELARKEDIDAVIAIGVLIRGATPHFDYIASEVSKGLADLSLELRKPITFGVITADTLEQAIERAGTKHGNKGWEAALSAIEMANLFKSLR

SEQ ID NO: 8483 - protein, 1307 aa, Artificial Sequence
  SARS-CoV-2/South Korea/SNU01/2020__EPI_ISL_411929 spike protein (1-1147)(A972C_R995C) LumSynth construct
MFVFLVLLPLVSSQCVNLTTRTQLPPAYTNSFTRGVYYPDKVFRSSVLHSTQDLFLPFFSNVTWFHAIHVSGTNGTKRFDNPVLPFNDGVYFASTEKSNIIRGWIFGTTLDSKTQSLLIVNNATNVVIKVCEFQFCNDPFLGVYYHKNNKSWMESEFRVYSSANNCTFEYVSQPFLMDLEGKQGNFKNLREFVFKNIDGYFKIYSKHTPINLVRDLPQGFWALEPLVDLPIGINITRFQTLLALHRSYLTPGDSSSGWTAGAAAYYVGYLQPRTFLLKYNENGTITDAVDCALDPLSETKCTLKSFTVEKGIYQTSNFRVQPTESIVRFPNITNLCPFGEVFNATRFASVYAWNRKRISNCVADYSVLYNSASFSTFKCYGVSPTKLNDLCFTNVYADSFVIRGDEVRQIAPGQTGKIADYNYKLPDDFTGCVIAWNSNNLDSKVGGNYNYLYRLFRKSNLKPFERDISTEIYQAGSTPCNGVEGFNCYFPLQSYGFQPTNGVGYQPYRVVVLSFELLHAPATVCGPKKSTNLVKNKCVNFNFNGLTGTGVLTESNKKFLPFQQFGRDIADTTDAVRDPQTLEILDITPCSFGGVSVITPGTNTSNQVAVLYQDVNCTEVPVAIHADQLTPTWRVYSTGSNVFQTRAGCLIGAEHVNNSYECDIPIGAGICASYQTQTNSPRRARSVASQSIIAYTMSLGAENSVAYSNNSIAIPTNFTISVTTEILPVSMTKTSVDCTMYICGDSTECSNLLLQYGSFCTQLNRALTGIAVEQDKNTQEVFAQVKQIYKTPPIKDFGGFNFSQILPDPSKPSKRSFIEDLLFNKVTLADAGFIKQYGDCLGDIAARDLICAQKFNGLTVLPPLLTDEMIAQYTSALLAGTITSGWTFGAGAALQIPFAMQMAYRFNGIGVTQNVLYENQKLIANQFNSAIGKIQDSLSSTASALGKLQDVVNQNAQALNTLVKQLSSNFGCISSVLNDILSRLDKVEAEVQIDCLITGRLQSLQTYVTQQLIRAAEIRASANLAATKMSECVLGQSKRVDFCGKGYHLMSFPQSAPHGVVFLHVTYVPAQEKNFTTAPAICHDGKAHFPREGVFVSNGTHWFVTQRNFYEPQIITTDNTFVSGNCDVVIGIVNNTVYDPLQPELDSGGGSGGGQIYEGKLTAEGLRFGIVASRFNHALVDRLVEGAIDAIVRHGGREEDITLVRVPGSWEIPVAAGELARKEDIDAVIAIGVLIRGATPHFDYIASEVSKGLADLSLELRKPITFGVITADTLEQAIERAGTKHGNKGWEAALSAIEMANLFKSLR

SEQ ID NO: 8484 - protein, 1307 aa, Artificial Sequence
  SARS-CoV-2/China/WF0004/2020__EPI_ISL_413694 spike protein (1-1147)(A972C_R995C) LumSynth construct
MFVFLVLLPLVSSQCVNLTTRTQLPPAYTNSFTRGVYYPDKVFRSSVLHSTQDLFLPFFSNVTWFHAIHVSGTNGTKRFDNPVLPFNDGVYFASTEKSNIIRGWIFGTTLDSKTQSLLIVNNATNVVIKVCEFQFCNDPFLGVYYHKNNKSWTESEFRVYSSANNCTFEYVSQPFLMDLEGKQGNFKNLREFVFKNIDGYFKIYSKHTPINLVRDLPQGFSALEPLVDLPIGINITRFQTLLALHRSYLTPGDSSSGWTAGAAAYYVGYLQPRTFLLKYNENGTITDAVDCALDPLSETKCTLKSFTVEKGIYQTSNFRVQPTESIVRFPNITNLCPFGEVFNATRFASVYAWNRKRISNCVADYSVLYNSASFSTFKCYGVSPTKLNDLCFTNVYADSFVIRGDEVRQIAPGQTGKIADYNYKLPDDFTGCVIAWNSNNLDSKVGGNYNYLYRLFRKSNLKPFERDISTEIYQAGSTPCNGVEGFNCYFPLQSYGFQPTNGVGYQPYRVVVLSFELLHAPATVCGPKKSTNLVKNKCVNFNFNGLTGTGVLTESNKKFLPFQQFGRDIADTTDAVRDPQTLEILDITPCSFGGVSVITPGTNTSNQVAVLYQDVNCTEVPVAIHADQLTPTWRVYSTGSNVFQTRAGCLIGAEHVNNSYECDIPIGAGICASYQTQTNSPRRARSVASQSIIAYTMSLGAENSVAYSNNSIAIPTNFTISVTTEILPVSMTKTSVDCTMYICGDSTECSNLLLQYGSFCTQLNRALTGIAVEQDKNTQEVFAQVKQIYKTPPIKDFGGFNFSQILPDPSKPSKRSFIEDLLFNKVTLADAGFIKQYGDCLGDIAARDLICAQKFNGLTVLPPLLTDEMIAQYTSALLAGTITSGWTFGAGAALQIPFAMQMAYRFNGIGVTQNVLYENQKLIANQFNSAIGKIQDSLSSTASALGKLQDVVNQNAQALNTLVKQLSSNFGCISSVLNDILSRLDKVEAEVQIDCLITGRLQSLQTYVTQQLIRAAEIRASANLAATKMSECVLGQSKRFDFCGKGYHLMSFPQSAPHGVVFLHVTYVPAQEKNFTTAPAICHDGKAHFPREGVFVSNGTHWFVTQRNFYEPQIITTDNTFVSGNCDVVIGIVNNTVYDPLQPELDSGGGSGGGQIYEGKLTAEGLRFGIVASRFNHALVDRLVEGAIDAIVRHGGREEDITLVRVPGSWEIPVAAGELARKEDIDAVIAIGVLIRGATPHFDYIASEVSKGLADLSLELRKPITFGVITADTLEQAIERAGTKHGNKGWEAALSAIEMANLFKSLR

SEQ ID NO: 8485 - protein, 1307 aa, Artificial Sequence
  SARS-CoV-2/China/WF0028/2020__EPI_ISL_413791 spike protein (1-1147)(A972C_R995C) LumSynth construct
MFVFLVLLPLVSSQCVNLTTRTQLPPAYTNSFTRGVYYPDKVFRSSVLHSTQDLFLPFFSNVTWFHAIHVSGTNGTKRFDNPVLPFNDGVYFASTEKSNIIRGWIFGTTLDSKTQSLLIVNNATNVVIKVCEFQFCNDPFLGVYYHKNNKSWMESEFRVYSSANNCTFEYVSQPFLMDLEGKQGNFKNLREFVFKNIDGYFKIYSKHTPINLVRDLPQGFSALEPLVDLPIGINITRFQTLLALHRSYLTPGDSSSGWTAGAAAYYVGYLQPRTFLLKYNENGTITDAVDCALDPLSETKCTLKSFTVEKGIYQTSNFRVQPTESIVRFPNITNLCPFGEVFNATRFASVYAWNRKRISNCVADYSVLYNSASFSTFKCYGVSPTKLNDLCFTNVYADSFVIRGDEVRQIAPGQTGKIADYNYKLPDDFTGCVIAWNSNNLDSKVGGNYNYLYRLFRKSNLKPFERDISTEIYQAGSTPCNGVEGFNCYFPLQSYGFQPTNGVGYQPYRVVVLSFELLHAPATVCGPKKSTNLVKNKCVNFNFNGLTGTGVLTESNKKFLPFQQFGRDIADTTDAVRDPQTLEILDITPCSFGGVSVITPGTNTSNQVAVLYQDVNCTEVPVAIHADQLTPTWRVYSTGSNVFQTRAGCLIGAEHVNNSYECDIPIGAGICASYQTQTNSPRRARSVASQSIIAYTMSLGAENSVAYSNNSIAIPTNFTISVTTEILPVSMTKTSVDCTMYICGDSTECSNLLLQYGSFCTQLNRALTGIAVEQDKNTQEVFAQVKQIYKTPPIKDFGGFNFSQILPDPSKPSKRSFIEDLLFNKVTLADAGFIKQYGDCLGDIAARDLICAQKFNGLTVLPPLLTDEMIAQYTSALLAGTITSGWTFGAGAALQIPFAMQMAYRFNGIGVTQNVLYENQKLIANQFNSAIGKIQDSLSSTASALGKLQDVVNQNAQALNTLVKQLSSNFGCISSVLNDILSRLDKVEAEVQIDCLITGRLQSLQTYVTQQLIRAAEIRASANLAATKMSECVLGQSKRVDFCGKGYHLMSFPQSAPHGVVFLHVTYVPAQEKNFTTAPAICHDGKAHFPREGVFVSNGTHWFVTQRNFYEPQIITTDNTFVSGNCDVVIGIVNNTVYDPLQPELESGGGSGGGQIYEGKLTAEGLRFGIVASRFNHALVDRLVEGAIDAIVRHGGREEDITLVRVPGSWEIPVAAGELARKEDIDAVIAIGVLIRGATPHFDYIASEVSKGLADLSLELRKPITFGVITADTLEQAIERAGTKHGNKGWEAALSAIEMANLFKSLR

SEQ ID NO: 8486 - protein, 1307 aa, Artificial Sequence
  SARS-CoV-2/2019-nCoV/USA-CruiseA-18/2020__MT159716.1 spike protein (1-1147)(A972C_R995C) LumSynth construct
MFVFLVLLPLVSSQCVNLTTRTQLPPAYTNSFTRGVYYPDKVFRSSVLHSTQDLFLPFFSNVTWFHAIHVSGTNGTKRFDNPVLPFNDGVYFASTEKSNIIRGWIFGTTLDSKTQSLLIVNNATNVVIKVCEFQFCNDPFLGVYYHKNNKSWMESELRVYSSANNCTFEYVSQPFLMDLEGKQGNFKNLREFVFKNIDGYFKIYSKHTPINLVRDLPQGFSALEPLVDLPIGINITRFQTLLALHRSYLTPGDSSSGWTAGAAAYYVGYLQPRTFLLKYNENGTITDAVDCALDPLSETKCTLKSFTVEKGIYQTSNFRVQPTESIVRFPNITNLCPFGEVFNATRFASVYAWNRKRISNCVADYSVLYNSASFSTFKCYGVSPTKLNDLCFTNVYADSFVIRGDEVRQIAPGQTGKIADYNYKLPDDFTGCVIAWNSNNLDSKVGGNYNYLYRLFRKSNLKPFERDISTEIYQAGSTPCNGVEGFNCYFPLQSYGFQPTNGVGYQPYRVVVLSFELLHAPATVCGPKKSTNLVKNKCVNFNFNGLTGTGVLTESNKKFLPFQQFGRDIADTTDAVRDPQTLEILDITPCSFGGVSVITPGTNTSNQVAVLYQDVNCTEVPVAIHADQLTPTWRVYSTGSNVFQTRAGCLIGAEHVNNSYECDIPIGAGICASYQTQTNSPRRARSVASQSIIAYTMSLGAENSVAYSNNSIAIPTNFTISVTTEILPVSMTKTSVDCTMYICGDSTECSNLLLQYGSFCTQLNRALTGIAVEQDKNTQEVFAQVKQIYKTPPIKDFGGFNFSQILPDPSKPSKRSFIEDLLFNKVTLADAGFIKQYGDCLGDIAARDLICAQKFNGLTVLPPLLTDEMIAQYTSALLAGTITSGWTFGAGAALQIPFAMQMAYRFNGIGVTQNVLYENQKLIANQFNSAIGKIQDSLSSTASALGKLQDVVNQNAQALNTLVKQLSSNFGCISSVLNDILSRLDKVEAEVQIDCLITGRLQSLQTYVTQQLIRAAEIRASANLAATKMSECVLGQSKRVDFCGKGYHLMSFPQSAPHGVVFLHVTYVPAQEKNFTTAPAICHDGKAHFPREGVFVSNGTHWFVTQRNFYEPQIITTDNTFVSGNCDVVIGIVNNTVYDPLQPELDSGGGSGGGQIYEGKLTAEGLRFGIVASRFNHALVDRLVEGAIDAIVRHGGREEDITLVRVPGSWEIPVAAGELARKEDIDAVIAIGVLIRGATPHFDYIASEVSKGLADLSLELRKPITFGVITADTLEQAIERAGTKHGNKGWEAALSAIEMANLFKSLR

SEQ ID NO: 8487 - protein, 1307 aa, Artificial Sequence
  SARS-CoV-2/SARS-CoV-2/Yunnan-01/human/2020/CHN__MT049951.1 spike protein (1-1147)(A972C_R995C) LumSynth construct
MFVFLVLLPLVSSQCVNLTTRTQLPPANTNSFTRGVYYPDKVFRSSVLHSTQDLFLPFFSNVTWFHAIHVSGTNGTKRFDNPVLPFNDGVYFASTEKSNIIRGWIFGTTLDSKTQSLLIVNNATNVVIKVCEFQFCNDPFLGVYYHKNNKSWMESEFRVYSSANNCTFEYVSQPFLMDLEGKQGNFKNLREFVFKNIDGYFKIYSKHTPINLVRDLPQGFSALEPLVDLPIGINITRFQTLLALHRSYLTPGDSSSGWTAGAAAYYVGYLQPRTFLLKYNENGTITDAVDCALDPLSETKCTLKSFTVEKGIYQTSNFRVQPTESIVRFPNITNLCPFGEVFNATRFASVYAWNRKRISNCVADYSVLYNSASFSTFKCYGVSPTKLNDLCFTNVYADSFVIRGDEVRQIAPGQTGKIADYNYKLPDDFTGCVIAWNSNNLDSKVGGNYNYLYRLFRKSNLKPFERDISTEIYQAGSTPCNGVEGFNCYFPLQSYGFQPTNGVGYQPYRVVVLSFELLHAPATVCGPKKSTNLVKNKCVNFNFNGLTGTGVLTESNKKFLPFQQFGRDIADTTDAVRDPQTLEILDITPCSFGGVSVITPGTNTSNQVAVLYQDVNCTEVPVAIHADQLTPTWRVYSTGSNVFQTRAGCLIGAEHVNNSYECDIPIGAGICASYQTQTNSPRRARSVASQSIIAYTMSLGAENSVAYSNNSIAIPTNFTISVTTEILPVSMTKTSVDCTMYICGDSTECSNLLLQYGSFCTQLNRALTGIAVEQDKNTQEVFAQVKQIYKTPPIKDFGGFNFSQILPDPSKPSKRSFIEDLLFNKVTLADAGFIKQYGDCLGDIAARDLICAQKFNGLTVLPPLLTDEMIAQYTSALLAGTITSGWTFGAGAALQIPFAMQMAYRFNGIGVTQNVLYENQKLIANQFNSAIGKIQDSLSSTASALGKLQDVVNQNAQALNTLVKQLSSNFGCISSVLNDILSRLDKVEAEVQIDCLITGRLQSLQTYVTQQLIRAAEIRASANLAATKMSECVLGQSKRVDFCGKGYHLMSFPQSAPHGVVFLHVTYVPAQEKNFTTAPAICHDGKAHFPREGVFVSNGTHWFVTQRNFYEPQIITTDNTFVSGNCDVVIGIVNNTVYDPLQPELDSGGGSGGGQIYEGKLTAEGLRFGIVASRFNHALVDRLVEGAIDAIVRHGGREEDITLVRVPGSWEIPVAAGELARKEDIDAVIAIGVLIRGATPHFDYIASEVSKGLADLSLELRKPITFGVITADTLEQAIERAGTKHGNKGWEAALSAIEMANLFKSLR

SEQ ID NO: 8488 - protein, 1307 aa, Artificial Sequence
  SARS-CoV-2/USA/WA-UW292/2020__EPI_ISL_418077 spike protein (1-1147)(A972C_R995C) LumSynth construct
MFVFLVLLPLVSSQCVNLTTRTQLPPAYTNSFTRGVYYPDKVFRSSVLHSTQDLFLPFFSNVTWFHAIHVSGTNGTKRFDNPVLPFNDGVYFASTEKSNIIRGWIFGTTLDSKTQSLLIVNNATNVVIKVCEFQFCNDPFLGVYYHKNNKSWMESEFRVYSSANNCTFEYVSQPFLMDLEGKQGNFKNLREFVFKNIDGYFKIYSKHTPINLVRDLPQGFSALEPLVDLPIGINITRFQTLLALHRSYLTPGDSSSGWTAGAAAYYVGYLQPRTFLLKYNENGTITDAVDCALDPLSETKCTLKSFTVEKGIYQTSNFRVQPTESIVRFPNITNLCPFGEVFNATRFASVYAWNRKRISNCVADYSVLYNSASFSTFKCYGVSPTKLNDLCFTNVYADSFVIRGDEVRQIAPGQTGKIADYNYKLPDDFTGCVIAWNSNNLDSKVGGNYNYLYRLFRKSNLKPFERDISTEIYQASSTPCNGVEGFNCYFPLQSYGFQPTNGVGYQPYRVVVLSFELLHAPATVCGPKKSTNLVKNKCVNFNFNGLTGTGVLTESNKKFLPFQQFGRDIADTTDAVRDPQTLEILDITPCSFGGVSVITPGTNTSNQVAVLYQDVNCTEVPVAIHADQLTPTWRVYSTGSNVFQTRAGCLIGAEHVNNSYECDIPIGAGICASYQTQTNSPRRARSVASQSIIAYTMSLGAENSVAYSNNSIAIPTNFTISVTTEILPVSMTKTSVDCTMYICGDSTECSNLLLQYGSFCTQLNRALTGIAVEQDKNTQEVFAQVKQIYKTPPIKDFGGFNFSQILPDPSKPSKRSFIEDLLFNKVTLADAGFIKQYGDCLGDIAARDLICAQKFNGLTVLPPLLTDEMIAQYTSALLAGTITSGWTFGAGAALQIPFAMQMAYRFNGIGVTQNVLYENQKLIANQFNSAIGKIQDSLSSTASALGKLQDVVNQNAQALNTLVKQLSSNFGCISSVLNDILSRLDKVEAEVQIDCLITGRLQSLQTYVTQQLIRAAEIRASANLAATKMSECVLGQSKRVDFCGKGYHLMSFPQSAPHGVVFLHVTYVPAQEKNFTTAPAICHDGKAHFPREGVFVSNGTHWFVTQRNFYEPQIITTDNTFVSGNCDVVIGIVNNTVYDPLQPELDSGGGSGGGQIYEGKLTAEGLRFGIVASRFNHALVDRLVEGAIDAIVRHGGREEDITLVRVPGSWEIPVAAGELARKEDIDAVIAIGVLIRGATPHFDYIASEVSKGLADLSLELRKPITFGVITADTLEQAIERAGTKHGNKGWEAALSAIEMANLFKSLR

SEQ ID NO: 8489 - protein, 1307 aa, Artificial Sequence
  SARS-CoV-2/Iceland/192/2020__EPI_ISL_417819 spike protein (1-1147)(A972C_R995C) LumSynth construct
MFVFFVLLPLVSSQCVNLTTRTQLPPAYTNSFTRGVYYPDKVFRSSVLHSTQDLFLPFFSNVTWFHAIHVSGTNGTKRFDNPVLPFNDGVYFASTEKSNIIRGWIFGTTLDSKTQSLLIVNNATNVVIKVCEFQFCNDPFLGVYYHKNNKSWMESEFRVYSSANNCTFEYVSQPFLMDLEGKQGNFKNLREFVFKNIDGYFKIYSKHTPINLVRDLPQGFSALEPLVDLPIGINITRFQTLLALHRSYLTPGDSSSGWTAGAAAYYVGYLQPRTFLLKYNENGTITDAVDCALDPLSETKCTLKSFTVEKGIYQTSNFRVQPTESIVRFPNITNLCPFGEVFNATRFASVYAWNRKRISNCVADYSVLYNSASFSTFKCYGVSPTKLNDLCFTNVYADSFVIRGDEVRQIAPGQTGKIADYNYKLPDDFTGCVIAWNSNNLDSKVGGNYNYLYRLFRKSNLKPFERDISTEIYQAGSTPCNGVEGFNCYFPLQSYGFQPTNGVGYQPYRVVVLSFELLHAPATVCGPKKSTNLVKNKCVNFNFNGLTGTGVLTESNKKFLPFQQFGRDIADTTDAVRDPQTLEILDITPCSFGGVSVITPGTNTSNQVAVLYQGVNCTEVPVAIHADQLTPTWRVYSTGSNVFQTRAGCLIGAEHVNNSYECDIPIGAGICASYQTQTNSPRRARSVASQSIIAYTMSLGAENSVAYSNNSIAIPTNFTISVTTEILPVSMTKTSVDCTMYICGDSTECSNLLLQYGSFCTQLNRALTGIAVEQDKNTQEVFAQVKQIYKTPPIKDFGGFNFSQILPDPSKPSKRSFIEDLLFNKVTLADAGFIKQYGDCLGDIAARDLICAQKFNGLTVLPPLLTDEMIAQYTSALLAGTITSGWTFGAGAALQIPFAMQMAYRFNGIGVTQNVLYENQKLIANQFNSAIGKIQDSLSSTASALGKLQDVVNQNAQALNTLVKQLSSNFGCISSVLNDILSRLDKVEAEVQIDCLITGRLQSLQTYVTQQLIRAAEIRASANLAATKMSECVLGQSKRVDFCGKGYHLMSFPQSAPHGVVFLHVTYVPAQEKNFTTAPAICHDGKAHFPREGVFVSNGTHWFVTQRNFYEPQIITTDNTFVSGNCDVVIGIVNNTVYDPLQPELDSGGGSGGGQIYEGKLTAEGLRFGIVASRFNHALVDRLVEGAIDAIVRHGGREEDITLVRVPGSWEIPVAAGELARKEDIDAVIAIGVLIRGATPHFDYIASEVSKGLADLSLELRKPITFGVITADTLEQAIERAGTKHGNKGWEAALSAIEMANLFKSLR

SEQ ID NO: 8490 - protein, 1307 aa, Artificial Sequence
  SARS-CoV-2/Belgium/ULG-6939/2020__EPI_ISL_417020 spike protein (1-1147)(A972C_R995C) LumSynth construct
MFVFLVLLPLVSSQCVNLTTRTQLPPAYTNSFTRGVYYPDKVFRSSVLHSTQDLFLPFFSNVTWFHAIHVSGTNGTKRFDNPVLPFNDGVYFASTEKSNIIRGWIFGTTLDSKTQSLLIVNNATNVVIKVCEFQFCNDPFLGVYYHKNNKSWMESEFRVYSSANNCTFEYVSQPFLMDLEGKQGNFKNLREFVFKNIDGYFKIYSKHTPINLVRDLPQGFSALEPLVDLPIGINITRFQTLLALHRSYLTPGDSSSGWTAGAAAYYVGYLQPRTFLLKYNENGTITDAVDCALDPLSETKCTLKSFTVEKGIYQTSNFRVQPTESIVRFPNITNLCPFGEVFNATRFASVYAWNRKRISNCVADYSVLYNSASFSTFKCYGVSPTKLNDLCFTNVYADSFVIRGDEVRQIAPGQTGKIADYNYKLPDDFTGCVIAWNSNNLDSKVGGNYNYLYRLFRKSNLKPFERDISTEIYQAGSTPCNGVEGFNCYFPLQSYGFQPTNGVGYQPYRVVVLSFELLHAPATVCGPKKSTNLVKNKCVNFNFNGLTGTGVLTESNKKFLPFQQFGRDIADTTDAVRDPQTLEILDITPCSFGGVSVITPGTNTSNQVAVLYQGVNCTEVPVAIHADQLTPTWRVYSTGSNVFQTRAGCLIGAEHVNNSYECDIPIGAGICASYQTQTNSPRRARSVASQSIIAYTMSLGAENSVVYSNNSIAIPTNFTISVTTEILPVSMTKTSVDCTMYICGDSTECSNLLLQYGSFCTQLNRALTGIAVEQDKNTQEVFAQVKQIYKTPPIKDFGGFNFSQILPDPSKPSKRSFIEDLLFNKVTLADAGFIKQYGDCLGDIAARDLICAQKFNGLTVLPPLLTDEMIAQYTSALLAGTITSGWTFGAGAALQIPFAMQMAYRFNGIGVTQNVLYENQKLIANQFNSAIGKIQDSLSSTASALGKLQDVVNQNAQALNTLVKQLSSNFGCISSVLNDILSRLDKVEAEVQIDCLITGRLQSLQTYVTQQLIRAAEIRASANLAATKMSECVLGQSKRVDFCGKGYHLMSFPQSAPHGVVFLHVTYVPAQEKNFTTAPAICHDGKAHFPREGVFVSNGTHWFVTQRNFYEPQIITTDNTFVSGNCDVVIGIVNNTVYDPLQPELDSGGGSGGGQIYEGKLTAEGLRFGIVASRFNHALVDRLVEGAIDAIVRHGGREEDITLVRVPGSWEIPVAAGELARKEDIDAVIAIGVLIRGATPHFDYIASEVSKGLADLSLELRKPITFGVITADTLEQAIERAGTKHGNKGWEAALSAIEMANLFKSLR

SEQ ID NO: 8491 - protein, 1307 aa, Artificial Sequence
  SARS-CoV-2/France/HF2496/2020__EPI_ISL_418231 spike protein (1-1147)(A972C_R995C) LumSynth construct
MFVFLVLLPLVSSQCVNLTTRTQLPPAYTNSFTRGVYYPDKVFRSSVLHSTQDLFLPFFSNVTWFHAIHVSGTNGTKRFDNPVLPFNDGVYFASTEKSNIIRGWIFGTTLDSKTQSLLIVNNATNVVIKVCEFQFCNDPFLGVYYHKNNKSWMESEFRVYSSANNCTFEYVSQPFLMDLEGKQGNFKNLREFVFKNIDGYFKIYSKHTPINLVRDLPQGFSALEPLVDLPIGINITRFQTLLALHRSYLTPGDSSSGWTAGAAAYYVGYLQPRTFLLKYNENGTITDAVDCALDPLSETKCTLKSFTVEKGIYQTSNFRVQPTESIVRFPNITNLCPFGEVFNATRFASVYAWNRKRISNCVADYSVLYNSASFSTFKCYGVSPTKLNDLCFTNVYADSFVIRGDEVRQIAPGQTGKIADYNYKLPDDFTGCVIAWNSNNLDSKVGGNYNYLYRLFRKSNLKPFERDISTEIYQAGSTPCNGVEGFNCYFPLQSYGFQPTNGVGYQPYRVVVLSFELLHAPATVCGPKKSTNLVKNKCVNFNFNGLTGTGVLTESNKKFLPFQQFGRDIADTTDAVRDPQTLEILDITPCSFGGVSVITPGTNTSNQVAVLYQGVNCTEVPVAIHADQLTPTWRVYSTGSNVFQTRAGCLIGAEHVNNSYECDIPIGAGICASYQTQTNSPRRARSVASQSIIAYTMSLGAENSVAYSNNSIAIPTNFTISVTTEILPVSMTKTSVDCTMYICGDSTECSNLLLQYGSFCTQLNRALTGIAVEQDKNTQEVFAQVKQIYKTPPIKDFGGFNFSQILPDPSKPSKRSFIEDLLFNKVTLADAGFIKQYGDCLGDIVARDLICAQKFNGLTVLPPLLTDEMIAQYTSALLAGTITSGWTFGAGAALQIPFAMQMAYRFNGIGVTQNVLYENQKLIANQFNSAIGKIQDSLSSTASALGKLQDVVNQNAQALNTLVKQLSSNFGCISSVLNDILSRLDKVEAEVQIDCLITGRLQSLQTYVTQQLIRAAEIRASANLAATKMSECVLGQSKRVDFCGKGYHLMSFPQSAPHGVVFLHVTYVPAQEKNFTTAPAICHDGKAHFPREGVFVSNGTHWFVTQRNFYEPQIITTDNTFVSGNCDVVIGIVNNTVYDPLQPELDSGGGSGGGQIYEGKLTAEGLRFGIVASRFNHALVDRLVEGAIDAIVRHGGREEDITLVRVPGSWEIPVAAGELARKEDIDAVIAIGVLIRGATPHFDYIASEVSKGLADLSLELRKPITFGVITADTLEQAIERAGTKHGNKGWEAALSAIEMANLFKSLR

SEQ ID NO: 8492 - protein, 1307 aa, Artificial Sequence
  SARS-CoV-2/USA/WA-UW291/2020__EPI_ISL_418076 spike protein (1-1147)(A972C_R995C) LumSynth construct
MFVFLVLLPLVSSQCVNLTTRTQLPPAYTNSFTRGVYYPDKVFRSSVLHSTQDLFLPFFSNVTWFHAIHVSGTNGTKRFDNPVLPFNDGVYFASTEKSNIIRGWIFGTTLDSKTQSLLIVNNATNVVIKVCEFQFCNDPFLGVYYHKNNKSWMESEFRVYSSANNCTFEYVSQPFLMDLEGKQGNFKNLREFVFKNIDGYFKIYSKHTPINLVRDLPQGFSALEPLVDLPIGINITRFQTLLALHRSYLTPGDSSSGWTAGAAAYYVGYLQPRTFLLKYNENGTITDAVDCALDPLSETKCTLKSFTVEKGIYQTSNFRVQPTESIVRFPNITNLCPFGEVFNATRFASVYAWNRKRISNCVADYSVLYNSASFSTFKCYGVSPTKLNDLCFTNVYADSFVIRGDEVRQIAPGQTGKIADYNYKLPDDFTGCVIAWNSNNLDSKVGGNYNYLYRLFRKSNLKPFERDISTEIYQAGSTPCNGVEGFNCYFPLQSYGFQPTNGVGYQPYRVVVLSFELLHAPATVCGPKKSTNLVKNKCVNFNFNGLTGTGVLTESNKKFLPFQQFGRDIADTTDAVRDPQTLEILDITPCSFGGVSVITPGTNTSNQVAVLYQGVNCTEVPVAIHADQLTPTWRVYSTGSNVFQTRAGCLIGAEHVNNSYECDIPIGAGICASYQTQTNSPRRARSVASQSIIAYTMSLGAENSVAYSNNSIAIPTNFTISVTTEILPVSMTKTSVDCTMYICGDSTECSNLLLQYGSFCTQLNRALTGIAVEQDKNTQEVFAQVKQIYKTPPIKDFGGFNFSQILPDPSKPSKRSFIEDLLFNKVTLADAGFIKQYGDCLGDIAARDLICAQKFNGLTVLPPLLTDEMIAQYTSALLAGTITSGWTFGAGAALQIPFAMQMAYRFNGIGVTQNVLYENQKLIANQFNSAIGKIQYSLSSTASALGKLQDVVNQNAQALNTLVKQLSSNFGCISSVLNDILSRLDKVEAEVQIDCLITGRLQSLQTYVTQQLIRAAEIRASANLAATKMSECVLGQSKRVDFCGKGYHLMSFPQSAPHGVVFLHVTYVPAQEKNFTTAPAICHDGKAHFPREGVFVSNGTHWFVTQRNFYEPQIITTDNTFVSGNCDVVIGIVNNTVYDPLQPELDSGGGSGGGQIYEGKLTAEGLRFGIVASRFNHALVDRLVEGAIDAIVRHGGREEDITLVRVPGSWEIPVAAGELARKEDIDAVIAIGVLIRGATPHFDYIASEVSKGLADLSLELRKPITFGVITADTLEQAIERAGTKHGNKGWEAALSAIEMANLFKSLR

SEQ ID NO: 8493 - protein, 1307 aa, Artificial Sequence; identical to SEQ ID NO: 8456
  SARS-CoV-2/Portugal/PT0034/2020__EPI_ISL_418019 spike protein (1-1147)(A972C_R995C) LumSynth construct

SEQ ID NO: 8494 - protein, 1307 aa, Artificial Sequence; identical to SEQ ID NO: 8448
  SARS-CoV-2/Iceland/202/2020__EPI_ISL_417750 spike protein (1-1147)(A972C_R995C) LumSynth construct

SEQ ID NO: 8495 - protein, 1307 aa, Artificial Sequence
  SARS-CoV-2/USA/WA-UW261/2020__EPI_ISL_418046 spike protein (1-1147)(A972C_R995C) LumSynth construct
MFVFLVLLPLVSSQCVNLTTRTQLPPAYTNSFTRGVYYPDKVFRSSVLHSTQDLFLPFFSNVTWFHAIHVSGTNGTKRFDNPVLPFNDGVYFASTEKSNIIRGWIFGTTLDSKTQSLLIVNNATNVVIKVCEFQFCNDPFLGVYYHKNNKSWMESEFRVYSSANNCTFEYVSQPFLMDLEGKQGNFKNLREFVFKNIDGYFKIYSKHTPINLVRDLPQGFSALEPLVDLPIGINITRFQTLLALHRSYLTPGDSSSGWTAGAAAYYVGYLQPRTFLLKYNENGTITDAVDCALDPLSETKCTLKSFTVEKGIYQTSNFRVQPTESIVRFPNITNLCPFGEVFNATRFTSVYAWNRKRISNCVADYSVLYNSASFSTFKCYGVSPTKLNDLCFTNVYADSFVIRGDEVRQIAPGQTGKIADYNYKLPDDFTGCVIAWNSNNLDSKVGGNYNYLYRLFRKSNLKPFERDISTEIYQAGSTPCNGVEGFNCYFPLQSYGFQPTNGVGYQPYRVVVLSFELLHAPATVCGPKKSTNLVKNKCVNFNFNGLTGTGVLTESNKKFLPFQQFGRDIADTTDAVRDPQTLEILDITPCSFGGVSVITPGTNTSNQVAVLYQDVNCTEVPVAIHADQLTPTWRVYSTGSNVFQTRAGCLIGAEHVNNSYECDIPIGAGICASYQTQTNSPRRARSVASQSIIAYTMSLGAENSVAYSNNSIAIPTNFTISVTTEILPVSMTKTSVDCTMYICGDSTECSNLLLQYGSFCTQLNRALTGIAVEQDKNTQEVFAQVKQIYKTPPIKDFGGFNFSQILPDPSKPSKRSFIEDLLFNKVTLADAGFIKQYGDCLGDIAARDLICAQKFNGLTVLPPLLTDEMIAQYTSALLAGTITSGWTFGAGAALQIPFAMQMAYRFNGIGVTQNVLYENQKLIANQFNSAIGKIQDSLSSTASALGKLQDVVNQNAQALNTLVKQLSSNFGCISSVLNDILSRLDKVEAEVQIDCLITGRLQSLQTYVTQQLIRAAEIRASANLAATKMSECVLGQSKRVDFCGKGYHLMSFPQSAPHGVVFLHVTYVPAQEKNFTTAPAICHDGKAHFPREGVFVSNGTHWFVTQRNFYEPQIITTDNTFVSGNCDVVIGIVNNTVYDPLQPELDSGGGSGGGQIYEGKLTAEGLRFGIVASRFNHALVDRLVEGAIDAIVRHGGREEDITLVRVPGSWEIPVAAGELARKEDIDAVIAIGVLIRGATPHFDYIASEVSKGLADLSLELRKPITFGVITADTLEQAIERAGTKHGNKGWEAALSAIEMANLFKSLR

SEQ ID NO: 8496 - protein, 1307 aa, Artificial Sequence
  SARS-CoV-2/Portugal/PT0035/2020__EPI_ISL_418020 spike protein (1-1147)(A972C_R995C) LumSynth construct
MFVFLVLLPLVSSQCVNLTTRTQLPPAYTNSFTRGVYYPDKVFRSSVLHSTQDLFLPFFSNVTWFHAIHVSGTNGTKRFDNPVLPFNDGVYFASTEKSNIIRGWIFGTTLDSKTQSLLIVNNATNVVIKVCEFQFCNDPFLGVYYHKNNKSWMESEFRVYSSANNCTFEYVSQPFLMDLEGKQGNFKNLREFVFKNIDGYFKIYSKHTPINLVRDLPQGFSALEPLVDLPIGINITRFQTLLALHRSYLTPGDSSSGWTAGAAAYYVGYLQPRTFLLKYNENGTITDAVDCALDPLSETKCTLKSFTVEKGIYQTSNFRVQPTESIVRFPNITNLCPFGEVFNATRFASVYAWNRKRISNCVADYSVLYNSASFSTFKCYGVSPTKLNDLCFTNVYADSFVIRGDEVRQIAPGQTGKIADYNYKLPDDFTGCVIAWNSNNLDSKVGGNYNYLYRLFRKSNLKPFERDISTEIYQAGSTPCNGVEGFNCYFPLQSYGFQPTNGVGYQPYRVVVLSFELLHAPATVCGPKKSTNLVKNKCVNFNFNGLTGTGVLTESNKKFLPFQQFGRDIADTTDAVRDPQTLEILDITPCSFGGVSVITPGTNTSNQVAVLYQDVNCTEVPVAIHADQLTPTWRVYSTGSNVFQTRAGCLIGAEHVNNSYECDIPIGAGICASYQTQTNSPRRARSVASQSIIAYTMSLGAENSVAYSNNSIAIPTNFTISVTTEILPVSMTKTSVDCTMYICGDSTECSNLLLQYGSFCTQLNRALTGIAVEQDKNTQEVFAQVKQIYKTPPIKDFGGFNFSQILPDPSKPSKRSFIEDLLFNKVTLADAGFIKQYGDCLGDISARDLICAQKFNGLTVLPPLLTDEMIAQYTSALLAGTITSGWTFGAGAALQIPFAMQMAYRFNGIGVTQNVLYENQKLIANQFNSAIGKIQDSLSSTASALGKLQDVVNQNAQALNTLVKQLSSNFGCISSVLNDILSRLDKVEAEVQIDCLITGRLQSLQTYVTQQLIRAAEIRASANLAATKMSECVLGQSKRVDFCGKGYHLMSFPQSAPHGVVFLHVTYVPAQEKNFTTAPAICHDGKAHFPREGVFVSNGTHWFVTQRNFYEPQIITTDNTFVSGNCDVVIGIVNNTVYDPLQPELDSGGGSGGGQIYEGKLTAEGLRFGIVASRFNHALVDRLVEGAIDAIVRHGGREEDITLVRVPGSWEIPVAAGELARKEDIDAVIAIGVLIRGATPHFDYIASEVSKGLADLSLELRKPITFGVITADTLEQAIERAGTKHGNKGWEAALSAIEMANLFKSLR

SEQ ID NO: 8497 - protein, 1307 aa, Artificial Sequence
  SARS-CoV-2/USA/NY-NYUMC7/2020__EPI_ISL_418192 spike protein (1-1147)(A972C_R995C) LumSynth construct
MFVFLVLLPLVSSQCVNLTTRTQLPPAYTNSFTRGVYYPDKVFRSSVLHSTQDLFLPFFSNVTWFHAIHVSGTNGTKRFDNPVLPFNDGVYFASTEKSNIIRGWIFGTTLDSKTQSLLIVNNATNVVIKVCEFQFCNDPFLGVYHHKNNKSWMESEFRVYSSANNCTFEYVSQPFLMDLEGKQGNFKNLREFVFKNIDGYFKIYSKHTPINLVRDLPQGFSALEPLVDLPIGINITRFQTLLALHRSYLTPGDSSSGWTAGAAAYYVGYLQPRTFLLKYNENGTITDAVDCALDPLSETKCTLKSFTVEKGIYQTSNFRVQPTESIVRFPNITNLCPFGEVFNATRFASVYAWNRKRISNCVADYSVLYNSASFSTFKCYGVSPTKLNDLCFTNVYADSFVIRGDEVRQIAPGQTGKIADYNYKLPDDFTGCVIAWNSNNLDSKVGGNYNYLYRLFRKSNLKPFERDISTEIYQAGSTPCNGVEGFNCYFPLQSYGFQPTNGVGYQPYRVVVLSFELLHAPATVCGPKKSTNLVKNKCVNFNFNGLTGTGVLTESNKKFLPFQQFGRDIADTTDAVRDPQTLEILDITPCSFGGVSVITPGTNTSNQVAVLYQGVNCTEVPVAIHADQLTPTWRVYSTGSNVFQTRAGCLIGAEHVNNSYECDIPIGAGICASYQTQTNSPRRARSVASQSIIAYTMSLGAENSVAYSNNSIAIPTNFTISVTTEILPVSMTKTSVDCTMYICGDSTECSNLLLQYGSFCTQLNRALTGIAVEQDKNTQEVFAQVKQIYKTPPIKDFGGFNFSQILPDPSKPSKRSFIEDLLFNKVTLADAGFIKQYGDCLGDIAARDLICAQKFNGLTVLPPLLTDEMIAQYTSALLAGTITSGWTFGAGAALQIPFAMQMAYRFNGIGVTQNVLYENQKLIANQFNSAIGKIQDSLSSTASALGKLQDVVNQNAQALNTLVKQLSSNFGCISSVLNDILSRLDKVEAEVQIDCLITGRLQSLQTYVTQQLIRAAEIRASANLAATKMSECVLGQSKRVDFCGKGYHLMSFPQSAPHGVVFLHVTYVPAQEKNFTTAPAICHDGKAHFPREGVFVSNGTHWFVTQRNFYEPQIITTDNTFVSGNCDVVIGIVNNTVYDPLQPELDSGGGSGGGQIYEGKLTAEGLRFGIVASRFNHALVDRLVEGAIDAIVRHGGREEDITLVRVPGSWEIPVAAGELARKEDIDAVIAIGVLIRGATPHFDYIASEVSKGLADLSLELRKPITFGVITADTLEQAIERAGTKHGNKGWEAALSAIEMANLFKSLR

SEQ ID NO: 8498 - protein, 1307 aa, Artificial Sequence
  SARS-CoV-2/Iceland/189/2020__EPI_ISL_417709 spike protein (1-1147)(A972C_R995C) LumSynth construct
MFVFLVLLPLVSSQCVNLTTRTQLPPAYTNSFTRGVYYPDKVFRSSVLHSTQDLFLPFFSNVTWFHAIHVSGTNGTKRFDNPVLPFNDGVYFASTEKSNIIRGWIFGTTLDSKTQSLLIVNNATNVVIKVCEFQFCNDPFLGVYYHKNNKSWMESEFRVYSSANNCTFEYVSQPFLMDLEGKQGNFKNLREFVFKNIDGYFKIYSKHTPINLVRDLPQGFSALEPLVDLPIGINITRFQTLLALHRSYLTPGDSSSGWTAGAAAYYVGYLQPRTFLLKYNENGTITDAVDCALDPLSETKCTLKSFTVEKGIYQTSNFRVQPTESIVRFPNITNLCPFGEVFNATRFASVYAWNRKRISNCVADYSVLYNSASFSTFKCYGVSPTKLNDLCFTNVYADSFVIRGDEVRQIAPGQTGKIADYNYKLPDDFTGCVIAWNSNNLDSKVGGNYNYLYRLFRKSNLKPFERDISTEIYQAGSTPCNGVEGFNCYFPLQSYGFQPTNGVGYQPYRVVVLSFELLHAPATVCGPKKSTNLVKNKCVNFNFNGLTGTGVLTESNKKFLPFQQFGRDIADTTDAVRDPQTLEILDITPCSFGGVSVITPGTNTSNQVAVLYQGVNCTEVPVAIHADQLTPTWRVYSTGSNVFQTRAGCLIGAEHVNNSYECDIPIGAGICASYQTQTNSPRRARSVASQSIIAYTMSLGAENSVAYSNNSIAIPTNFTISVTTEILPVSMTKTSVDCTMYICGDSTECSNLLLQYGSFCTQLNRALTGIAVEQDKNTQEVFAQVKQIYKTPPIKDFGGFNFSQILPDPSKPSKRSFIEDLLFNKVTLADAGFTKQYGDCLGDIAARDLICAQKFNGLTVLPPLLTDEMIAQYTSALLAGTITSGWTFGAGAALQIPFAMQMAYRFNGIGVTQNVLYENQKLIANQFNSAIGKIQDSLSSTASALGKLQDVVNQNAQALNTLVKQLSSNFGCISSVLNDILSRLDKVEAEVQIDCLITGRLQSLQTYVTQQLIRAAEIRASANLAATKMSECVLGQSKRVDFCGKGYHLMSFPQSAPHGVVFLHVTYVPAQEKNFTTAPAICHDGKAHFPREGVFVSNGTHWFVTQRNFYEPQIITTDNTFVSGNCDVVIGIVNNTVYDPLQPELDSGGGSGGGQIYEGKLTAEGLRFGIVASRFNHALVDRLVEGAIDAIVRHGGREEDITLVRVPGSWEIPVAAGELARKEDIDAVIAIGVLIRGATPHFDYIASEVSKGLADLSLELRKPITFGVITADTLEQAIERAGTKHGNKGWEAALSAIEMANLFKSLR

SEQ ID NO: 8499 - protein, 1307 aa, Artificial Sequence
  SARS-CoV-2/Australia/NSW56/2020__EPI_ISL_417408 spike protein (1-1147)(A972C_R995C) LumSynth construct
MFVFLVLLPLVSSQCVNLTTRTQLPPAYTNSFTRGVYYPDKVFRSSVLHSTQDLFLPFFSNVTWFHAIHVSGTNGTKRFDNPVLPFNDGVYFASTEKSNIIRGWIFGTTLDSKTQSLLIVNNATNVVIKVCEFQFCNDPFLGVYYHKNNKSWMESEFRVYSSANNCTFEYVSQPFLMDLEGKQGNFKNLREFVFKNIDGYFKIYSKHTPINLVRDLPQGFSALEPLVDLPIGINITRFQTLLALHRSYLTPGDSSSGWTAGAAAYYVGYLQPRTFLLKYNENGTITDAVDCALDPLSETKCTLKSFTVEKGIYQTSNFRVQPTESIVRFPNITNLCPFGEVFNATRFASVYAWNRKRISNCVADYSVLYNSASFSTFKCYGVSPTKLNDLCFTNVYADSFVIRGDEVRQIAPGQTGKIADYNYKLPDDFTGCVIAWNSNNLDSKVGGNYNYLYRLFRKSNLKPFERDISTEIYQAGSTPCNGVEGFNCYFPLQSYGFQPTNGVGYQPYRVVVLSFELLHAPATVCGPKKSTNLVKNKCVNFNFNGLTGTGVLTESNKKFLPFQQFGRDIADTTDAVRDPQTLEILDITPCSFGGVSVITPGTNTSNQVAVLYQDVNCTEVPVAIHADQLTPTWRVYSTGSNVFQTRAGCLIGAEHVNNSYECDIPIGAGICASYQTQTNSPRRARSVASQSIIAYTMSLGAENSVAYSNNSIAIPTNFTISVTTEILPVSMTKTSVDCTMYICGDSTECSNLLLQYGSFCTQLNRALTGIAVEQDKNTQEVFAQVKQIYKTPPIKDFGGFNFSQILPDSSKPSKRSFIEDLLFNKVTLADAGFIKQYGDCLGDIAARDLICAQKFNGLTVLPPLLTDEMIAQYTSALLAGTITSGWTFGAGAALQIPFAMQMAYRFNGIGVTQNVLYENQKLIANQFNSAIGKIQDSLSSTASALGKLQDVVNQNAQALNTLVKQLSSNFGCISSVLNDILSRLDKVEAEVQIDCLITGRLQSLQTYVTQQLIRAAEIRASANLAATKMSECVLGQSKRVDFCGKGYHLMSFPQSAPHGVVFLHVTYVPAQEKNFTTAPAICHDGKAHFPREGVFVSNGTHWFVTQRNFYEPQIITTDNTFVSGNCDVVIGIVNNTVYDPLQPELDSGGGSGGGQIYEGKLTAEGLRFGIVASRFNHALVDRLVEGAIDAIVRHGGREEDITLVRVPGSWEIPVAAGELARKEDIDAVIAIGVLIRGATPHFDYIASEVSKGLADLSLELRKPITFGVITADTLEQAIERAGTKHGNKGWEAALSAIEMANLFKSLR

SEQ ID NO: 8500 - protein, 1307 aa, Artificial Sequence
  SARS-CoV-2/Iceland/280/2020__EPI_ISL_417608 spike protein (1-1147)(A972C_R995C) LumSynth construct
MFVFLVLLPLVSSQCVNLTTRTQLPPAYTNSFTRGVYYPDKVFRSSVLHSTQDLFLPFFSNVTWFHAIHVSGTNGTKRFDNPVLPFNDGVYFASTEKSNIIRGWIFGTTLDSKTQSLLIVNNATNVVIKVCEFQFCNDPFLGVYYHKNNKSWMESEFRVYSSANNCTFEYVSQPFLMDLEGKQGNFKNLREFVFKNIDGYFKIYSKHTPINLVRDLPQGFSALEPLVDLPIGINITRFQTLLALHRSYLTPGDSSSGWTAGAAAYYVGYLQPRTFLLKYNENGTITDAVDCALDPLSETKCTLKSFTVEKGIYQTSNFRVQPTESIVRFPNITNLCPFGEVFNATRFASVYAWNRKRISNCVADYSVLYNSASFSTFKCYGVSPTKLNDLCFTNVYADSFVIRGDEVRQIAPGQTGKIADYNYKLPDDFTGCVIAWNSNNLDSKVGGNYNYLYRLFRKSNLKPFERDISTEIYQAGSTPCNGVEGFNCYFPLQSYGFQPTNGVGYQPYRVVVLSFELLHAPATVCGPKKSTNLVKNKCVNFNFNGLTGTGVLTESNKKFLPFQQFGRDIADTTDAVRDPQTLEILDITPCSFGGVSVITPGTNTSNQVAVLYQGVNCTEVPVAIHADQLTPTWRVYSTGSNVFQTRAGCLIGAEHVNNSYECDIPIGAGICASYHTQTNSPRRARSVASQSIIAYTMSLGAENSVAYSNNSIAIPTNFTISVTTEILPVSMTKTSVDCTMYICGDSTECSNLLLQYGSFCTQLNRALTGIAVEQDKNTQEVFAQVKQIYKTPPIKDFGGFNFSQILPDPSKPSKRSFIEDLLFNKVTLADAGFIKQYGDCLGDIAARDLICAQKFNGLTVLPPLLTDEMIAQYTSALLAGTITSGWTFGAGAALQIPFAMQMAYRFNGIGVTQNVLYENQKLIANQFNSAIGKIQDSLSSTASALGKLQDVVNQNAQALNTLVKQLSSNFGCISSVLNDILSRLDKVEAEVQIDCLITGRLQSLQTYVTQQLIRAAEIRASANLAATKMSECVLGQSKRVDFCGKGYHLMSFPQSAPHGVVFLHVTYVPAQEKNFTTAPAICHDGKAHFPREGVFVSNGTHWFVTQRNFYEPQIITTDNTFVSGNCDVVIGIVNNTVYDPLQPELDSGGGSGGGQIYEGKLTAEGLRFGIVASRFNHALVDRLVEGAIDAIVRHGGREEDITLVRVPGSWEIPVAAGELARKEDIDAVIAIGVLIRGATPHFDYIASEVSKGLADLSLELRKPITFGVITADTLEQAIERAGTKHGNKGWEAALSAIEMANLFKSLR

SEQ ID NO: 8501 - protein, 1307 aa, Artificial Sequence; identical to SEQ ID NO: 8456
  SARS-CoV-2/Iceland/247/2020__EPI_ISL_417575 spike protein (1-1147)(A972C_R995C) LumSynth construct

SEQ ID NO: 8502 - protein, 1307 aa, Artificial Sequence
  SARS-CoV-2/Iceland/238/2020__EPI_ISL_417566 spike protein (1-1147)(A972C_R995C) LumSynth construct
MFVFLVLLPLVSSQCVNLTTRTQLPPAYTNSFTRGVYYPDKVFRSSVLHSTQDLFLPFFSNVTWFHAIHVSGTNGTKRFDNPVLPFNDGVYFASTEKSNIIRGWIFGTTLDSKTQSLLIVNNATNVVIKVCEFQFCNDPFLGVYYHKNNKSWMESEFRVYSSANNCTFEYVSQPFLMDLEGKQGNFKNLREFVFKNIDGYFKIYSKHTPINLVRDLPQGFSALEPLVDLPIGINITRFQTLLALHRSYLTPGDSSSGWTAGAAAYYVGYLQPRTFLLKYNENGTITDAVDCALDPLSETKCTLKSFTVEKGIYQTSNFRVQPTESIVRFPNITNLCPFGEVFNATRFASVYAWNRKRISNCVADYSVLYNSASFSTFKCYGVSPTKLNDLCFTNVYADSFVIRGDEVRQIAPGQTGKIADYNYKLPDDFTGCVIAWNSNNLDSKVGGNYNYLYRLFRKSNLKPFERDISTEIYQAGSTPCNGVEGFNCYFPLQSYGFQPTNGVGYQPYRVVVLSFELLHAPATVCGPKKSTNLVKNKCVNFNFNGLTGTGVLTESNKKFLPFQQFGRDIADTTDAVRDPQTLEILDITPCSFGGVSVITPGTNTSNQVAVLYQGVNCTEVPVAIHADQLTPTWRVYSTGSNVFQTRAGCLIGAEHVNNSYECDIPIGAGICASYQTQTNSPRRARSVASQSIIAYTMSLGAENSVAYSNNSIAIPTNFTISVTTEILPVSMTKTSVDCTMYICGDSTECSNLLLQYGSFCTQLNRALTGIAVEQDKNTQEVFAQVKQIYKTPPIKDFGGFNFSQILPDPSKPSKRSFIEDLLFNKVTLADVGFIKQYGDCLGDIAARDLICAQKFNGLTVLPPLLTDEMIAQYTSALLAGTITSGWTFGAGAALQIPFAMQMAYRFNGIGVTQNVLYENQKLIANQFNSAIGKIQDSLSSTASALGKLQDVVNQNAQALNTLVKQLSSNFGCISSVLNDILSRLDKVEAEVQIDCLITGRLQSLQTYVTQQLIRAAEIRASANLAATKMSECVLGQSKRVDFCGKGYHLMSFPQSAPHGVVFLHVTYVPAQEKNFTTAPAICHDGKAHFPREGVFVSNGTHWFVTQRNFYEPQIITTDNTFVSGNCDVVIGIVNNTVYDPLQPELDSGGGSGGGQIYEGKLTAEGLRFGIVASRFNHALVDRLVEGAIDAIVRHGGREEDITLVRVPGSWEIPVAAGELARKEDIDAVIAIGVLIRGATPHFDYIASEVSKGLADLSLELRKPITFGVITADTLEQAIERAGTKHGNKGWEAALSAIEMANLFKSLR

SEQ ID NO: 8503 - protein, 1307 aa, Artificial Sequence
  SARS-CoV-2/Greece/16/2020__EPI_ISL_418265 spike protein (1-1147)(A972C_R995C) LumSynth construct
MFVFLVLLPLVSSQCVNLTTRTQLPPAYTNSFTRGVYYPDKVFRSSVLHSTQDLFLPFFSNVTWFHAIHVSGTNGTKRFDNPVLPFNDGVYFASTEKSNIIRGWIFGTTLDSKTQSLLIVNNATNVVIKVCEFQFCNDPFLGVYYHKNNKSWMESEFRVYSSANNCTFEYVSQPFLMDLEGKQGNFKNLREFVFKNVDGYFKIYSKHTPINLVRDLPQGFSALEPLVDLPIGINITRFQTLLALHRSYLTPGDSSSGWTAGAAAYYVGYLQPRTFLLKYNENGTITDAVDCALDPLSETKCTLKSFTVEKGIYQTSNFRVQPTESIVRFPNITNLCPFGEVFNATRFASVYAWNRKRISNCVADYSVLYNSASFSTFKCYGVSPTKLNDLCFTNVYADSFVIRGDEVRQIAPGQTGKIADYNYKLPDDFTGCVIAWNSNNLDSKVGGNYNYLYRLFRKSNLKPFERDISTEIYQAGSTPCNGVEGFNCYFPLQSYGFQPTNGVGYQPYRVVVLSFELLHAPATVCGPKKSTNLVKNKCVNFNFNGLTGTGVLTESNKKFLPFQQFGRDIADTTDAVRDPQTLEILDITPCSFGGVSVITPGTNTSNQVAVLYQDVNCTEVPVAIHADQLTPTWRVYSTGSNVFQTRAGCLIGAEHVNNSYECDIPIGAGICASYQTQTNSPRRARSVASQSIIAYTMSLGAENSVAYSNNSIAIPTNFTISVTTEILPVSMTKTSVDCTMYICGDSTECSNLLLQYGSFCTQLNRALTGIAVEQDKNTQEVFAQVKQIYKTPPIKDFGGFNFSQILPDPSKPSKRSFIEDLLFNKVTLADAGFIKQYGDCLGDIAARDLICAQKFNGLTVLPPLLTDEMIAQYTSALLAGTITSGWTFGAGAALQIPFAMQMAYRFNGIGVTQNVLYENQKLIANQFNSAIGKIQDSLSSTASALGKLQDVVNQNAQALNTLVKQLSSNFGCISSVLNDILSRLDKVEAEVQIDCLITGRLQSLQTYVTQQLIRAAEIRASANLAATKMSECVLGQSKRVDFCGKGYHLMSFPQSAPHGVVFLHVTYVPAQEKNFTTAPAICHDGKAHFPREGVFVSNGTHWFVTQRNFYEPQIITTDNTFVSGNCDVVIGIVNNTVYDPLQPELDSGGGSGGGQIYEGKLTAEGLRFGIVASRFNHALVDRLVEGAIDAIVRHGGREEDITLVRVPGSWEIPVAAGELARKEDIDAVIAIGVLIRGATPHFDYIASEVSKGLADLSLELRKPITFGVITADTLEQAIERAGTKHGNKGWEAALSAIEMANLFKSLR

SEQ ID NO: 8504 - protein, 1307 aa, Artificial Sequence
  SARS-CoV-2/Iceland/319/2020__EPI_ISL_417648 spike protein (1-1147)(A972C_R995C) LumSynth construct
MFVFLVLLPLVSSQCVNLTTRTQLPPAYTNSFTRGVYYPDKVFRSSVLHSTQDLFLPFFSNVTWFHAIHVSGTNGTKRFDNPVLPFNDGVYFASTEKSNIIRGWIFGTTLDSKTQSLLIVNNATNVVIKVCEFQFCNDPFLGVYYHKNNKSWMESEFRVYSSANNCTFEYVSQPFLIDLEGKQGNFKNLREFVFKNIDGYFKIYSKHTPINLVRDLPQGFSALEPLVDLPIGINITRFQTLLALHRSYLTPGDSSSGWTAGAAAYYVGYLQPRTFLLKYNENGTITDAVDCALDPLSETKCTLKSFTVEKGIYQTSNFRVQPTESIVRFPNITNLCPFGEVFNATRFASVYAWNRKRISNCVADYSVLYNSASFSTFKCYGVSPTKLNDLCFTNVYADSFVIRGDEVRQIAPGQTGKIADYNYKLPDDFTGCVIAWNSNNLDSKVGGNYNYLYRLFRKSNLKPFERDISTEIYQAGSTPCNGVEGFNCYFPLQSYGFQPTNGVGYQPYRVVVLSFELLHAPATVCGPKKSTNLVKNKCVNFNFNGLTGTGVLTESNKKFLPFQQFGRDIADTTDAVRDPQTLEILDITPCSFGGVSVITPGTNTSNQVAVLYQGVNCTEVPVAIHADQLTPTWRVYSTGSNVFQTRAGCLIGAEHVNNSYECDIPIGAGICASYQTQTNSPRRARSVASQSIIAYTMSLGAENSVAYSNNSIAIPTNFTISVTTEILPVSMTKTSVDCTMYICGDSTECSNLLLQYGSFCTQLNRALTGIAVEQDKNTQEVFAQVKQIYKTPPIKDFGGFNFSQILPDPSKPSKRSFIEDLLFNKVTLADAGFIKQYGDCLGDIAARDLICAQKFNGLTVLPPLLTDEMIAQYTSALLAGTITSGWTFGAGAALQIPFAMQMAYRFNGIGVTQNVLYENQKLIANQFNSAIGKIQDSLSSTASALGKLQDVVNQNAQALNTLVKQLSSNFGCISSVLNDILSRLDKVEAEVQIDCLITGRLQSLQTYVTQQLIRAAEIRASANLAATKMSECVLGQSKRVDFCGKGYHLMSFPQSAPHGVVFLHVTYVPAQEKNFTTAPAICHDGKAHFPREGVFVSNGTHWFVTQRNFYEPQIITTDNTFVSGNCDVVIGIVNNTVYDPLQPELDSGGGSGGGQIYEGKLTAEGLRFGIVASRFNHALVDRLVEGAIDAIVRHGGREEDITLVRVPGSWEIPVAAGELARKEDIDAVIAIGVLIRGATPHFDYIASEVSKGLADLSLELRKPITFGVITADTLEQAIERAGTKHGNKGWEAALSAIEMANLFKSLR

SEQ ID NO: 8505 - protein, 1307 aa, Artificial Sequence
  SARS-CoV-2/Congo/94/2020__EPI_ISL_417947 spike protein (1-1147)(A972C_R995C) LumSynth construct
MFVFLVLLPLVSSQCVNLTTRTQLPPAYTNSFTRGVYYPDKVFRSSVLHSTQDLFLPFFSNVTWFHAIHVSGTNGTKRFDNPVLPFNDGVYFASTEKSNIIRGWIFGTTLDSKTQSLLIVNNATNVVIKVCEFQFCNDPFLGVYYHKNNKSWMESEFRVYSSANNCTFEYVSQPFLMDLEGKQGNFKNLREFVFKNIDGYFKIYSKHTPINLVRDLPQGFSALEPLVDLPIGINITRFQTLLALHRSYLTPGDSSSGWTAGAAAYYVGYLQPRTFLLKYNENGTITDAVDCALDPLSETKCTLKSFTVEKGIYQTSNFRVQPTESIVRFPNITNLCPFGEVFNATRFASVYAWNRKRISNCVADYSVLYNSASFSTFKCYGVSPTKLNDLCFTNVYADSFVIRGDEVRQIAPGQTGKIADYNYKLPDDFTGCVIAWNSNNLDSKVGGNYNYLYRLFRKSNLKPFERDISTEIYQAGSTPCNGVEGFNCYFPLQSYGFQPTNGVGYQPYRVVVLSFELLHAPATVCGPKKSTNLVKNKCVNFNFNGLTGTGVLTESNKKFLPFQQFGRDIADTTDAVRDPQTLEILDITPCSFGGVSVITPGTNTSNQVAVLYQGVNCTEVPVAIHADQLTPTWRVYSTGSNVFQTRAGCLIGAEHVNNSYECDIPIGAGICASYQTQTNSPRRARSVASQSIIAYTMSLGAENSVAYSNNSIAIPTNFTISVTTEILPVSMTKTSVDCTMYICGDSTECSNLLLQYGSFCTQLNRALTGIAVEQDKNTQEVFAQVKQIYKTPPIKDFGGFNFSQILPDPSKPSKRSFIEDILFNKVTLADAGFIKQYGDCLGDIAARDLICAQKFNGLTVLPPLLTDEMIAQYTSALLAGTITSGWTFGAGAALQIPFAMQMAYRFNGIGVTQNVLYENQKLIANQFNSAIGKIQDSLSSTASALGKLQDVVNQNAQALNTLVKQLSSNFGCISSVLNDILSRLDKVEAEVQIDCLITGRLQSLQTYVTQQLIRAAEIRASANLAATKMSECVLGQSKRVDFCGKGYHLMSFPQSAPHGVVFLHVTYVPAQEKNFTTAPAICHDGKAHFPREGVFVSNGTHWFVTQRNFYEPQIITTDNTFVSGNCDVVIGIVNNTVYDPLQPELDSGGGSGGGQIYEGKLTAEGLRFGIVASRFNHALVDRLVEGAIDAIVRHGGREEDITLVRVPGSWEIPVAAGELARKEDIDAVIAIGVLIRGATPHFDYIASEVSKGLADLSLELRKPITFGVITADTLEQAIERAGTKHGNKGWEAALSAIEMANLFKSLR

SEQ ID NO: 8506 - protein, 1307 aa, Artificial Sequence
  SARS-CoV-2/Congo/158/2020__EPI_ISL_417950 spike protein (1-1147)(A972C_R995C) LumSynth construct
MFVFLVLLPLVSSQCVNLTTRTQLPPAYTNSFTRGVYYPDKVFRSSVLHSTQDLFLPFFSNVTWFHAIHVSGTNGTKRFDNPVLPFNDGVYFASTEKSNIIRGWIFGTTLDSKTQSLLIVNNATNVVIKVCEFQFCNDPFLGVYYHKNNKSWMESEFRVYSSANNCTFEYVSQPFLMDLEGKQGNFKNLREFVFKNIDGYFKIYSKHTPINLVRDLPQGFSALEPLVDLPIGINITRFQTLLALHRSYLTPGDSSSGWTAGAAAYYVGYLQPRTFLLKYNENGTITDAVDCALDPLSETKCTLKSFTVEKGIYQTSNFRVQPTESIVRFPNITNLCPFGEVFNATRFASVYAWNRKRISNCVADYSVLYNSASFSTFKCYGVSPTKLNDLCFTNVYADSFVIRGDEVRQIAPGQTGKIADYNYKLPDDFTGCVIAWNSNNLDSKVGGNYNYLYRLFRKSNLKPFERDISTEIYQAGSTPCNGVEGFNCYFPLQSYGFQPTNGVGYQPYRVVVLSFELLHAPATVCGPKKSTNLVKNKCVNFNFNGLTGTGVLTESNKKFLPFQQFGRDIADTTDAVRDPQTLEILDITPCSFGGVSVITPGTNTSNQVAVLYQDVNCTEVPVAIHADQLTPTWRVYSTGSNVFQTRAGCLIGAEHVNNSYECDIPIGAGICASYQTQTNSPRRARSVASQSIIAYTMSLGAENSVAYSNNSIAIPTNFTISVTTEILPVSMTKTSVDCTMYICGDSTECSNLLLQYGSFCTQLNRALTGIAVEQDKNTQEVFAQVKQIYKTPPIKDFGGFNFSQILPDPSKPSKRSFIEDLLFNKVTLADAGFIKQYGDCLGDIAARDLICAQKFNGLTVLPPLLTDEMIAQYTSALLAGTITSGWTFGAGAALQIPFAMQMAYRFNGIGVTQNVLYENQKLIANQFNSAIGKIQDSLSSTASALGKLQDVVNQNAQALNTLVKQLSSNFGCISSVLNDILSRLDKVEAEVQIDCLITGRLQSLQTYVTQQLIRAAEIRASANLAATKMSECVLGQSKRVDFCGKGYHLMSFPQSAPHGVVFLHVTYVPAQEKNFTTAPAICHDGKAHFPREGVFVSNGTHWFVTQRNFYEPQIITTDNTFLSGNCDVVIGIVNNTVYDPLQPELDSGGGSGGGQIYEGKLTAEGLRFGIVASRFNHALVDRLVEGAIDAIVRHGGREEDITLVRVPGSWEIPVAAGELARKEDIDAVIAIGVLIRGATPHFDYIASEVSKGLADLSLELRKPITFGVITADTLEQAIERAGTKHGNKGWEAALSAIEMANLFKSLR

SEQ ID NO: 8507 - protein, 1307 aa, Artificial Sequence
  SARS-CoV-2/USA/UT-00034/2020__EPI_ISL_417977 spike protein (1-1147)(A972C_R995C) LumSynth construct
MFVFLVLLPLVSSQCVNLTTRTQLPPAYTNSFTRGVYYPDKVFRSSVLHSTQDLFLPFFSNVTWFHAIHVSGTNGTKRFDNPVLPFNDGVYFASTEKSNIIRGWIFGTTLDSKTQSLLIVNNATNVVIKVCEFQFCNDPFLGVYYYKNNKSWMESEFRVYSSANNCTFEYVSQPFLMDLEGKQGNFKNLREFVFKNIDGYFKIYSKHTPINLVRDLPQGFSALEPLVDLPIGINITRFQTLLALHRSYLTPGDSSSGWTAGAAAYYVGYLQPRTFLLKYNENGTITDAVDCALDPLSETKCTLKSFTVEKGIYQTSNFRVQPTESIVRFPNITNLCPFGEVFNATRFASVYAWNRKRISNCVADYSVLYNSASFSTFKCYGVSPTKLNDLCFTNVYADSFVIRGDEVRQIAPGQTGKIADYNYKLPDDFTGCVIAWNSNNLDSKVGGNYNYLYRLFRKSNLKPFERDISTEIYQAGSTPCNGVEGFNCYFPLQSYGFQPTNGVGYQPYRVVVLSFELLHAPATVCGPKKSTNLVKNKCVNFNFNGLTGTGVLTESNKKFLPFQQFGRDIADTTDAVRDPQTLEILDITPCSFGGVSVITPGTNTSNQVAVLYQGVNCTEVPVAIHADQLTPTWRVYSTGSNVFQTRAGCLIGAEHVNNSYECDIPIGAGICASYQTQTNSPRRARSVASQSIIAYTMSLGAENSVAYSNNSIAIPTNFTISVTTEILPVSMTKTSVDCTMYICGDSTECSNLLLQYGSFCTQLNRALTGIAVEQDKNTQEVFAQVKQIYKTPPIKDFGGFNFSQILPDPSKPSKRSFIEDLLFNKVTLADAGFIKQYGDCLGDIAARDLICAQKFNGLTVLPPLLTDEMIAQYTSALLAGTITSGWTFGAGAALQIPFAMQMAYRFNGIGVTQNVLYENQKLIANQFNSAIGKIQDSLSSTASALGKLQDVVNQNAQALNTLVKQLSSNFGCISSVLNDILSRLDKVEAEVQIDCLITGRLQSLQTYVTQQLIRAAEIRASANLAATKMSECVLGQSKRVDFCGKGYHLMSFPQSAPHGVVFLHVTYVPAQEKNFTTAPAICHDGKAHFPREGVFVSNGTHWFVTQRNFYEPQIITTDNTFVSGNCDVVIGIVNNTVYDPLQPELDSGGGSGGGQIYEGKLTAEGLRFGIVASRFNHALVDRLVEGAIDAIVRHGGREEDITLVRVPGSWEIPVAAGELARKEDIDAVIAIGVLIRGATPHFDYIASEVSKGLADLSLELRKPITFGVITADTLEQAIERAGTKHGNKGWEAALSAIEMANLFKSLR

SEQ ID NO: 8508 - protein, 1307 aa, Artificial Sequence
  SARS-CoV-2/USA/UT-00033/2020__EPI_ISL_417976 spike protein (1-1147)(A972C_R995C) LumSynth construct
MFVFLVLLPLVSSQCVNLTTRTQLPPAYTNSFTRGVYYPDKVFRSSVLHSTQDLFLPFFSNVTWFHAIHVSGTNGTKRFDNPVLPFNDGVYFASTEKSNIIRGWIFGTTLDSKTQSLLIVNNATNVVIKVCEFQFCNDPFLGVYYHKNNKSWMESEFRVYSSANNCTFEYVSQPFLMDLEGKQGNFKNLREFVFKNIDGYFKIYSKHTPINLVRDLPQGFSALEPLVDLPIGINITRFQTLLALHRSYLTPGDSSSGLTAGAAAYYVGYLQPRTFLLKYNENGTITDAVDCALDPLSETKCTLKSFTVEKGIYQTSNFRVQPTESIVRFPNITNLCPFGEVFNATRFASVYAWNRKRISNCVADYSVLYNSASFSTFKCYGVSPTKLNDLCFTNVYADSFVIRGDEVRQIAPGQTGKIADYNYKLPDDFTGCVIAWNSNNLDSKVGGNYNYLYRLFRKSNLKPFERDISTEIYQAGSTPCNGVEGFNCYFPLQSYGFQPTNGVGYQPYRVVVLSFELLHAPATVCGPKKSTNLVKNKCVNFNFNGLTGTGVLTESNKKFLPFQQFGRDIADTTDAVRDPQTLEILDITPCSFGGVSVITPGTNTSNQVAVLYQGVNCTEVPVAIHADQLTPTWRVYSTGSNVFQTRAGCLIGAEHVNNSYECDIPIGAGICASYQTQTNSPRRARSVASQSIIAYTMSLGAENSVAYSNNSIAIPTNFTISVTTEILPVSMTKTSVDCTMYICGDSTECSNLLLQYGSFCTQLNRALTGIAVEQDKNTQEVFAQVKQIYKTPPIKDFGGFNFSQILPDPSKPSKRSFIEDLLFNKVTLADAGFIKQYGDCLGDIAARDLICAQKFNGLTVLPPLLTDEMIAQYTSALLAGTITSGWTFGAGAALQIPFAMQMAYRFNGIGVTQNVLYENQKLIANQFNSAIGKIQDSLSSTASALGKLQDVVNQNAQALNTLVKQLSSNFGCISSVLNDILSRLDKVEAEVQIDCLITGRLQSLQTYVTQQLIRAAEIRASANLAATKMSECVLGQSKRVDFCGKGYHLMSFPQSAPHGVVFLHVTYVPAQEKNFTTAPAICHDGKAHFPREGVFVSNGTHWFVTQRNFYEPQIITTDNTFVSGNCDVVIGIVNNTVYDPLQPELDSGGGSGGGQIYEGKLTAEGLRFGIVASRFNHALVDRLVEGAIDAIVRHGGREEDITLVRVPGSWEIPVAAGELARKEDIDAVIAIGVLIRGATPHFDYIASEVSKGLADLSLELRKPITFGVITADTLEQAIERAGTKHGNKGWEAALSAIEMANLFKSLR

SEQ ID NO: 8509 - protein, 1307 aa, Artificial Sequence
  SARS-CoV-2/USA/WI-13/2020__EPI_ISL_417516 spike protein (1-1147)(A972C_R995C) LumSynth construct
MFVFLVLLPLVSSQCVNLTTRTQLPPAYTNSFTRGVYYPDKVFRSSVLHSTQDLFLPFFSNVTWFHAIHVSGTNGTKRFDNPVLPFNDGVYFASTEKSNIIRGWIFGTTLDSKTQSLLIVNNATNVVIKVCEFQFCNDPFLGVYYHKNNKSWMESEFRVYSSANNCTFEYVSQPFLMDLEGKQGNFKNLREFVFKNIDGYFKIYSKHTPINLVRDLPQGFSALEPLVDLPIGINITRFQTLLALHRSYLTPGDSSSGWTAGAAAYYVGYLQPRTFLLKYNENGTITDAVDCALDPLSETKCTLKSFTVEKGIYQTSNFRVLPTESIVRFPNITNLCPFGEVFNATRFASVYAWNRKRISNCVADYSVLYNSASFSTFKCYGVSPTKLNDLCFTNVYADSFVIRGDEVRQIAPGQTGKIADYNYKLPDDFTGCVIAWNSNNLDSKVGGNYNYLYRLFRKSNLKPFERDISTEIYQAGSTPCNGVEGFNCYFPLQSYGFQPTNGVGYQPYRVVVLSFELLHAPATVCGPKKSTNLVKNKCVNFNFNGLTGTGVLTESNKKFLPFQQFGRDIADTTDAVRDPQTLEILDITPCSFGGVSVITPGTNTSNQVAVLYQGVNCTEVPVAIHADQLTPTWRVYSTGSNVFQTRAGCLIGAEHVNNSYECDIPIGAGICASYQTQTNSPRRARSVASQSIIAYTMSLGAENSVAYSNNSIAIPTNFTISVTTEILPVSMTKTSVDCTMYICGDSTECSNLLLQYGSFCTQLNRALTGIAVEQDKNTQEVFAQVKQIYKTPPIKDFGGFNFSQILPDPSKPSKRSFIEDLLFNKVTLADAGFIKQYGDCLGDIAARDLICAQKFNGLTVLPPLLTDEMIAQYTSALLAGTITSGWTFGAGAALQIPFAMQMAYRFNGIGVTQNVLYENQKLIANQFNSAIGKIQDSLSSTASALGKLQDVVNQNAQALNTLVKQLSSNFGCISSVLNDILSRLDKVEAEVQIDCLITGRLQSLQTYVTQQLIRAAEIRASANLAATKMSECVLGQSKRVDFCGKGYHLMSFPQSAPHGVVFLHVTYVPAQEKNFTTAPAICHDGKAHFPREGVFVSNGTHWFVTQRNFYEPQIITTDNTFVSGNCDVVIGIVNNTVYDPLQPELDSGGGSGGGQIYEGKLTAEGLRFGIVASRFNHALVDRLVEGAIDAIVRHGGREEDITLVRVPGSWEIPVAAGELARKEDIDAVIAIGVLIRGATPHFDYIASEVSKGLADLSLELRKPITFGVITADTLEQAIERAGTKHGNKGWEAALSAIEMANLFKSLR

SEQ ID NO: 8510 - protein, 1306 aa, Artificial Sequence
  SARS-CoV-2/India/1-27/2020__EPI_ISL_413522 spike protein (1-1146)(A971C_R994C) LumSynth construct
MFVFLVLLPLVSSQCVNLTTRTQLPPAYTNSFTRGVYYPDKVFRSSVLHSTQDLFLPFFSNVTWFHAIHVSGTNGTKRFDNPVLPFNDGVYFASTEKSNIIRGWIFGTTLDSKTQSLLIVNNATNVVIKVCEFQFCNDPFLGVYHKNNKSWMESEFRVYSSANNCTFEYVSQPFLMDLEGKQGNFKNLREFVFKNIDGYFKIYSKHTPINLVRDLPQGFSALEPLVDLPIGINITRFQTLLALHRSYLTPGDSSSGWTAGAAAYYVGYLQPRTFLLKYNENGTITDAVDCALDPLSETKCTLKSFTVEKGIYQTSNFRVQPTESIVRFPNITNLCPFGEVFNATRFASVYAWNRKRISNCVADYSVLYNSASFSTFKCYGVSPTKLNDLCFTNVYADSFVIRGDEVIQIAPGQTGKIADYNYKLPDDFTGCVIAWNSNNLDSKVGGNYNYLYRLFRKSNLKPFERDISTEIYQAGSTPCNGVEGFNCYFPLQSYGFQPTNGVGYQPYRVVVLSFELLHAPATVCGPKKSTNLVKNKCVNFNFNGLTGTGVLTESNKKFLPFQQFGRDIADTTDAVRDPQTLEILDITPCSFGGVSVITPGTNTSNQVAVLYQDVNCTEVPVAIHADQLTPTWRVYSTGSNVFQTRAGCLIGAEHVNNSYECDIPIGAGICASYQTQTNSPRRARSVASQSIIAYTMSLGAENSVAYSNNSIAIPTNFTISVTTEILPVSMTKTSVDCTMYICGDSTECSNLLLQYGSFCTQLNRALTGIAVEQDKNTQEVFAQVKQIYKTPPIKDFGGFNFSQILPDPSKPSKRSFIEDLLFNKVTLADAGFIKQYGDCLGDIAARDLICAQKFNGLTVLPPLLTDEMIAQYTSALLAGTITSGWTFGAGAALQIPFAMQMAYRFNGIGVTQNVLYENQKLIANQFNSAIGKIQDSLSSTASALGKLQDVVNQNAQALNTLVKQLSSNFGCISSVLNDILSRLDKVEAEVQIDCLITGRLQSLQTYVTQQLIRAAEIRASANLAATKMSECVLGQSKRVDFCGKGYHLMSFPQSAPHGVVFLHVTYVPAQEKNFTTAPAICHDGKAHFPREGVFVSNGTHWFVTQRNFYEPQIITTDNTFVSGNCDVVIGIVNNTVYDPLQPELDSGGGSGGGQIYEGKLTAEGLRFGIVASRFNHALVDRLVEGAIDAIVRHGGREEDITLVRVPGSWEIPVAAGELARKEDIDAVIAIGVLIRGATPHFDYIASEVSKGLADLSLELRKPITFGVITADTLEQAIERAGTKHGNKGWEAALSAIEMANLFKSLR

SEQ ID NO: 8511 - protein, 1301 aa, Artificial Sequence
  SARS-CoV-2/pangolin/Guangxi/P4L/2017__EPI_ISL_410538 spike protein (1-1141)(A966C_R989C) LumSynth construct
MFVFLFVLPLVSSQCVNLTTRTGIPPGYTNSSTRGVYYPDKVFRSSILHLTQDLFLPFFSNVTWFNTINYQGGFKKFDNPVLPFNDGVYFASTEKSNIIRGWIFGTTLDARTQSLLIVNNATNVVIKVCEFQFCTDPFLGVYYHNNNKTWVENEFRVYSSANNCTFEYISQPFLMDLEGKQGNFKNLREFVFKNVDGYFKIYSKHTPIDLVRDLPRGFAALEPLVDLPIGINITRFQTLLALHRSYLTPGNLESGWTTGAAAYYVGYLQQRTFLLSYNQNGTITDAVDCSLDPLSETKCTLKSLTVEKGIYQTSNFRVQPTISIVRFPNITNLCPFGEVFNASKFASVYAWNRKRISNCVADYSVLYNSTSFSTFKCYGVSPTKLNDLCFTNVYADSFVVKGDEVRQIAPGQTGVIADYNYKLPDDFTGCVIAWNSVKQDALTGGNYGYLYRLFRKSKLKPFERDISTEIYQAGSTPCNGQVGLNCYYPLERYGFHPTTGVNYQPFRVVVLSFELLNGPATVCGPKLSTTLVKDKCVNFNFNGLTGTGVLTTSKKQFLPFQQFGRDISDTTDAVRDPQTLEILDITPCSFGGVSVITPGTNTSNQVAVLYQDVNCTEVPMAIHAEQLTPAWRVYSAGANVFQTRAGCLVGAEHVNNSYECDIPVGAGICASYHSMSSLRSVNQRSIIAYTMSLGAENSVAYSNNSIAIPTNFTISVTTEILPVSMTKTSVDCTMYICGDSIECSNLLLQYGSFCTQLNRALTGIAVEQDKNTQEVFAQVKQIYKTPPIKDFGGFNFSQILPDPSKPSKRSFIEDLLFNKVTLADAGFIKQYGDCLGDIAARDLICAQKFNGLTVLPPLLTDEMIAQYTSALLAGTITSGWTFGAGAALQIPFAMQMAYRFNGIGVTQNVLYENQKLIANQFNSAIGKIQDSLSSTASALGKLQDVVNQNAQALNTLVKQLSSNFGCISSVLNDILSRLDKVEAEVQIDCLITGRLQSLQTYVTQQLIRAAEIRASANLAATKMSECVLGQSKRVDFCGKGYHLMSFPQSAPHGVVFLHVTYVPAQEKNFTTAPAICHEGKAHFPREGVFVSNGTHWFITQRNFYEPQIITTDNTFVSGSCDVVIGIVNNTVYDPLQPELDSGGGSGGGQIYEGKLTAEGLRFGIVASRFNHALVDRLVEGAIDAIVRHGGREEDITLVRVPGSWEIPVAAGELARKEDIDAVIAIGVLIRGATPHFDYIASEVSKGLADLSLELRKPITFGVITADTLEQAIERAGTKHGNKGWEAALSAIEMANLFKSLR

SEQ ID NO: 8512 - protein, 1301 aa, Artificial Sequence
  SARS-CoV-2/pangolin/Guangxi/P5L/2017__EPI_ISL_410540 spike protein (1-1141)(A966C_R989C) LumSynth construct
MFVFLFVLPLVSSQCVNLTTRTGIPPGYTNSSTRGVYYPDKVFRSSILHLTQDLFLPFFSNVTWFNTINYQGGFKKFDNPVLPFNDGVYFASTEKSNIIRGWIFGTTLDARTQSLLIVNNATNVVIKVCEFQFCTDPFLGVYYHNNNKTWVENEFRVYSSANNCTFEYISQPFLMDLEGKQGNFKNLREFVFKNVDGYFKIYSKHTPIDLVRDLPRGFAALEPLVDLPIGINITRFQTLLALHRSYLTPGKLESGWTTGAAAYYVGYLQQRTFLLSYNQNGTITDAVDCSLDPLSETKCTLKSLTVEKGIYQTSNFRVQPTISIVRFPNITNLCPFGEVFNASKFASVYAWNRKRISNCVADYSVLYNSTSFSTFKCYGVSPTKLNDLCFTNVYADSFVVKGDEVRQIAPGQTGVIADYNYKLPDDFTGCVIAWNSVKQDALTGGNYGYLYRLFRKSKLKPFERDISTEIYQAGSTPCNGQVGLNCYYPLERYGFHPTTGVNYQPFRVVVLSFELLNGPATVCGPKLSTTLVKDKCVNFNFNGLTGTGVLTTSKKQFLPFQQFGRDISDTTDAVRDPQTLEILDITPCSFGGVSVITPGTNTSNQVAVLYQDVNCTEVPMAIHAEQLTPAWRVYSAGANVFQTRAGCLVGAEHVNNSYECDIPVGAGICASYHSMSSFRSVNQRSIIAYTMSLGAENSVAYSNNSIAIPTNFTISVTTEILPVSMTKTSVDCTMYICGDSIECSNLLLQYGSFCTQLNRALTGIAVEQDKNTQEVFAQVKQIYKTPPIKDFGGFNFSQILPDPSKPSKRSFIEDLLFNKVTLADAGFIKQYGDCLGDIAARDLICAQKFNGLTVLPPLLTDEMIAQYTSALLAGTITSGWTFGAGAALQIPFAMQMAYRFNGIGVTQNVLYENQKLIANQFNSAIGKIQDSLSSTASALGKLQDVVNQNAQALNTLVKQLSSNFGCISSVLNDILSRLDKVEAEVQIDCLITGRLQSLQTYVTQQLIRAAEIRASANLAATKMSECVLGQSKRVDFCGKGYHLMSFPQSAPHGVVFLHVTYVPAQEKNFTTAPAICHEGKAHFPREGVFVSNGTHWFITQRNFYEPQIITTDNTFVSGSCDVVIGIVNNTVYDPLQPELDSGGGSGGGQIYEGKLTAEGLRFGIVASRFNHALVDRLVEGAIDAIVRHGGREEDITLVRVPGSWEIPVAAGELARKEDIDAVIAIGVLIRGATPHFDYIASEVSKGLADLSLELRKPITFGVITADTLEQAIERAGTKHGNKGWEAALSAIEMANLFKSLR

SEQ ID NO: 8513 - protein, 1301 aa, Artificial Sequence
  SARS-CoV-2/pangolin/Guangxi/P5E/2017__EPI_ISL_410541 spike protein (1-1141)(A966C_R989C) LumSynth construct
MFVFLFVLPLVSSQCVNLTTRTGIPPGYTNSSTRGVYYPDKVFRSSILHLTQDLFLPFFSNVTWFNTITYQGGSKKFDNPVLPFNDGVYFASTEKSNIIRGWIFGTTLDARTQSLLIVNNATNVVIKVCEFQFCTDPFLGVYYHNNNKTWVENEFRVYSSANNCTFEYISQPFLMDLEGKQGNFKNLREFVFKNVDGYFKIYSKHTPIDLVRDLPRGFAALEPLVDLPIGINITRFQTLLALHRSYLTPGKLESGWTTGAAAYYVGYLQQRTFLLSYNQNGTITDAVDCSLDPLSETKCTLKSLTVEKGIYQTSNFRVQPTISIVRFPNITNLCPFGEVFNASKFASVYAWNRKRISNCVADYSVLYNSTSFSTFKCYGVSPTKLNDLCFTNVYADSFVVKGDEVRQIAPGQTGVIADYNYKLPDDFTGCVIAWNSVKQDALTGDNYGYLYRLFRKSKLKPFERDISTEIYQAGSTPCNGQVGLNCYYPLERYGFHPTTGVNYQPFRVVVLSFELLNGPATVCGPKLSTTLVKDKCVNFNFNGLTGTGVLTTSKKQFLPFQQFGRDISDTTDAVRDPQTLEILDITPCSFGGVSVITPGTNTSNQVAVLYQDVNCTEVPMAIHAEQLTPAWRVYSAGANVFQTRAGCLVGAEHVNNSYECDIPVGAGICASYHSMSSFRSVNQRSIIAYTMSLGAENSVAYSNNSIAIPTNFTISVTTEILPVSMTKTSVDCTMYICGDSIECSNLLLQYGSFCTQLNRALTGIAVEQDKNTQEVFAQVKQIYKTPPIKDFGGFNFSQILPDPSKPSKRSFIEDLLFNKVTLADAGFIKQYGDCLGDIAARDLICAQKFNGLTVLPPLLTDEMIAQYTSALLAGTITSGWTFGAGAALQIPFAMQMAYRFNGIGVTQNVLYENQKLIANQFNSAIGKIQDSLSSTASALGKLQDVVNQNAQALNTLVKQLSSNFGCISSVLNDILSRLDKVEAEVQIDCLITGRLQSLQTYVTQQLIRAAEIRASANLAATKMSECVLGQSKRVDFCGKGYHLMSFPQSAPHGVVFLHVTYVPAQEKNFTTAPAICHEGKAHFPREGVFVSNGTHWFITQRNFYEPQIITTDNTFVSGSCDVVIGIVNNTVYDPLQPELDSGGGSGGGQIYEGKLTAEGLRFGIVASRFNHALVDRLVEGAIDAIVRHGGREEDITLVRVPGSWEIPVAAGELARKEDIDAVIAIGVLIRGATPHFDYIASEVSKGLADLSLELRKPITFGVITADTLEQAIERAGTKHGNKGWEAALSAIEMANLFKSLR

SEQ ID NO: 8514 - protein, 1299 aa, Artificial Sequence
  SARS-CoV-2/pangolin/Guangxi/P1E/2017__EPI_ISL_410539 spike protein (1-1139)(A964C_R987C) LumSynth construct
MFVFLFVLPLVSSQCVNLTTRTGIQPGYTNSSTRGVYYPDKVFRSSILHLTQDLFLPFFSNVTWFNTINYQGGFKKFDNPVLPFNDGVYFASTEKSNIIRGWIFGTTLDARTQSLLIVNNATNVVIKVCEFQFCTDPFLGVYYHNNNKTWVENEFRVYSSANNCTFEYISQPFLMDLEGKQGNFKNLREFVFKNVDGYFKIYSKHTPIDLVRDLPRGFAALEPLVDLPIGINITRFQTLLALHRSYLTPGKLESGWTTGAAAYYVGYLQQRTFLLSYNQNGTITDAVDCSLDPLSETKCTLKSLTVEKGIYQTSNFRVQPTISIVRFPNITNLCPFGEVFNASKFASVYAWNRKRISNCVADYSVLYNSTSFSTFKCYGVSPTKLNDLCFTNVYADSFVVKGDEVRQIAPGQTGVIADYNYKLPDDFTGCVIAWNSVKQDALTGGNYLYRLFRKSKLKPFERDISTEIYQAGSTPCNGQVGLNCYYPLERYGFHPTTGVNYQPFRVVVLSFELLNGPATVCGPKLSTTLVKDKCVNFNFNGLTGTGVLTTSKKQFLPFQQFGRDISDTTDAVRDPQTLEILDITPCSFGGVSVITPGTNTSNQVAVLYQDVNCTEVPMAIHAEQLTPAWRVYSAGANVFQTRAGCLVGAEHVNNSYECDIPVGAGICASYHSMSSLRSVNQRSIIAYTMSLGAENSVAYSNNSIAIPTNFTISVTTEILPVSMTKTSVDCTMYICGDSIECSNLLLQYGSFCTQLNRALTGIAVEQDKNTQEVFAQVKQIYKTPPIKDFGGFNFSQILPDPSKPSKRSFIEDLLFNKVTLADAGFIKQYGDCLGDIAARDLICAQKFNGLTVLPPLLTDEMIAQYTSALLAGTITSGWTFGAGAALQIPFAMQMAYRFNGIGVTQNVLYENQKLIANQFNSAIGKIQDSLSSTASALGKLQDVVNQNAQALNTLVKQLSSNFGCISSVLNDILSRLDKVEAEVQIDCLITGRLQSLQTYVTQQLIRAAEIRASANLAATKMSECVLGQSKRVDFCGKGYHLMSFPQSAPHGVVFLHVTYVPAQEKNFTTAPAICHEGKAHFPREGVFVSNGTHWFITQRNFYEPQIITTDNTFVSGSCDVVIGIVNNTVYDPLQPELDSGGGSGGGQIYEGKLTAEGLRFGIVASRFNHALVDRLVEGAIDAIVRHGGREEDITLVRVPGSWEIPVAAGELARKEDIDAVIAIGVLIRGATPHFDYIASEVSKGLADLSLELRKPITFGVITADTLEQAIERAGTKHGNKGWEAALSAIEMANLFKSLR

SEQ ID NO: 8515 - protein, 1307 aa, Artificial Sequence
  SARS-CoV-2/Wuhan/WIV05/2019__EPI_ISL_402128 spike protein (1-1147)(A890C_V1040C) LumSynth construct
MFVFLVLLPLVSSQCVNLTTRTQLPPAYTNSFTRGVYYPDKVFRSSVLHSTQDLFLPFFSNVTWFHAIHVSGTNGTKRFDNPVLPFNDGVYFASTEKSNIIRGWIFGTTLDSKTQSLLIVNNATNVVIKVCEFQFCNDPFLGVYYHKNNKSWMESEFRVYSSANNCTFEYVSQPFLMDLEGKQGNFKNLREFVFKNIDGYFKIYSKHTPINLVRDLPQGFSALEPLVDLPIGINITRFQTLLALHRSYLTPGDSSSGWTAGAAAYYVGYLQPRTFLLKYNENGTITDAVDCALDPLSETKCTLKSFTVEKGIYQTSNFRVQPTESIVRFPNITNLCPFGEVFNATRFASVYAWNRKRISNCVADYSVLYNSASFSTFKCYGVSPTKLNDLCFTNVYADSFVIRGDEVRQIAPGQTGKIADYNYKLPDDFTGCVIAWNSNNLDSKVGGNYNYLYRLFRKSNLKPFERDISTEIYQAGSTPCNGVEGFNCYFPLQSYGFQPTNGVGYQPYRVVVLSFELLHAPATVCGPKKSTNLVKNKCVNFNFNGLTGTGVLTESNKKFLPFQQFGRDIADTTDAVRDPQTLEILDITPCSFGGVSVITPGTNTSNQVAVLYQDVNCTEVPVAIHADQLTPTWRVYSTGSNVFQTRAGCLIGAEHVNNSYECDIPIGAGICASYQTQTNSPRRARSVASQSIIAYTMSLGAENSVAYSNNSIAIPTNFTISVTTEILPVSMTKTSVDCTMYICGDSTECSNLLLQYGSFCTQLNRALTGIAVEQDKNTQEVFAQVKQIYKTPPIKDFGGFNFSQILPDPSKPSKRSFIEDLLFNKVTLADAGFIKQYGDCLGDIAARDLICAQKFNGLTVLPPLLTDEMIAQYTSALLAGTITSGWTFGCGAALQIPFAMQMAYRFNGIGVTQNVLYENQKLIANQFNSAIGKIQDSLSSTASALGKLQDVVNQNAQALNTLVKQLSSNFGAISSVLNDILSRLDKVEAEVQIDRLITGRLQSLQTYVTQQLIRAAEIRASANLAATKMSECVLGQSKRCDFCGKGYHLMSFPQSAPHGVVFLHVTYVPAQEKNFTTAPAICHDGKAHFPREGVFVSNGTHWFVTQRNFYEPQIITTDNTFVSGNCDVVIGIVNNTVYDPLQPELDSGGGSGGGQIYEGKLTAEGLRFGIVASRFNHALVDRLVEGAIDAIVRHGGREEDITLVRVPGSWEIPVAAGELARKEDIDAVIAIGVLIRGATPHFDYIASEVSKGLADLSLELRKPITFGVITADTLEQAIERAGTKHGNKGWEAALSAIEMANLFKSLR

SEQ ID NO: 8516 - protein, 1303 aa, Artificial Sequence; identical to SEQ ID NO: 8248
  SARS-CoV-2/bat/Yunnan/RaTG13/2013__EPI_ISL_402131 spike protein (1-1143)(A886C_V1036C) LumSynth construct

SEQ ID NO: 8517 - protein, 1307 aa, Artificial Sequence; identical to SEQ ID NO: 8249
  SARS-CoV-2/Wuhan/HBCDC-HB-01/2019__EPI_ISL_402132 spike protein (1-1147)(A890C_V1040C) LumSynth construct

SEQ ID NO: 8518 - protein, 1307 aa, Artificial Sequence; identical to SEQ ID NO: 8250
  SARS-CoV-2/Guangdong/20SF028/2020__EPI_ISL_403936 spike protein (1-1147)(A890C_V1040C) LumSynth construct

SEQ ID NO: 8519 - protein, 1307 aa, Artificial Sequence; identical to SEQ ID NO: 8251
  SARS-CoV-2/Shenzhen/SZTH-001/2020__EPI_ISL_406592 spike protein (1-1147)(A890C_V1040C) LumSynth construct

SEQ ID NO: 8520 - protein, 1307 aa, Artificial Sequence; identical to SEQ ID NO: 8252
  SARS-CoV-2/Shenzhen/SZTH-004/2020__EPI_ISL_406595 spike protein (1-1147)(A890C_V1040C) LumSynth construct

SEQ ID NO: 8521 - protein, 1307 aa, Artificial Sequence; identical to SEQ ID NO: 8253
  SARS-CoV-2/France/IDF0372/2020__EPI_ISL_406596 spike protein (1-1147)(A890C_V1040C) LumSynth construct

SEQ ID NO: 8522 - protein, 1307 aa, Artificial Sequence; identical to SEQ ID NO: 8254
  SARS-CoV-2/Australia/VIC01/2020__EPI_ISL_406844 spike protein (1-1147)(A890C_V1040C) LumSynth construct

SEQ ID NO: 8523 - protein, 1307 aa, Artificial Sequence; identical to SEQ ID NO: 8255
  SARS-CoV-2/Germany/BavPat1/2020__EPI_ISL_406862 spike protein (1-1147)(A890C_V1040C) LumSynth construct

SEQ ID NO: 8524 - protein, 1307 aa, Artificial Sequence; identical to SEQ ID NO: 8256
  SARS-CoV-2/Wuhan/HBCDC-HB-02/2020__EPI_ISL_412978 spike protein (1-1147)(A890C_V1040C) LumSynth construct

SEQ ID NO: 8525 - protein, 1307 aa, Artificial Sequence; identical to SEQ ID NO: 8257
  SARS-CoV-2/Australia/QLD02/2020__EPI_ISL_407896 spike protein (1-1147)(A890C_V1040C) LumSynth construct

SEQ ID NO: 8526 - protein, 1307 aa, Artificial Sequence; identical to SEQ ID NO: 8258
  SARS-CoV-2/India/1-31/2020__EPI_ISL_413523 spike protein (1-1147)(A890C_V1040C) LumSynth construct

SEQ ID NO: 8527 - protein, 1307 aa, Artificial Sequence; identical to SEQ ID NO: 8259
  SARS-CoV-2/Guangdong/GD2020087-P0008/2020__EPI_ISL_413863 spike protein (1-1147)(A890C_V1040C) LumSynth construct

SEQ ID NO: 8528 - protein, 1307 aa, Artificial Sequence; identical to SEQ ID NO: 8260
  SARS-CoV-2/Sweden/01/2020__EPI_ISL_411951 spike protein (1-1147)(A890C_V1040C) LumSynth construct

SEQ ID NO: 8529 - protein, 1307 aa, Artificial Sequence; identical to SEQ ID NO: 8261
  SARS-CoV-2/Tianmen/HBCDC-HB-07/2020__EPI_ISL_412983 spike protein (1-1147)(A890C_V1040C) LumSynth construct

SEQ ID NO: 8530 - protein, 1307 aa, Artificial Sequence; identical to SEQ ID NO: 8262
  SARS-CoV-2/Hong Kong/case42_VM20002493/2020__EPI_ISL_414527 spike protein (1-1147)(A890C_V1040C) LumSynth construct

SEQ ID NO: 8531 - protein, 1307 aa, Artificial Sequence; identical to SEQ ID NO: 8263
  SARS-CoV-2/USA/CruiseA-23/2020__EPI_ISL_414482 spike protein (1-1147)(A890C_V1040C) LumSynth construct

SEQ ID NO: 8532 - protein, 1307 aa, Artificial Sequence; identical to SEQ ID NO: 8264
  SARS-CoV-2/Hong Kong/case85_VM20002868/2020__EPI_ISL_414519 spike protein (1-1147)(A890C_V1040C) LumSynth construct

SEQ ID NO: 8533 - protein, 1307 aa, Artificial Sequence; identical to SEQ ID NO: 8255
  SARS-CoV-2/England/200990660/2020__EPI_ISL_414523 spike protein (1-1147)(A890C_V1040C) LumSynth construct

SEQ ID NO: 8534 - protein, 1307 aa, Artificial Sequence; identical to SEQ ID NO: 8266
  SARS-CoV-2/Australia/NSW09/2020__EPI_ISL_413595 spike protein (1-1147)(A890C_V1040C) LumSynth construct

SEQ ID NO: 8535 - protein, 1307 aa, Artificial Sequence; identical to SEQ ID NO: 8247
  SARS-CoV-2/Australia/NSW10/2020__EPI_ISL_413596 spike protein (1-1147)(A890C_V1040C) LumSynth construct

SEQ ID NO: 8536 - protein, 1307 aa, Artificial Sequence; identical to SEQ ID NO: 8268
  SARS-CoV-2/Switzerland/1000477797/2020__EPI_ISL_413023 spike protein (1-1147)(A890C_V1040C) LumSynth construct

SEQ ID NO: 8537 - protein, 1307 aa, Artificial Sequence; identical to SEQ ID NO: 8269
  SARS-CoV-2/Belgium/BA-02291/2020__EPI_ISL_415159 spike protein (1-1147)(A890C_V1040C) LumSynth construct

SEQ ID NO: 8538 - protein, 1307 aa, Artificial Sequence; identical to SEQ ID NO: 8270
  SARS-CoV-2/USA/WA8-UW5/2020__EPI_ISL_413486 spike protein (1-1147)(A890C_V1040C) LumSynth construct

SEQ ID NO: 8539 - protein, 1307 aa, Artificial Sequence; identical to SEQ ID NO: 8271
  SARS-CoV-2/England/20102000506/2020__EPI_ISL_415147 spike protein (1-1147)(A890C_V1040C) LumSynth construct

SEQ ID NO: 8540 - protein, 1307 aa, Artificial Sequence; identical to SEQ ID NO: 8272
  SARS-CoV-2/Belgium/VAG-03013/2020__EPI_ISL_415155 spike protein (1-1147)(A890C_V1040C) LumSynth construct

SEQ ID NO: 8541 - protein, 1307 aa, Artificial Sequence; identical to SEQ ID NO: 8273
  SARS-CoV-2/Belgium/BC-03016/2020__EPI_ISL_415157 spike protein (1-1147)(A890C_V1040C) LumSynth construct

SEQ ID NO: 8542 - protein, 1307 aa, Artificial Sequence; identical to SEQ ID NO: 8274
  SARS-CoV-2/Germany/BavPat3/2020__EPI_ISL_414521 spike protein (1-1147)(A890C_V1040C) LumSynth construct

SEQ ID NO: 8543 - protein, 1307 aa, Artificial Sequence; identical to SEQ ID NO: 8275
  SARS-CoV-2/France/HF1805/2020__EPI_ISL_414628 spike protein (1-1147)(A890C_V1040C) LumSynth construct

SEQ ID NO: 8544 - protein, 1307 aa, Artificial Sequence; identical to SEQ ID NO: 8276
  SARS-CoV-2/Netherlands/ZuidHolland_9/2020__EPI_ISL_414445 spike protein (1-1147)(A890C_V1040C) LumSynth construct

SEQ ID NO: 8545 - protein, 1307 aa, Artificial Sequence; identical to SEQ ID NO: 8277
  SARS-CoV-2/Finland/FIN03032020A/2020__EPI_ISL_413602 spike protein (1-1147)(A890C_V1040C) LumSynth construct

SEQ ID NO: 8546 - protein, 1307 aa, Artificial Sequence; identical to SEQ ID NO: 8278
  SARS-CoV-2/France/GE1977/2020__EPI_ISL_414632 spike protein (1-1147)(A890C_V1040C) LumSynth construct

SEQ ID NO: 8547 - protein, 1307 aa, Artificial Sequence; identical to SEQ ID NO: 8279
  SARS-CoV-2/Finland/FIN-313/2020__EPI_ISL_414641 spike protein (1-1147)(A890C_V1040C) LumSynth construct

SEQ ID NO: 8548 - protein, 1307 aa, Artificial Sequence; identical to SEQ ID NO: 8280
  SARS-CoV-2/Netherlands/ZuidHolland_2/2020__EPI_ISL_414556 spike protein (1-1147)(A890C_V1040C) LumSynth construct

SEQ ID NO: 8549 - protein, 1307 aa, Artificial Sequence; identical to SEQ ID NO: 8281
  SARS-CoV-2/USA/WA-UW31/2020__EPI_ISL_414618 spike protein (1-1147)(A890C_V1040C) LumSynth construct

SEQ ID NO: 8550 - protein, 1307 aa, Artificial Sequence; identical to SEQ ID NO: 8282
  SARS-CoV-2/South Korea/SNU01/2020__EPI_ISL_411929 spike protein (1-1147)(A890C_V1040C) LumSynth construct

SEQ ID NO: 8551 - protein, 1307 aa, Artificial Sequence; identical to SEQ ID NO: 8283
  SARS-CoV-2/China/WF0004/2020__EPI_ISL_413694 spike protein (1-1147)(A890C_V1040C) LumSynth construct

SEQ ID NO: 8552 - protein, 1307 aa, Artificial Sequence; identical to SEQ ID NO: 8284
  SARS-CoV-2/China/WF0028/2020__EPI_ISL_413791 spike protein (1-1147)(A890C_V1040C) LumSynth construct

SEQ ID NO: 8553 - protein, 1307 aa, Artificial Sequence; identical to SEQ ID NO: 8285
  SARS-CoV-2/2019-nCoV/USA-CruiseA-18/2020__MT159716.1 spike protein (1-1147)(A890C_V1040C) LumSynth construct

SEQ ID NO: 8554 - protein, 1307 aa, Artificial Sequence; identical to SEQ ID NO: 8286
  SARS-CoV-2/SARS-CoV-2/Yunnan-01/human/2020/CHN__MT049951.1 spike protein (1-1147)(A890C_V1040C) LumSynth construct

SEQ ID NO: 8555 - protein, 1307 aa, Artificial Sequence; identical to SEQ ID NO: 8287
  SARS-CoV-2/USA/WA-UW292/2020__EPI_ISL_418077 spike protein (1-1147)(A890C_V1040C) LumSynth construct

SEQ ID NO: 8556 - protein, 1307 aa, Artificial Sequence; identical to SEQ ID NO: 8288
  SARS-CoV-2/Iceland/192/2020__EPI_ISL_417819 spike protein (1-1147)(A890C_V1040C) LumSynth construct

SEQ ID NO: 8557 - protein, 1307 aa, Artificial Sequence; identical to SEQ ID NO: 8289
  SARS-CoV-2/Belgium/ULG-6939/2020__EPI_ISL_417020 spike protein (1-1147)(A890C_V1040C) LumSynth construct

SEQ ID NO: 8558 - protein, 1307 aa, Artificial Sequence; identical to SEQ ID NO: 8290
  SARS-CoV-2/France/HF2496/2020__EPI_ISL_418231 spike protein (1-1147)(A890C_V1040C) LumSynth construct

SEQ ID NO: 8559 - protein, 1307 aa, Artificial Sequence; identical to SEQ ID NO: 8291
  SARS-CoV-2/USA/WA-UW291/2020__EPI_ISL_418076 spike protein (1-1147)(A890C_V1040C) LumSynth construct

SEQ ID NO: 8560 - protein, 1307 aa, Artificial Sequence; identical to SEQ ID NO: 8255
  SARS-CoV-2/Portugal/PT0034/2020__EPI_ISL_418019 spike protein (1-1147)(A890C_V1040C) LumSynth construct

SEQ ID NO: 8561 - protein, 1307 aa, Artificial Sequence; identical to SEQ ID NO: 8247
  SARS-CoV-2/Iceland/202/2020__EPI_ISL_417750 spike protein (1-1147)(A890C_V1040C) LumSynth construct

SEQ ID NO: 8562 - protein, 1307 aa, Artificial Sequence; identical to SEQ ID NO: 8294
  SARS-CoV-2/USA/WA-UW261/2020__EPI_ISL_418046 spike protein (1-1147)(A890C_V1040C) LumSynth construct

SEQ ID NO: 8563 - protein, 1307 aa, Artificial Sequence; identical to SEQ ID NO: 8295
  SARS-CoV-2/Portugal/PT0035/2020__EPI_ISL_418020 spike protein (1-1147)(A890C_V1040C) LumSynth construct

SEQ ID NO: 8564 - protein, 1307 aa, Artificial Sequence; identical to SEQ ID NO: 8296
  SARS-CoV-2/USA/NY-NYUMC7/2020__EPI_ISL_418192 spike protein (1-1147)(A890C_V1040C) LumSynth construct

SEQ ID NO: 8565 - protein, 1307 aa, Artificial Sequence; identical to SEQ ID NO: 8297
  SARS-CoV-2/Iceland/189/2020__EPI_ISL_417709 spike protein (1-1147)(A890C_V1040C) LumSynth construct

SEQ ID NO: 8566 - protein, 1307 aa, Artificial Sequence; identical to SEQ ID NO: 8298
  SARS-CoV-2/Australia/NSW56/2020__EPI_ISL_417408 spike protein (1-1147)(A890C_V1040C) LumSynth construct

SEQ ID NO: 8567 - protein, 1307 aa, Artificial Sequence; identical to SEQ ID NO: 8299
  SARS-CoV-2/Iceland/280/2020__EPI_ISL_417608 spike protein (1-1147)(A890C_V1040C) LumSynth construct

SEQ ID NO: 8568 - protein, 1307 aa, Artificial Sequence; identical to SEQ ID NO: 8255
  SARS-CoV-2/Iceland/247/2020__EPI_ISL_417575 spike protein (1-1147)(A890C_V1040C) LumSynth construct

SEQ ID NO: 8569 - protein, 1307 aa, Artificial Sequence; identical to SEQ ID NO: 8301
  SARS-CoV-2/Iceland/238/2020__EPI_ISL_417566 spike protein (1-1147)(A890C_V1040C) LumSynth construct

SEQ ID NO: 8570 - protein, 1307 aa, Artificial Sequence; identical to SEQ ID NO: 8302
  SARS-CoV-2/Greece/16/2020__EPI_ISL_418265 spike protein (1-1147)(A890C_V1040C) LumSynth construct

SEQ ID NO: 8571 - protein, 1307 aa, Artificial Sequence; identical to SEQ ID NO: 8303
  SARS-CoV-2/Iceland/319/2020__EPI_ISL_417648 spike protein (1-1147)(A890C_V1040C) LumSynth construct

SEQ ID NO: 8572 - protein, 1307 aa, Artificial Sequence; identical to SEQ ID NO: 8304
  SARS-CoV-2/Congo/94/2020__EPI_ISL_417947 spike protein (1-1147)(A890C_V1040C) LumSynth construct

SEQ ID NO: 8573 - protein, 1307 aa, Artificial Sequence; identical to SEQ ID NO: 8305
  SARS-CoV-2/Congo/158/2020__EPI_ISL_417950 spike protein (1-1147)(A890C_V1040C) LumSynth construct

SEQ ID NO: 8574 - protein, 1307 aa, Artificial Sequence; identical to SEQ ID NO: 8306
  SARS-CoV-2/USA/UT-00034/2020__EPI_ISL_417977 spike protein (1-1147)(A890C_V1040C) LumSynth construct

SEQ ID NO: 8575 - protein, 1307 aa, Artificial Sequence; identical to SEQ ID NO: 8307
  SARS-CoV-2/USA/UT-00033/2020__EPI_ISL_417976 spike protein (1-1147)(A890C_V1040C) LumSynth construct

SEQ ID NO: 8576 - protein, 1307 aa, Artificial Sequence; identical to SEQ ID NO: 8308
  SARS-CoV-2/USA/WI-13/2020__EPI_ISL_417516 spike protein (1-1147)(A890C_V1040C) LumSynth construct

SEQ ID NO: 8577 - protein, 1306 aa, Artificial Sequence; identical to SEQ ID NO: 8309
  SARS-CoV-2/India/1-27/2020__EPI_ISL_413522 spike protein (1-1146)(A889C_V1039C) LumSynth construct

SEQ ID NO: 8578 - protein, 1301 aa, Artificial Sequence; identical to SEQ ID NO: 8310
  SARS-CoV-2/pangolin/Guangxi/P4L/2017__EPI_ISL_410538 spike protein (1-1141)(A884C_V1034C) LumSynth construct

SEQ ID NO: 8579 - protein, 1301 aa, Artificial Sequence; identical to SEQ ID NO: 8311
  SARS-CoV-2/pangolin/Guangxi/P5L/2017__EPI_ISL_410540 spike protein (1-1141)(A884C_V1034C) LumSynth construct

SEQ ID NO: 8580 - protein, 1301 aa, Artificial Sequence; identical to SEQ ID NO: 8312
  SARS-CoV-2/pangolin/Guangxi/P5E/2017__EPI_ISL_410541 spike protein (1-1141)(A884C_V1034C) LumSynth construct

SEQ ID NO: 8581 - protein, 1299 aa, Artificial Sequence; identical to SEQ ID NO: 8313
  SARS-CoV-2/pangolin/Guangxi/P1E/2017__EPI_ISL_410539 spike protein (1-1139)(A882C_V1032C) LumSynth construct

SEQ ID NO: 8582 - protein, 1307 aa, Artificial Sequence
  SARS-CoV-2/Wuhan/WIV05/2019__EPI_ISL_402128 spike protein (1-1147)(T874C_S1055C) LumSynth construct
MFVFLVLLPLVSSQCVNLTTRTQLPPAYTNSFTRGVYYPDKVFRSSVLHSTQDLFLPFFSNVTWFHAIHVSGTNGTKRFDNPVLPFNDGVYFASTEKSNIIRGWIFGTTLDSKTQSLLIVNNATNVVIKVCEFQFCNDPFLGVYYHKNNKSWMESEFRVYSSANNCTFEYVSQPFLMDLEGKQGNFKNLREFVFKNIDGYFKIYSKHTPINLVRDLPQGFSALEPLVDLPIGINITRFQTLLALHRSYLTPGDSSSGWTAGAAAYYVGYLQPRTFLLKYNENGTITDAVDCALDPLSETKCTLKSFTVEKGIYQTSNFRVQPTESIVRFPNITNLCPFGEVFNATRFASVYAWNRKRISNCVADYSVLYNSASFSTFKCYGVSPTKLNDLCFTNVYADSFVIRGDEVRQIAPGQTGKIADYNYKLPDDFTGCVIAWNSNNLDSKVGGNYNYLYRLFRKSNLKPFERDISTEIYQAGSTPCNGVEGFNCYFPLQSYGFQPTNGVGYQPYRVVVLSFELLHAPATVCGPKKSTNLVKNKCVNFNFNGLTGTGVLTESNKKFLPFQQFGRDIADTTDAVRDPQTLEILDITPCSFGGVSVITPGTNTSNQVAVLYQDVNCTEVPVAIHADQLTPTWRVYSTGSNVFQTRAGCLIGAEHVNNSYECDIPIGAGICASYQTQTNSPRRARSVASQSIIAYTMSLGAENSVAYSNNSIAIPTNFTISVTTEILPVSMTKTSVDCTMYICGDSTECSNLLLQYGSFCTQLNRALTGIAVEQDKNTQEVFAQVKQIYKTPPIKDFGGFNFSQILPDPSKPSKRSFIEDLLFNKVTLADAGFIKQYGDCLGDIAARDLICAQKFNGLTVLPPLLTDEMIAQYCSALLAGTITSGWTFGAGAALQIPFAMQMAYRFNGIGVTQNVLYENQKLIANQFNSAIGKIQDSLSSTASALGKLQDVVNQNAQALNTLVKQLSSNFGAISSVLNDILSRLDKVEAEVQIDRLITGRLQSLQTYVTQQLIRAAEIRASANLAATKMSECVLGQSKRVDFCGKGYHLMSFPQCAPHGVVFLHVTYVPAQEKNFTTAPAICHDGKAHFPREGVFVSNGTHWFVTQRNFYEPQIITTDNTFVSGNCDVVIGIVNNTVYDPLQPELDSGGGSGGGQIYEGKLTAEGLRFGIVASRFNHALVDRLVEGAIDAIVRHGGREEDITLVRVPGSWEIPVAAGELARKEDIDAVIAIGVLIRGATPHFDYIASEVSKGLADLSLELRKPITFGVITADTLEQAIERAGTKHGNKGWEAALSAIEMANLFKSLR

SEQ ID NO: 8583 - protein, 1303 aa, Artificial Sequence
  SARS-CoV-2/bat/Yunnan/RaTG13/2013__EPI_ISL_402131 spike protein (1-1143)(T870C_S1051C) LumSynth construct
MFVFLVLLPLVSSQCVNLTTRTQLPPAYTNSSTRGVYYPDKVFRSSVLHLTQDLFLPFFSNVTWFHAIHVSGTNGIKRFDNPVLPFNDGVYFASTEKSNIIRGWIFGTTLDSKTQSLLIVNNATNVVIKVCEFQFCNDPFLGVYYHKNNKSWMESEFRVYSSANNCTFEYVSQPFLMDLEGKQGNFKNLREFVFKNIDGYFKIYSKHTPINLVRDLPPGFSALEPLVDLPIGINITRFQTLLALHRSYLTPGDSSSGWTAGAAAYYVGYLQPRTFLLKYNENGTITDAVDCALDPLSETKCTLKSFTVEKGIYQTSNFRVQPTDSIVRFPNITNLCPFGEVFNATTFASVYAWNRKRISNCVADYSVLYNSTSFSTFKCYGVSPTKLNDLCFTNVYADSFVITGDEVRQIAPGQTGKIADYNYKLPDDFTGCVIAWNSKHIDAKEGGNFNYLYRLFRKANLKPFERDISTEIYQAGSKPCNGQTGLNCYYPLYRYGFYPTDGVGHQPYRVVVLSFELLNAPATVCGPKKSTNLVKNKCVNFNFNGLTGTGVLTESNKKFLPFQQFGRDIADTTDAVRDPQTLEILDITPCSFGGVSVITPGTNASNQVAVLYQDVNCTEVPVAIHADQLTPTWRVYSTGSNVFQTRAGCLIGAEHVNNSYECDIPIGAGICASYQTQTNSRSVASQSIIAYTMSLGAENSVAYSNNSIAIPTNFTISVTTEILPVSMTKTSVDCTMYICGDSTECSNLLLQYGSFCTQLNRALTGIAVEQDKNTQEVFAQVKQIYKTPPIKDFGGFNFSQILPDPSKPSKRSFIEDLLFNKVTLADAGFIKQYGDCLGDIAARDLICAQKFNGLTVLPPLLTDEMIAQYCSALLAGTITSGWTFGAGAALQIPFAMQMAYRFNGIGVTQNVLYENQKLIANQFNSAIGKIQDSLSSTASALGKLQDVVNQNAQALNTLVKQLSSNFGAISSVLNDILSRLDKVEAEVQIDRLITGRLQSLQTYVTQQLIRAAEIRASANLAATKMSECVLGQSKRVDFCGKGYHLMSFPQCAPHGVVFLHVTYVPAQEKNFTTAPAICHDGKAHFPREGVFVSNGTHWFVTQRNFYEPQIITTDNTFVSGSCDVVIGIVNNTVYDPLQPELDSGGGSGGGQIYEGKLTAEGLRFGIVASRFNHALVDRLVEGAIDAIVRHGGREEDITLVRVPGSWEIPVAAGELARKEDIDAVIAIGVLIRGATPHFDYIASEVSKGLADLSLELRKPITFGVITADTLEQAIERAGTKHGNKGWEAALSAIEMANLFKSLR

SEQ ID NO: 8584 - protein, 1307 aa, Artificial Sequence
  SARS-CoV-2/Wuhan/HBCDC-HB-01/2019__EPI_ISL_402132 spike protein (1-1147)(T874C_S1055C) LumSynth construct
MFVFLVLLPLVSSQCVNLTTRTQLPPAYTNSITRGVYYPDKVFRSSVLHSTQDLFLPFFSNVTWFHAIHVSGTNGTKRFDNPVLPFNDGVYFASTEKSNIIRGWIFGTTLDSKTQSLLIVNNATNVVIKVCEFQFCNDPFLGVYYHKNNKSWMESEFRVYSSANNCTFEYVSQPFLMDLEGKQGNFKNLREFVFKNIDGYFKIYSKHTPINLVRDLPQGFSALEPLVDLPIGINITRFQTLLALHRSYLTPGDSSSGWTAGAAAYYVGYLQPRTFLLKYNENGTITDAVDCALDPLSETKCTLKSFTVEKGIYQTSNFRVQPTESIVRFPNITNLCPFGEVFNATRFASVYAWNRKRISNCVADYSVLYNSASFSTFKCYGVSPTKLNDLCFTNVYADSFVIRGDEVRQIAPGQTGKIADYNYKLPDDFTGCVIAWNSNNLDSKVGGNYNYLYRLFRKSNLKPFERDISTEIYQAGSTPCNGVEGFNCYFPLQSYGFQPTNGVGYQPYRVVVLSFELLHAPATVCGPKKSTNLVKNKCVNFNFNGLTGTGVLTESNKKFLPFQQFGRDIADTTDAVRDPQTLEILDITPCSFGGVSVITPGTNTSNQVAVLYQDVNCTEVPVAIHADQLTPTWRVYSTGSNVFQTRAGCLIGAEHVNNSYECDIPIGAGICASYQTQTNSPRRARSVASQSIIAYTMSLGAENSVAYSNNSIAIPTNFTISVTTEILPVSMTKTSVDCTMYICGDSTECSNLLLQYGSFCTQLNRALTGIAVEQDKNTQEVFAQVKQIYKTPPIKDFGGFNFSQILPDPSKPSKRSFIEDLLFNKVTLADAGFIKQYGDCLGDIAARDLICAQKFNGLTVLPPLLTDEMIAQYCSALLAGTITSGWTFGAGAALQIPFAMQMAYRFNGIGVTQNVLYENQKLIANQFNSAIGKIQDSLSSTASALGKLQDVVNQNAQALNTLVKQLSSNFGAISSVLNDILSRLDKVEAEVQIDRLITGRLQSLQTYVTQQLIRAAEIRASANLAATKMSECVLGQSKRVDFCGKGYHLMSFPQCAPHGVVFLHVTYVPAQEKNFTTAPAICHDGKAHFPREGVFVSNGTHWFVTQRNFYEPQIITTDNTFVSGNCDVVIGIVNNTVYDPLQPELDSGGGSGGGQIYEGKLTAEGLRFGIVASRFNHALVDRLVEGAIDAIVRHGGREEDITLVRVPGSWEIPVAAGELARKEDIDAVIAIGVLIRGATPHFDYIASEVSKGLADLSLELRKPITFGVITADTLEQAIERAGTKHGNKGWEAALSAIEMANLFKSLR

SEQ ID NO: 8585 - protein, 1307 aa, Artificial Sequence
  SARS-CoV-2/Guangdong/20SF028/2020__EPI_ISL_403936 spike protein (1-1147)(T874C_S1055C) LumSynth construct
MFVFLVLLPLVSSQCVNLTTRTQLPPAYTNSFTRGVYYPDKVFRSSVLYSTQDLFLPFFSNVTWFHAIHVSGTNGTKRFDNPVLPFNDGVYFASTEKSNIIRGWIFGTTLDSKTQSLLIVNNATNVVIKVCEFQFCNDPFLGVYYHKNNKSWMESEFRVYSSANNCTFEYVSQPFLMDLEGKQGNFKNLREFVFKNIDGYFKIYSKHTPINLVRDLPQGFSALEPLVDLPIGINITRFQTLLALHRSYLTPGDSSSGWTAGAAAYYVGYLQPRTFLLKYNENGTITDAVDCALDPLSETKCTLKSFTVEKGIYQTSNFRVQPTESIVRFPNITNLCPFGEVFNATRFASVYAWNRKRISNCVADYSVLYNSASFSTFKCYGVSPTKLNDLCFTNVYADSFVIRGDEVRQIAPGQTGKIADYNYKLPDDFTGCVIAWNSNNLDSKVGGNYNYLYRLFRKSNLKPFERDISTEIYQAGSTPCNGVEGFNCYFPLQSYGFQPTNGVGYQPYRVVVLSFELLHAPATVCGPKKSTNLVKNKCVNFNFNGLTGTGVLTESNKKFLPFQQFGRDIADTTDAVRDPQTLEILDITPCSFGGVSVITPGTNTSNQVAVLYQDVNCTEVPVAIHADQLTPTWRVYSTGSNVFQTRAGCLIGAEHVNNSYECDIPIGAGICASYQTQTNSPRRARSVASQSIIAYTMSLGAENSVAYSNNSIAIPTNFTISVTTEILPVSMTKTSVDCTMYICGDSTECSNLLLQYGSFCTQLNRALTGIAVEQDKNTQEVFAQVKQIYKTPPIKDFGGFNFSQILPDPSKPSKRSFIEDLLFNKVTLADAGFIKQYGDCLGDIAARDLICAQKFNGLTVLPPLLTDEMIAQYCSALLAGTITSGWTFGAGAALQIPFAMQMAYRFNGIGVTQNVLYENQKLIANQFNSAIGKIQDSLSSTASALGKLQDVVNQNAQALNTLVKQLSSNFGAISSVLNDILSRLDKVEAEVQIDRLITGRLQSLQTYVTQQLIRAAEIRASANLAATKMSECVLGQSKRVDFCGKGYHLMSFPQCAPHGVVFLHVTYVPAQEKNFTTAPAICHDGKAHFPREGVFVSNGTHWFVTQRNFYEPQIITTDNTFVSGNCDVVIGIVNNTVYDPLQPELDSGGGSGGGQIYEGKLTAEGLRFGIVASRFNHALVDRLVEGAIDAIVRHGGREEDITLVRVPGSWEIPVAAGELARKEDIDAVIAIGVLIRGATPHFDYIASEVSKGLADLSLELRKPITFGVITADTLEQAIERAGTKHGNKGWEAALSAIEMANLFKSLR

SEQ ID NO: 8586 - protein, 1307 aa, Artificial Sequence
  SARS-CoV-2/Shenzhen/SZTH-001/2020__EPI_ISL_406592 spike protein (1-1147)(T874C_S1055C) LumSynth construct
MFVFLVLLPLVSSQCVNLTTRTQLPPAYTNSFTRGVYYPDKVFRSSVLHSTQDLFLPFFSNVTWFHAIHVSGTNGTKRFDNPVLPFNDGVYFASTEKSNIIRGWIFGTTLDSKTQSLLIVNNATNVVIKVCEFQFCNDPFLGVYYHKNNKSWMESEFRVYSSANNCTFEYVSQPFLMDLEGKQGNFKNLREFVFKNIDGYFKIYSKHTPINLVRDLPQGFSALEPLVDLPIGINITRFQTLLALHRSYLTPGDSSSGWTAGAAAYYVGYLQPRTFLLKYNENGTITDAVDCALDPLSETKCTLKSFTVEKGIYQTSNFRVQPTESIVRFPNITNLCPFGEVFNATRFASVYAWNRKRISNCVADYSVLYNSASFSTFKCYGVSPTKLNDLCFTNVYADSFVIRGDEVRQIAPGQTGKIADYNYKLPDDFTGCVIAWNSNNLDSKVGGNYNYLYRLFRKSNLKPFERDISTEIYQAGSTPCNGVEGFNCYFPLQSYGFQPTNGVGYQPYRVVVLSFELLHAPATVCGPKKSTNLVKNKCVNFNFNGLTGTGVLTESNKKFLPFQQFGRDIADTTDAVRDPQTLEILDITPCSFGGVSVITPGTNTSNQVAVLYQDVNCTEVPVAIHADQLTPTWRVYSTGSNVFQTRAGCLIGAEHVNNSYECDIPIGAGICASYQTQTNSPRRARSVASQSIIAYTMSLGAENSVAYSNNSIAIPTNFTISVTTEILPVSMTKTSVDCTMYICGDSTECSNLLLQYGSFCTQLNRALTGIAVEQDKNTQEVFAQVKQIYKTPPIKDFGGFNFSQILPDPSKPSKRSFIEDLLFNKVTLADAGFIKQYGDCLGDIAARDLICAQKFNGLTVLPPLLTDEMIAQYCSALLAGTITSGWTFGAGAALQIPFAMQMAYRFNGIGVTQNVLYENQKLIANQFNSAIGKIQDSLSSTASALGKLQDVVNQNAQALNTLVKQLSSNFGAISSVLNDILSRLDKVEAEVQIDRLITGRLQSLQTYVTQQLIRAAEIRASANLAATKMSECVLGQSKRVDFCGKGYHLMSFPQCAPHGVVFLHVTYVPAQEKNFTTAPAICHDGKAHFPREGVFVSNGTHWFVTQRNFYEPQIITTDNTFVSGNCDVLIGIVNNTVYDPLQPELDSGGGSGGGQIYEGKLTAEGLRFGIVASRFNHALVDRLVEGAIDAIVRHGGREEDITLVRVPGSWEIPVAAGELARKEDIDAVIAIGVLIRGATPHFDYIASEVSKGLADLSLELRKPITFGVITADTLEQAIERAGTKHGNKGWEAALSAIEMANLFKSLR

SEQ ID NO: 8587 - protein, 1307 aa, Artificial Sequence
  SARS-CoV-2/Shenzhen/SZTH-004/2020__EPI_ISL_406595 spike protein (1-1147)(T874C_S1055C) LumSynth construct
MFVFLVLLPLVSSQCVNLTTRTQLPPAYTNSFTRGVYYPDKVFRSSVLHSTQDLFLPFFSNVTWFHAIHVSGTNGTKRFDNPVLPFNDGVYFASTEKSNIIRGWIFGTTLDSKTQSLLIVNNATNVVIKVCEFQFCNDPFLGVYYHKNNKSWMESEFRVYSSANNCTFEYVSQPFLMDLEGKQGNFKNLREFVFKNIDGYFKIYSKHTPINLVRDLPQGFSALEPLVDLPIGINITRFQTLLALHRSYLTPGDSSSGWTAGAAAYYVGYLQPRTFLLKYNENGTITDAVDCALDPLSETKCTLKSFTVEKGIYQTSNFRVQPTESIVRFPNITNLCPFGEVFNATRFASVYAWDRKRISNCVAYYSVLYNSASFSTFKCYGVSPTKLNDLCFTNVYADSFVIRGDEVRQIAPGQTGKIADYNYKLPDDFTGCVIAWNSNNLDSKVGGNYNYLYRLFRKSNLKPFERDISTEIYQAGSTPCNGVEGFNCYFPLQSYGFQPTNGVGYQPYRVVVLSFELLHAPATVCGPKKSTNLVKNKCVNFNFNGLTGTGVLTESNKKFLPFQQFGRDIADTTDAVRDPQTLEILDITPCSFGGVSVITPGTNTSNQVAVLYQDVNCTEVPVAIHADQLTPTWRVYSTGSNVFQTRAGCLIGAEHVNNSYECDIPIGAGICASYQTQTNSPRRARSVASQSIIAYTMSLGAENSVAYSNNSIAIPTNFTISVTTEILPVSMTKTSVDCTMYICGDSTECSNLLLQYGSFCTQLNRALTGIAVEQDKNTQEVFAQVKQIYKTPPIKDFGGFNFSQILPDPSKPSKRSFIEDLLFNKVTLADAGFIKQYGDCLGDIAARDLICAQKFNGLTVLPPLLTDEMIAQYCSALLAGTITSGWTFGAGAALQIPFAMQMAYRFNGIGVTQNVLYENQKLIANQFNSAIGKIQDSLSSTASALGKLQDVVNQNAQALNTLVKQLSSNFGAISSVLNDILSRLDKVEAEVQIDRLITGRLQSLQTYVTQQLIRAAEIRASANLAATKMSECVLGQSKRVDFCGKGYHLMSFPQCAPHGVVFLHVTYVPAQEKNFTTAPAICHDGKAHFPREGVFVSNGTHWFVTQRNFYEPQIITTDNTFVSGNCDVVIGIVNNTVYDPLQPELDSGGGSGGGQIYEGKLTAEGLRFGIVASRFNHALVDRLVEGAIDAIVRHGGREEDITLVRVPGSWEIPVAAGELARKEDIDAVIAIGVLIRGATPHFDYIASEVSKGLADLSLELRKPITFGVITADTLEQAIERAGTKHGNKGWEAALSAIEMANLFKSLR

SEQ ID NO: 8588 - protein, 1307 aa, Artificial Sequence
  SARS-CoV-2/France/IDF0372/2020__EPI_ISL_406596 spike protein (1-1147)(T874C_S1055C) LumSynth construct
MFVFLVLLPLVSSQCVNLTTRTQLPPAYTNSFTRGVYYPDKVFRSSVLHSTQDLFLPFFSNVTWFHAIHVSGTNGTKRFDNPVLPFNDGVYFASTEKSNIIRGWIFGTTLDSKTQSLLIVNNATNVVIKVCEFQFCNDPFLGVYYHKNNKSWMESEFRVYSSANNCTFEYVSQPFLMDLEGKQGNFKNLREFVFKNIDGYFKIYSKHTPINLVRDLPQGFSALEPLVDLPIGINITRFQTLLALHRSYLTPGDSSSGWTAGAAAYYVGYLQPRTFLLKYNENGTITDAVDCALDPLSETKCTLKSFTVEKGIYQTSNFRVQPTESIVRFPNITNLCPFGEVFNATRFASVYAWNRKRISNCVADYSFLYNSASFSTFKCYGVSPTKLNDLCFTNVYADSFVIRGDEVRQIAPGQTGKIADYNYKLPDDFTGCVIAWNSNNLDSKVGGNYNYLYRLFRKSNLKPFERDISTEIYQAGSTPCNGVEGFNCYFPLQSYGFQPTNGVGYQPYRVVVLSFELLHAPATVCGPKKSTNLVKNKCVNFNFNGLTGTGVLTESNKKFLPFQQFGRDIADTTDAVRDPQTLEILDITPCSFGGVSVITPGTNTSNQVAVLYQDVNCTEVPVAIHADQLTPTWRVYSTGSNVFQTRAGCLIGAEHVNNSYECDIPIGAGICASYQTQTNSPRRARSVASQSIIAYTMSLGAENSVAYSNNSIAIPTNFTISVTTEILPVSMTKTSVDCTMYICGDSTECSNLLLQYGSFCTQLNRALTGIAVEQDKNTQEVFAQVKQIYKTPPIKDFGGFNFSQILPDPSKPSKRSFIEDLLFNKVTLADAGFIKQYGDCLGDIAARDLICAQKFNGLTVLPPLLTDEMIAQYCSALLAGTITSGWTFGAGAALQIPFAMQMAYRFNGIGVTQNVLYENQKLIANQFNSAIGKIQDSLSSTASALGKLQDVVNQNAQALNTLVKQLSSNFGAISSVLNDILSRLDKVEAEVQIDRLITGRLQSLQTYVTQQLIRAAEIRASANLAATKMSECVLGQSKRVDFCGKGYHLMSFPQCAPHGVVFLHVTYVPAQEKNFTTAPAICHDGKAHFPREGVFVSNGTHWFVTQRNFYEPQIITTDNTFVSGNCDVVIGIVNNTVYDPLQPELDSGGGSGGGQIYEGKLTAEGLRFGIVASRFNHALVDRLVEGAIDAIVRHGGREEDITLVRVPGSWEIPVAAGELARKEDIDAVIAIGVLIRGATPHFDYIASEVSKGLADLSLELRKPITFGVITADTLEQAIERAGTKHGNKGWEAALSAIEMANLFKSLR

SEQ ID NO: 8589 - protein, 1307 aa, Artificial Sequence
  SARS-CoV-2/Australia/VIC01/2020__EPI_ISL_406844 spike protein (1-1147)(T874C_S1055C) LumSynth construct
MFVFLVLLPLVSSQCVNLTTRTQLPPAYTNSFTRGVYYPDKVFRSSVLHSTQDLFLPFFSNVTWFHAIHVSGTNGTKRFDNPVLPFNDGVYFASTEKSNIIRGWIFGTTLDSKTQSLLIVNNATNVVIKVCEFQFCNDPFLGVYYHKNNKSWMESEFRVYSSANNCTFEYVSQPFLMDLEGKQGNFKNLREFVFKNIDGYFKIYSKHTPINLVRDLPQGFSALEPLVDLPIGINITRFQTLLALHRRYLTPGDSSSGWTAGAAAYYVGYLQPRTFLLKYNENGTITDAVDCALDPLSETKCTLKSFTVEKGIYQTSNFRVQPTESIVRFPNITNLCPFGEVFNATRFASVYAWNRKRISNCVADYSVLYNSASFSTFKCYGVSPTKLNDLCFTNVYADSFVIRGDEVRQIAPGQTGKIADYNYKLPDDFTGCVIAWNSNNLDSKVGGNYNYLYRLFRKSNLKPFERDISTEIYQAGSTPCNGVEGFNCYFPLQSYGFQPTNGVGYQPYRVVVLSFELLHAPATVCGPKKSTNLVKNKCVNFNFNGLTGTGVLTESNKKFLPFQQFGRDIADTTDAVRDPQTLEILDITPCSFGGVSVITPGTNTSNQVAVLYQDVNCTEVPVAIHADQLTPTWRVYSTGSNVFQTRAGCLIGAEHVNNSYECDIPIGAGICASYQTQTNSPRRARSVASQSIIAYTMSLGAENSVAYSNNSIAIPTNFTISVTTEILPVSMTKTSVDCTMYICGDSTECSNLLLQYGSFCTQLNRALTGIAVEQDKNTQEVFAQVKQIYKTPPIKDFGGFNFSQILPDPSKPSKRSFIEDLLFNKVTLADAGFIKQYGDCLGDIAARDLICAQKFNGLTVLPPLLTDEMIAQYCSALLAGTITSGWTFGAGAALQIPFAMQMAYRFNGIGVTQNVLYENQKLIANQFNSAIGKIQDSLSSTASALGKLQDVVNQNAQALNTLVKQLSSNFGAISSVLNDILSRLDKVEAEVQIDRLITGRLQSLQTYVTQQLIRAAEIRASANLAATKMSECVLGQSKRVDFCGKGYHLMSFPQCAPHGVVFLHVTYVPAQEKNFTTAPAICHDGKAHFPREGVFVSNGTHWFVTQRNFYEPQIITTDNTFVSGNCDVVIGIVNNTVYDPLQPELDSGGGSGGGQIYEGKLTAEGLRFGIVASRFNHALVDRLVEGAIDAIVRHGGREEDITLVRVPGSWEIPVAAGELARKEDIDAVIAIGVLIRGATPHFDYIASEVSKGLADLSLELRKPITFGVITADTLEQAIERAGTKHGNKGWEAALSAIEMANLFKSLR

SEQ ID NO: 8590 - protein, 1307 aa, Artificial Sequence
  SARS-CoV-2/Germany/BavPat1/2020__EPI_ISL_406862 spike protein (1-1147)(T874C_S1055C) LumSynth construct
MFVFLVLLPLVSSQCVNLTTRTQLPPAYTNSFTRGVYYPDKVFRSSVLHSTQDLFLPFFSNVTWFHAIHVSGTNGTKRFDNPVLPFNDGVYFASTEKSNIIRGWIFGTTLDSKTQSLLIVNNATNVVIKVCEFQFCNDPFLGVYYHKNNKSWMESEFRVYSSANNCTFEYVSQPFLMDLEGKQGNFKNLREFVFKNIDGYFKIYSKHTPINLVRDLPQGFSALEPLVDLPIGINITRFQTLLALHRSYLTPGDSSSGWTAGAAAYYVGYLQPRTFLLKYNENGTITDAVDCALDPLSETKCTLKSFTVEKGIYQTSNFRVQPTESIVRFPNITNLCPFGEVFNATRFASVYAWNRKRISNCVADYSVLYNSASFSTFKCYGVSPTKLNDLCFTNVYADSFVIRGDEVRQIAPGQTGKIADYNYKLPDDFTGCVIAWNSNNLDSKVGGNYNYLYRLFRKSNLKPFERDISTEIYQAGSTPCNGVEGFNCYFPLQSYGFQPTNGVGYQPYRVVVLSFELLHAPATVCGPKKSTNLVKNKCVNFNFNGLTGTGVLTESNKKFLPFQQFGRDIADTTDAVRDPQTLEILDITPCSFGGVSVITPGTNTSNQVAVLYQGVNCTEVPVAIHADQLTPTWRVYSTGSNVFQTRAGCLIGAEHVNNSYECDIPIGAGICASYQTQTNSPRRARSVASQSIIAYTMSLGAENSVAYSNNSIAIPTNFTISVTTEILPVSMTKTSVDCTMYICGDSTECSNLLLQYGSFCTQLNRALTGIAVEQDKNTQEVFAQVKQIYKTPPIKDFGGFNFSQILPDPSKPSKRSFIEDLLFNKVTLADAGFIKQYGDCLGDIAARDLICAQKFNGLTVLPPLLTDEMIAQYCSALLAGTITSGWTFGAGAALQIPFAMQMAYRFNGIGVTQNVLYENQKLIANQFNSAIGKIQDSLSSTASALGKLQDVVNQNAQALNTLVKQLSSNFGAISSVLNDILSRLDKVEAEVQIDRLITGRLQSLQTYVTQQLIRAAEIRASANLAATKMSECVLGQSKRVDFCGKGYHLMSFPQCAPHGVVFLHVTYVPAQEKNFTTAPAICHDGKAHFPREGVFVSNGTHWFVTQRNFYEPQIITTDNTFVSGNCDVVIGIVNNTVYDPLQPELDSGGGSGGGQIYEGKLTAEGLRFGIVASRFNHALVDRLVEGAIDAIVRHGGREEDITLVRVPGSWEIPVAAGELARKEDIDAVIAIGVLIRGATPHFDYIASEVSKGLADLSLELRKPITFGVITADTLEQAIERAGTKHGNKGWEAALSAIEMANLFKSLR

SEQ ID NO: 8591 - protein, 1307 aa, Artificial Sequence
  SARS-CoV-2/Wuhan/HBCDC-HB-02/2020__EPI_ISL_412978 spike protein (1-1147)(T874C_S1055C) LumSynth construct
MFVFLVLLPLVSSQCVNLTTRTQLPPAYTNSFTRGVYYPDKVFRSSVLHSTQDLFLPFFSNVTWFHAIHVSGTNGTKRFDNPVLPFNDGVYFASTEKSNIIRGWIFGTTLDSKTQSLLIVNNATNVVIKVCEFQFCNDPFLGVYYHKNNKSWMESEFRVYSSANNCTFEYVSQPFLMDLEGKQGNFKNLREFVFKNIDGYFKIYSKHTPINLVRDLPQGFSALEPLVDLPIGINITRFQTLLALHRSYLTPGDSSSGWTAGAAAYYVGYLQPRTFLLKYNENGTITDAVDCALDPLSETKCTLKSFTVEKGIYQTSNFRVQPTESIVRFPNITNLCPFGEVFNATRFASVYAWNRKRISNCVADYSVLYNSASFSTFKCYGVSPTKLNDLCFTNVYADSFVIRGDEVRQIAPGQTGKIADYNYKLPDDFTGCVIAWNSNNLDSKVGGNYNYLYRLFRKSNLKPFERDISTEIYQAGSTPCNGVEGFNCYFPLQSYGFQPTNGVGYQPYRVVVLSFELLHAPATVCGPKKSTNLVKNKCVNFNFNGLTGTGVLTESNKKFLPFQQFGRDIADTTDAVRDPQTLEILDITPCSFGGVSVITPGTNTSNQVAVLYQDVNCTEVPVAIHADQLTPTWRVYSTGSNVFQTRAGCLIGAEHVNNSYECDIPIGAGICASYQTQTNSPRRARSVASQSIIAYTMSLGAENSVAYSNNSIAIPTNFTISVTTEILPVSMTKTSVDCTMYICGDSTECSNFLLQYGSFCTQLNRALTGIAVEQDKNTQEVFAQVKQIYKTPPIKDFGGFNFSQILPDPSKPSKRSFIEDLLFNKVTLADAGFIKQYGDCLGDIAARDLICAQKFNGLTVLPPLLTDEMIAQYCSALLAGTITSGWTFGAGAALQIPFAMQMAYRFNGIGVTQNVLYENQKLIANQFNSAIGKIQDSLSSTASALGKLQDVVNQNAQALNTLVKQLSSNFGAISSVLNDILSRLDKVEAEVQIDRLITGRLQSLQTYVTQQLIRAAEIRASANLAATKMSECVLGQSKRVDFCGKGYHLMSFPQCAPHGVVFLHVTYVPAQEKNFTTAPAICHDGKAHFPREGVFVSNGTHWFVTQRNFYEPQIITTDNTFVSGNCDVVIGIVNNTVYDPLQPELDSGGGSGGGQIYEGKLTAEGLRFGIVASRFNHALVDRLVEGAIDAIVRHGGREEDITLVRVPGSWEIPVAAGELARKEDIDAVIAIGVLIRGATPHFDYIASEVSKGLADLSLELRKPITFGVITADTLEQAIERAGTKHGNKGWEAALSAIEMANLFKSLR

SEQ ID NO: 8592 - protein, 1307 aa, Artificial Sequence
  SARS-CoV-2/Australia/QLD02/2020__EPI_ISL_407896 spike protein (1-1147)(T874C_S1055C) LumSynth construct
MFVFLVLLPLVSSQCVNLTTRTQLPPAYTNSFTRGVYYPDKVFRSSVLHSTQDLFLPFFSNVTWFHAIHVSGTNGTKRFDNPVLPFNDGVYFASTEKSNIIRGWIFGTTLDSKTQSLLIVNNATNVVIKVCEFQFCNDPFLGVYYHKNNKSWMESEFRVYSSANNCTFEYVSQPFLMDLEGKQGNFKNLREFVFKNIDGYFKIYSKHTPINLVRDLPQGFSALEPLVDLPIGINITRFQTLLALHRSYLTPGDSSSGWTAGAAAYYVGYLQPRTFLLKYNENGTITDAVDCALDPLSETKCTLKSFTVEKGIYQTSNFRVQPTESIVRFPNITNLCPFGEVFNATRFASVYAWNRKRISNCVADYSVLYNSASFSTFKCYGVSPTKLNDLCFTNVYADSFVIRGDEVRQIAPGQTGKIADYNYKLPDDFTGCVIAWNSNNLDSKVGGNYNYLYRLFRKSNLKPFERDISTEIYQAGSTPCNGVEGFNCYFPLQSYGFQPTNGVGYQPYRVVVLSFELLHAPATVCGPKKSTNLVKNKCVNFNFNGLTGTGVLTESNKKFLPFQQFGRDIADTTDAVRDPQTLEILDITPCSFGGVSVITPGTNTSNQVAVLYQDVNCTEVPVAIHADQLTPTWRVYSTGSNVFQTRAGCLIGAEHVNNSYECDIPIGAGICASYQTQTNSPRRARSVASQSIIAYTMSLGAENSVAYSNNSIAIPTNFTISVTTEILPVSMTKTSVDCTMYICGDSTECSNLLLQYGSFCTQLNRALTGIAVEQDKNTQEVFAQVKQIYKTPPIKDFGGFNFSQILPDPSKPSKRSFIEDLLFNKVTLADAGFIKQYGDCLGDIAARDLICAQKFNGLTVLPPLLTDEMIAQYCSALLAGTITSGWTFGAGAALQIPFAMQMAYRFNGIGVTQNVLYENQKLIANQFNSAIGKIQDSLSSTASALGKLQDVVNQNAQALNTLVKQLSSNFGAISSVLNDILSRLDKVEAEVQIDRLITGRLQSLQTYVTQQLIRAAEIRASANLAATKMSECVLGQSKRVDFCGKGYHLMSFPQCAPHGVVFLHVTYVPAQEKNFTTAPAICHDGKAHFPREGVFVSNGTHWFVTQRNFYEPQIITTDNTFVSGNCDVVIGIVNNTVYDPLQLELDSGGGSGGGQIYEGKLTAEGLRFGIVASRFNHALVDRLVEGAIDAIVRHGGREEDITLVRVPGSWEIPVAAGELARKEDIDAVIAIGVLIRGATPHFDYIASEVSKGLADLSLELRKPITFGVITADTLEQAIERAGTKHGNKGWEAALSAIEMANLFKSLR

SEQ ID NO: 8593 - protein, 1307 aa, Artificial Sequence
  SARS-CoV-2/India/1-31/2020__EPI_ISL_413523 spike protein (1-1147)(T874C_S1055C) LumSynth construct
MFVFLVLLPLVSSQCVNLTTRTQLPPAYTNSFTRGVYYPDKVFRSSVLHSTQDLFLPFFSNVTWFHAIHVSGTNGTKRFDNPVLPFNDGVYFASTEKSNIIRGWIFGTTLDSKTQSLLIVNNATNVVIKVCEFQFCNDPFLGVYYHKNNKSWMESEFRVYSSANNCTFEYVSQPFLMDLEGKQGNFKNLREFVFKNIDGYFKIYSKHTPINLVRDLPQGFSALEPLVDLPIGINITRFQTLLALHRSYLTPGDSSSGWTAGAAAYYVGYLQPRTFLLKYNENGTITDAVDCALDPLSETKCTLKSFTVEKGIYQTSNFRVQPTESIVRFPNITNLCPFGEVFNATRFASVYAWNRKRISNCVADYSVLYNSASFSTFKCYGVSPTKLNDLCFTNVYADSFVIRGDEVRQIAPGQTGKIADYNYKLPDDFTGCVIAWNSNNLDSKVGGNYNYLYRLFRKSNLKPFERDISTEIYQAGSTPCNGVEGFNCYFPLQSYGFQPTNGVGYQPYRVVVLSFELLHAPATVCGPKKSTNLVKNKCVNFNFNGLTGTGVLTESNKKFLPFQQFGRDIADTTDAVRDPQTLEILDITPCSFGGVSVITPGTNTSNQVAVLYQDVNCTEVPVAIHADQLTPTWRVYSTGSNVFQTRAGCLIGAEHVNNSYECDIPIGAGICASYQTQTNSPRRARSVASQSIIAYTMSLGAENSVAYSNNSIAIPTNFTISVTTEILPVSMTKTSVDCTMYICGDSTECSNLLLQYGSFCTQLNRALTGIAVEQDKNTQEVFAQVKQIYKTPPIKDFGGFNFSQILPDPSKPSKRSFIEDLLFNKVTLADAGFIKQYGDCLGDIAARDLICAQKFNGLTVLPPLLTDEMIAQYCSALLAGTITSGWTFGAGAALQIPFAMQMAYRFNGIGVTQNVLYENQKLIANQFNSVIGKIQDSLSSTASALGKLQDVVNQNAQALNTLVKQLSSNFGAISSVLNDILSRLDKVEAEVQIDRLITGRLQSLQTYVTQQLIRAAEIRASANLAATKMSECVLGQSKRVDFCGKGYHLMSFPQCAPHGVVFLHVTYVPAQEKNFTTAPAICHDGKAHFPREGVFVSNGTHWFVTQRNFYEPQIITTDNTFVSGNCDVVIGIVNNTVYDPLQPELDSGGGSGGGQIYEGKLTAEGLRFGIVASRFNHALVDRLVEGAIDAIVRHGGREEDITLVRVPGSWEIPVAAGELARKEDIDAVIAIGVLIRGATPHFDYIASEVSKGLADLSLELRKPITFGVITADTLEQAIERAGTKHGNKGWEAALSAIEMANLFKSLR

SEQ ID NO: 8594 - protein, 1307 aa, Artificial Sequence
  SARS-CoV-2/Guangdong/GD2020087-P0008/2020__EPI_ISL_413863 spike protein (1-1147)(T874C_S1055C) LumSynth construct
MFVFLVLLPLVSSQCVNLTTRTQLPPAYTNSFTRGVYYPDKVFRSSVLHSTQDLFLPFFSNVTWFHAIHVSGTNGTKRFDNPVLPFNDGVYFASTEKSNIIRGWIFGTTLDSKTQSLLIVNNATNVVIKVCEFQFCNDPFLGVYYHKNNKSWMESEFRVYSSANNCTFEYVSQPFLMDLEGKQGNFKNLREFVFKNIDGYFKIYSKHTPINLVRDLPQGFSALEPLVDLPIGINITRFQTLLALHRSYLTPGDSSSGWTAGAAAYYVGYLQPRTFLLKYNENGTITDAVDCALDPLSETKCTLKSFTVEKGIYQTSNFRVQPTESIVRFPNITNLCPFGEVFNATRFASVYAWNRKRISNCVADYSVLYNSASFSTFKCYGVSPTKLNDLCFTNVYADSFVIRGDEVREIAPGQTGKIADYNYKLPDDFTGCVIAWNSNNLDSKVGGNYNYLYRLFRKSNLKPFERDISTEIYQAGSTPCNGVEGFNCYFPLQSYGFQPTNGVGYQPYRVVVLSFELLHAPATVCGPKKSTNLVKNKCVNFNFNGLTGTGVLTESNKKFLPFQQFGRDIADTTDAVRDPQTLEILDITPCSFGGVSVITPGTNTSNQVAVLYQDVNCTEVPVAIHADQLTPTWRVYSTGSNVFQTRAGCLIGAEHVNNSYECDIPIGAGICASYQTQTNSPRRARSVASQSIIAYTMSLGAENSVAYSNNSIAIPTNFTISVTTEILPVSMTKTSVDCTMYICGDSTECSNLLLQYGSFCTQLNRALTGIAVEQDKNTQEVFAQVKQIYKTPPIKDFGGFNFSQILPDPSKPSKRSFIEDLLFNKVTLADAGFIKQYGDCLGDIAARDLICAQKFNGLTVLPPLLTDEMIAQYCSALLAGTITSGWTFGAGAALQIPFAMQMAYRFNGIGVTQNVLYENQKLIANQFNSAIGKIQDSLSSTASALGKLQDVVNQNAQALNTLVKQLSSNFGAISSVLNDILSRLDKVEAEVQIDRLITGRLQSLQTYVTQQLIRAAEIRASANLAATKMSECVLGQSKRVDFCGKGYHLMSFPQCAPHGVVFLHVTYVPAQEKNFTTAPAICHDGKAHFPREGVFVSNGTHWFVTQRNFYEPQIITTDNTFVSGNCDVVIGIVNNTVYDPLQPELDSGGGSGGGQIYEGKLTAEGLRFGIVASRFNHALVDRLVEGAIDAIVRHGGREEDITLVRVPGSWEIPVAAGELARKEDIDAVIAIGVLIRGATPHFDYIASEVSKGLADLSLELRKPITFGVITADTLEQAIERAGTKHGNKGWEAALSAIEMANLFKSLR

SEQ ID NO: 8595 - protein, 1307 aa, Artificial Sequence
  SARS-CoV-2/Sweden/01/2020__EPI_ISL_411951 spike protein (1-1147)(T874C_S1055C) LumSynth construct
MFVFLVLLPLVSSQCVNLTTRTQLPPAYTNSFTRGVYYPDKVFRSSVLHSTQDLFLPFFSNVTWFHAIHVSGTNGTKRFDNPVLPFNDGVYFASTEKSNIIRGWIFGTTLDSKTQSLLIVNNATNVVIKVCEFQFCNDPFLGVYYHKNNKSWMESEFRVYSSANNCTFEYVSQPFLMDLEGKQGNFKNLREFVFKNIDGYFKIYSKHTPINLVRDLPQGFSALEPLVDLPIGINITRFQTLLALHRSYLTPGDSSSGWTAGAAAYYVGYLQPRTFLLKYNENGTITDAVDCALDPLSETKCTLKSFTVEKGIYQTSNFRVQPTESIVRFPNITNLCPFGEVFNATRFASVYAWNRKRISNCVADYSVLYNSASFSTFKCYGVSPTKLNDLCFTNVYADSFVIRGDEVRQIAPGQTGKIADYNYKLPDDFTGCVIAWNSNNLDSKVGGNYNYLYRLFRKSNLKPFERDISTEIYQAGSTPCNGVEGFNCYFPLQSYGFQPTNGVGYQPYRVVVLSFELLHAPATVCGPKKSTNLVKNKCVNFNFNGLTGTGVLTESNKKFLPFQQFGRDIADTTDAVRDPQTLEILDITPCSFGGVSVITPGTNTSNQVAVLYQDVNCTEVPVAIHADQLTPTWRVYSTGSNVFQTRAGCLIGAEHVNNSYECDIPIGAGICASYQTQTNSPRRARSVASQSIIAYTMSLGAENSVAYSNNSIAIPTNFTISVTTEILPVSMTKTSVDCTMYICGDSTECSNLLLQYGSFCTQLNRALTGIAVEQDKNTQEVFAQVKQIYKTPPIKDCGGFNFSQILPDPSKPSKRSFIEDLLFNKVTLADAGFIKQYGDCLGDIAARDLICAQKFNGLTVLPPLLTDEMIAQYCSALLAGTITSGWTFGAGAALQIPFAMQMAYRFNGIGVTQNVLYENQKLIANQFNSAIGKIQDSLSSTASALGKLQDVVNQNAQALNTLVKQLSSNFGAISSVLNDILSRLDKVEAEVQIDRLITGRLQSLQTYVTQQLIRAAEIRASANLAATKMSECVLGQSKRVDFCGKGYHLMSFPQCAPHGVVFLHVTYVPAQEKNFTTAPAICHDGKAHFPREGVFVSNGTHWFVTQRNFYEPQIITTDNTFVSGNCDVVIGIVNNTVYDPLQPELDSGGGSGGGQIYEGKLTAEGLRFGIVASRFNHALVDRLVEGAIDAIVRHGGREEDITLVRVPGSWEIPVAAGELARKEDIDAVIAIGVLIRGATPHFDYIASEVSKGLADLSLELRKPITFGVITADTLEQAIERAGTKHGNKGWEAALSAIEMANLFKSLR

SEQ ID NO: 8596 - protein, 1307 aa, Artificial Sequence
  SARS-CoV-2/Tianmen/HBCDC-HB-07/2020__EPI_ISL_412983 spike protein (1-1147)(T874C_S1055C) LumSynth construct
MFVFLVLLPLVSSQCVNLTTRTQLPPAYTNSFTRGVYYPDKVFRSSVLHSTQDLFLPFFSNVTWFHAIHVSGTNGTKRFDNPVLPFNDGVYFASTEKSNIIRGWIFGTTLDSKTQSLLIVNNATNVVIKVCEFQFCNDPFLGVYYHKNNKSWMESEFRVYSSANNCTFEYVSQPFLMDLEGKQGNFKNLREFVFKNIDGYFKIYSKHTPINLVRDLPQGFSALEPLVDLPIGINITRFQTLLALHRSYLTPGDSSSGWTAGAAAYYVGYLQPRTFLLKYNENGTITDAVDCALDPLSETKCTLKSFTVEKGIYQTSNFRVQPTESIVRFPNITNLCPFGEVFNATRFASVYAWNRKRISNCVADYSVLYNSASFSTFKCYGVSPTKLNDLCFTNVYADSFVIRGDEVRQIAPGQTGKIADYNYKLPDDFTGCVIAWNSNNLDSKVGGNYNYLYRLFRKSNLKPFERDISTEIYQAGSTPCNGVEGFNCYFPLQSYGFQPTNGVGYQPYRVVVLSFELLHAPATVCGPKKSTNLVKNKCVNFNFNGLTGTGVLTESNKKFLPFQQFGRDIADTTDAVRDPQTLEILDITPCSFGGVSVITPGTNTSNQVAVLYQDLNCTEVPVAIHADQLTPTWRVYSTGSNVFQTRAGCLIGAEHVNNSYECDIPIGAGICASYQTQTNSPRRARSVASQSIIAYTMSLGAENSVAYSNNSIAIPTNFTISVTTEILPVSMTKTSVDCTMYICGDSTECSNLLLQYGSFCTQLNRALTGIAVEQDKNTQEVFAQVKQIYKTPPIKDFGGFNFSQILPDPSKPSKRSFIEDLLFNKVTLADAGFIKQYGDCLGDIAARDLICAQKFNGLTVLPPLLTDEMIAQYCSALLAGTITSGWTFGAGAALQIPFAMQMAYRFNGIGVTQNVLYENQKLIANQFNSAIGKIQDSLSSTASALGKLQDVVNQNAQALNTLVKQLSSNFGAISSVLNDILSRLDKVEAEVQIDRLITGRLQSLQTYVTQQLIRAAEIRASANLAATKMSECVLGQSKRVDFCGKGYHLMSFPQCAPHGVVFLHVTYVPAQEKNFTTAPAICHDGKAHFPREGVFVSNGTHWFVTQRNFYEPQIITTDNTFVSGNCDVVIGIVNNTVYDPLQPELDSGGGSGGGQIYEGKLTAEGLRFGIVASRFNHALVDRLVEGAIDAIVRHGGREEDITLVRVPGSWEIPVAAGELARKEDIDAVIAIGVLIRGATPHFDYIASEVSKGLADLSLELRKPITFGVITADTLEQAIERAGTKHGNKGWEAALSAIEMANLFKSLR

SEQ ID NO: 8597 - protein, 1307 aa, Artificial Sequence
  SARS-CoV-2/Hong Kong/case42_VM20002493/2020__EPI_ISL_414527 spike protein (1-1147)(T874C_S1055C) LumSynth construct
MFVFLVLLPLVSSQCVNLTTRTQLPPAYTNSFTRGVYYPDKVFRSSVLHSTQDLFLPFFSNVTWFHAIHVSGTNGTKRFDNPVLPFNDGVYFASTEKSNIIRGWIFGTTLDSKTQSLLIVNNATNVVIKVCEFQFCNDPFLGVYYHKNNKSWMESEFRVYSSANNCTFEYVSQPFLMDLEGKQGNFKNLREFVFKNIDGYFKIYSKHTPINLVRDLPQGFSALEPLVDLPIGINITRFQTLLALHRSYLTPGDSSSGWTAGAAAYYVGYLQPRTFLLKYNENGTITDAVDCALDPLSETKCTLKSFTVEKGIYQTSNFRVQPTESIVRFPNITNLCPFGEVFNATRFASVYAWNRKRISNCVADYSVLYNSASFSTFKCYGVSPTKLNDLCFTNVYADSFVIRGDEVRQIAPGQTGKIADYNYKLPDDFTGCVIAWNSNNLDSKVGGNYNYLYRLFRKSNLKPFERDISTEIYQAGSTPCNGVEGFNCYFPLQSYGFQPTNGVGYQPYRVVVLSFELLHAPATVCGPKKSTNLVKNKCVNFNFNGLTGTGVLTESNKKFLPFQQFGRDIADTTDAVRDPQTLEILDITPCSFGGVSVITPGTNTSNQVAVLYQDVNCTEVPVAIHADQLTPTWRVYSTGSNVFQTRAGCLIGAEHVNNSYECDIPIGAGICASYQTQTNSPRRARSVASQSIIAYTMSLGAENSVAYSNNSIAIPTNFAISVTTEILPVSMTKTSVDCTMYICGDSTECSNLLLQYGSFCTQLNRALTGIAVEQDKNTQEVFAQVKQIYKTPPIKDFGGFNFSQILPDPSKPSKRSFIEDLLFNKVTLADAGFIKQYGDCLGDIAARDLICAQKFNGLTVLPPLLTDEMIAQYCSALLAGTITSGWTFGAGAALQIPFAMQMAYRFNGIGVTQNVLYENQKLIANQFNSAIGKIQDSLSSTASALGKLQDVVNQNAQALNTLVKQLSSNFGAISSVLNDILSRLDKVEAEVQIDRLITGRLQSLQTYVTQQLIRAAEIRASANLAATKMSECVLGQSKRVDFCGKGYHLMSFPQCAPHGVVFLHVTYVPAQEKNFTTAPAICHDGKAHFPREGVFVSNGTHWFVTQRNFYEPQIITTDNTFVSGNCDVVIGIVNNTVYDPLQPELDSGGGSGGGQIYEGKLTAEGLRFGIVASRFNHALVDRLVEGAIDAIVRHGGREEDITLVRVPGSWEIPVAAGELARKEDIDAVIAIGVLIRGATPHFDYIASEVSKGLADLSLELRKPITFGVITADTLEQAIERAGTKHGNKGWEAALSAIEMANLFKSLR

SEQ ID NO: 8598 - protein, 1307 aa, Artificial Sequence
  SARS-CoV-2/USA/CruiseA-23/2020__EPI_ISL_414482 spike protein (1-1147)(T874C_S1055C) LumSynth construct
MFVFLVLLPLVSSQCVNLTTRTQLPPAYTNSFTRGVYYPDKVFRSSVLHSTQDLFLPFFSNVTWFHAIHVSGTNGTKRFDNPVLPFNDGVYFASTEKSNIIRGWIFGTTLDSKTQSLLIVNNATNVVIKVCEFQFCNDPFLGVYYHKNNKSWMESEFRVYSSANNCTFEYVSQPFLMDLEVKQGNFKNLREFVFKNIDGYFKIYSKHTPINLVRDLPQGFSALEPLVDLPIGINITRFQTLLALHRSYLTPGDSSSGWTAGAAAYYVGYLQPRTFLLKYNENGTITDAVDCALDPLSETKCTLKSFTVEKGIYQTSNFRVQPTESIVRFPNITNLCPFGEVFNATRFASVYAWNRKRISNCVADYSVLYNSASFSTFKCYGVSPTKLNDLCFTNVYADSFVIRGDEVRQIAPGQTGKIADYNYKLPDDFTGCVIAWNSNNLDSKVGGNYNYLYRLFRKSNLKPFERDISTEIYQAGSTPCNGVEGFNCYFPLQSYGFQPTNGVGYQPYRVVVLSFELLHAPATVCGPKKSTNLVKNKCVNFNFNGLTGTGVLTESNKKFLPFQQFGRDIADTTDAVRDPQTLEILDITPCSFGGVSVITPGTNTSNQVAVLYQDVNCTEVPVAIHADQLTPTWRVYSTGSNVFQTRAGCLIGAEHVNNSYECDIPIGAGICASYQTQTNSPRRARSVASQSIIAYTMSLGAENSVAYSNNSIAIPTNFTISVTTEILPVSMTKTSVDCTMYICGDSTECSNLLLQYGSFCTQLNRALTGIAVEQDKNTQEVFAQVKQIYKTPPIKDFGGFNFSQILPDPSKPSKRSFIEDLLFNKVTLADAGFIKQYGDCLGDIAARDLICAQKFNGLTVLPPLLTDEMIAQYCSALLAGTITSGWTFGAGAALQIPFAMQMAYRFNGIGVTQNVLYENQKLIANQFNSAIGKIQDSLSSTASALGKLQDVVNQNAQALNTLVKQLSSNFGAISSVLNDILSRLDKVEAEVQIDRLITGRLQSLQTYVTQQLIRAAEIRASANLAATKMSECVLGQSKRVDFCGKGYHLMSFPQCAPHGVVFLHVTYVPAQEKNFTTAPAICHDGKAHFPREGVFVSNGTHWFVTQRNFYEPQIITTDNTFVSGNCDVVIGIVNNTVYDPLQPELDSGGGSGGGQIYEGKLTAEGLRFGIVASRFNHALVDRLVEGAIDAIVRHGGREEDITLVRVPGSWEIPVAAGELARKEDIDAVIAIGVLIRGATPHFDYIASEVSKGLADLSLELRKPITFGVITADTLEQAIERAGTKHGNKGWEAALSAIEMANLFKSLR

SEQ ID NO: 8599 - protein, 1307 aa, Artificial Sequence
  SARS-CoV-2/Hong Kong/case85_VM20002868/2020__EPI_ISL_414519 spike protein (1-1147)(T874C_S1055C) LumSynth construct
MFVFLVLVPLVSSQCVNLTTRTQLPPAYTNSFTRGVYYPDKVFRSSVLHSTQDLFLPFFSNVTWFHAIHVSGTNGTKRFDNPVLPFNDGVYFASTEKSNIIRGWIFGTTLDSKTQSLLIVNNATNVVIKVCEFQFCNDPFLGVYYHKNNKSWMESEFRVYSSANNCTFEYVSQPFLMDLEGKQGNFKNLREFVFKNIDGYFKIYSKHTPINLVRDLPQGFSALEPLVDLPIGINITRFQTLLALHRSYLTPGDSSSGWTAGAAAYYVGYLQPRTFLLKYNENGTITDAVDCALDPLSETKCTLKSFTVEKGIYQTSNFRVQPTESIVRFPNITNLCPFGEVFNATRFASVYAWNRKRISNCVADYSVLYNSASFSTFKCYGVSPTKLNDLCFTNVYADSFVIRGDEVRQIAPGQTGKIADYNYKLPDDFTGCVIAWNSNNLDSKVGGNYNYLYRLFRKSNLKPFERDISTEIYQAGSTPCNGVEGFNCYFPLQSYGFQPTNGVGYQPYRVVVLSFELLHAPATVCGPKKSTNLVKNKCVNFNFNGLTGTGVLTESNKKFLPFQQFGRDIADTTDAVRDPQTLEILDITPCSFGGVSVITPGTNTSNQVAVLYQDVNCTEVPVAIHADQLTPTWRVYSTGSNVFQTRAGCLIGAEHVNNSYECDIPIGAGICASYQTQTNSPRRARSVASQSIIAYTMSLGAENSVAYSNNSIAIPTNFTISVTTEILPVSMTKTSVDCTMYICGDSTECSNLLLQYGSFCTQLNRALTGIAVEQDKNTQEVFAQVKQIYKTPPIKDFGGFNFSQILPDPSKPSKRSFIEDLLFNKVTLADAGFIKQYGDCLGDIAARDLICAQKFNGLTVLPPLLTDEMIAQYCSALLAGTITSGWTFGAGAALQIPFAMQMAYRFNGIGVTQNVLYENQKLIANQFNSAIGKIQDSLSSTASALGKLQDVVNQNAQALNTLVKQLSSNFGAISSVLNDILSRLDKVEAEVQIDRLITGRLQSLQTYVTQQLIRAAEIRASANLAATKMSECVLGQSKRVDFCGKGYHLMSFPQCAPHGVVFLHVTYVPAQEKNFTTAPAICHDGKAHFPREGVFVSNGTHWFVTQRNFYEPQIITTDNTFVSGNCDVVIGIVNNTVYDPLQPELDSGGGSGGGQIYEGKLTAEGLRFGIVASRFNHALVDRLVEGAIDAIVRHGGREEDITLVRVPGSWEIPVAAGELARKEDIDAVIAIGVLIRGATPHFDYIASEVSKGLADLSLELRKPITFGVITADTLEQAIERAGTKHGNKGWEAALSAIEMANLFKSLR

SEQ ID NO: 8600 - protein, 1307 aa, Artificial Sequence; identical to SEQ ID NO: 8590
  SARS-CoV-2/England/200990660/2020__EPI_ISL_414523 spike protein (1-1147)(T874C_S1055C) LumSynth construct

SEQ ID NO: 8601 - protein, 1307 aa, Artificial Sequence
  SARS-CoV-2/Australia/NSW09/2020__EPI_ISL_413595 spike protein (1-1147)(T874C_S1055C) LumSynth construct
MFVFLVLLPLVSSQCVNLTTRTQLPPAYTNSFTRGVYYPDKVFRSSVLHSTQDLFLPFFSNVTWFHAIHVSGTNGTKRFDNPVLPFNDGVYFASTEKSNIIRGWIFGTTLDSKTQSLLIVNNATNVVIKVCEFQFCNDPFLGVYYHKNNKSWMESEFRVYSSANNCTFEYVSQPFLMDLEGKQGNFKNLREFVFKNIDGYFKIYSKHTPINLVRDLPQGFSALEPLVDLPIGINITRFQTLLALHRSYLTPGDSSSGWTAGAAAYYVGYLQPRTFLLKYNENGTITDAVDCALDPLSETKCTLKSFTVEKGIYQTSNFRVQPTESIVRFPNITNLCPFGEVFNATRFASVYAWNRKRISNCVADYSVLYNSASFSTFKCYGVSPTKLNDLCFTNVYADSFVIRGDEVRQIAPGQTGKIADYNYKLPDDFTGCVIAWNSNNLDSKVGGNYNYLYRLFRKSNLKPFERDISTEIYQAGSTPCNGVEGFNCYFPLQSYGFQPTNGVGYQPYRVVVLSFELLHAPATVCGPKKSTNLVKNKCVNFNFNGLTGTGVLTESNKKFLPFQQFGRDIADTTDAVRDPQTLEILDITPCSFGGVSVITPGTNTSNQVAVLYQDVNCTEVPVAIHADQLTPTWRVYSTGSNVFQTRAGCLIGAEHVNNSYECDIPIGAGICASYQTQTNSPRRARSVASQSIIAYTMSLGAENSVAYSNNSIAIPTNFTISVTTEILPVSMTKTSVDCTMYICGDSTECSNLLLQYGSFCTQLNRALTGIAVEQDKNTQEVFAQVKQIYKTPPIKDFGGFNFSQILPDPSKPSKRSFIEDLLFNKVTLADAGFIKQYGDCLGDIAARDLICAQKFNGLTVLPPLLTDEMIAQYCSALLAGTITSGWTFGAGAALQIPFAMQMAYRFNGIGVTQNVLYENQKLIANQFNSAIGKIQDSLSFTASALGKLQDVVNQNAQALNTLVKQLSSNFGAISSVLNDILSRLDKVEAEVQIDRLITGRLQSLQTYVTQQLIRAAEIRASANLAATKMSECVLGQSKRVDFCGKGYHLMSFPQCAPHGVVFLHVTYVPAQEKNFTTAPAICHDGKAHFPREGVFVSNGTHWFVTQRNFYEPQIITTDNTFVSGNCDVVIGIVNNTVYDPLQPELDSGGGSGGGQIYEGKLTAEGLRFGIVASRFNHALVDRLVEGAIDAIVRHGGREEDITLVRVPGSWEIPVAAGELARKEDIDAVIAIGVLIRGATPHFDYIASEVSKGLADLSLELRKPITFGVITADTLEQAIERAGTKHGNKGWEAALSAIEMANLFKSLR

SEQ ID NO: 8602 - protein, 1307 aa, Artificial Sequence; identical to SEQ ID NO: 8582
  SARS-CoV-2/Australia/NSW10/2020__EPI_ISL_413596 spike protein (1-1147)(T874C_S1055C) LumSynth construct

SEQ ID NO: 8603 - protein, 1307 aa, Artificial Sequence
  SARS-CoV-2/Switzerland/1000477797/2020__EPI_ISL_413023 spike protein (1-1147)(T874C_S1055C) LumSynth construct
MFVFLVLLPLVSSQCVNLTTRTQLPPAYTNSFTRGVYYPDKVFRSSVLHSTQDLFLPFFSNVTWFHAIHVSGTNGTKRFDNPVLPFNDGVYFASTEKSNIIRGWIFGTTLDSKTQSLLIVNNATNVVIKVCEFQFCNDPFLGVYYHKNNKSWMESEFRVYSSANNCTFEYVSQPFLMDLEGKQGNFKNLREFVFKNIDGYFNIYSKHTPINLVRDLPQGFSALEPLVDLPIGINITRFQTLLALHRSYLTPGDSSSGWTAGAAAYYVGYLQPRTFLLKYNENGTITDAVDCALDPLSETKCTLKSFTVEKGIYQTSNFRVQPTESIVRFPNITNLCPFGEVFNATRFASVYAWNRKRISNCVADYSVLYNSASFSTFKCYGVSPTKLNDLCFTNVYADSFVIRGDEVRQIAPGQTGKIADYNYKLPDDFTGCVIAWNSNNLDSKVGGNYNYLYRLFRKSNLKPFERDISTEIYQAGSTPCNGVEGFNCYFPLQSYGFQPTNGVGYQPYRVVVLSFELLHAPATVCGPKKSTNLVKNKCVNFNFNGLTGTGVLTESNKKFLPFQQFGRDIADTTDAVRDPQTLEILDITPCSFGGVSVITPGTNTSNQVAVLYQGVNCTEVPVAIHADQLTPTWRVYSTGSNVFQTRAGCLIGAEHVNNSYECDIPIGAGICASYQTQTNSPRRARSVASQSIIAYTMSLGAENSVAYSNNSIAIPTNFTISVTTEILPVSMTKTSVDCTMYICGDSTECSNLLLQYGSFCTQLNRALTGIAVEQDKNTQEVFAQVKQIYKTPPIKDFGGFNFSQILPDPSKPSKRSFIEDLLFNKVTLADAGFIKQYGDCLGDIAARDLICAQKFNGLTVLPPLLTDEMIAQYCSALLAGTITSGWTFGAGAALQIPFAMQMAYRFNGIGVTQNVLYENQKLIANQFNSAIGKIQDSLSSTASALGKLQDVVNQNAQALNTLVKQLSSNFGAISSVLNDILSRLDKVEAEVQIDRLITGRLQSLQTYVTQQLIRAAEIRASANLAATKMSECVLGQSKRVDFCGKGYHLMSFPQCAPHGVVFLHVTYVPAQEKNFTTAPAICHDGKAHFPREGVFVSNGTHWFVTQRNFYEPQIITTDNTFVSGNCDVVIGIVNNTVYDPLQPELDSGGGSGGGQIYEGKLTAEGLRFGIVASRFNHALVDRLVEGAIDAIVRHGGREEDITLVRVPGSWEIPVAAGELARKEDIDAVIAIGVLIRGATPHFDYIASEVSKGLADLSLELRKPITFGVITADTLEQAIERAGTKHGNKGWEAALSAIEMANLFKSLR

SEQ ID NO: 8604 - protein, 1307 aa, Artificial Sequence
  SARS-CoV-2/Belgium/BA-02291/2020__EPI_ISL_415159 spike protein (1-1147)(T874C_S1055C) LumSynth construct
MFVFLVLLPLVSSQCVNLTTRTQLPPAYTNSFTRGVYYPDKVFRSSVLHSTQDLFLPFFSNVTWFHAIHVSGTNGTKRFDNPVLPFNDGVYFASTEKSNIIRGWIFGTTLDSKTQSLLIVNNATNVVIKVCEFQFCNDPFLGVYYHKNNKSWMESEFRVYSSANNCTFEYVSQPFLMDLEGKQGNFKNLREFVFKNIDGYFKIYSKHTPINLVRDLPQGFSALEPLVDLPIGINITRFQTLLALHRSYLTPGDSSSGWTAGAAAYYVGYLQPRTFLLKYNENGTITDAVDCALDPLSETKCTLKSFTVEKGIYQTSNFRVQPTESIVRFPNITNLCPFGEVFNATRFASVYAWNRKRISNCVADYSVLYNSASFSTFKCYGVSPTKLNDLCFTNVYADSFVIRGDEVRQIAPGQTGKIADYNYKLPDDFTGCVIAWNSNNLDSKVGGNYNYLYRLFRRSNLKPFERDISTEIYQAGSTPCNGVEGFNCYFPLQSYGFQPTNGVGYQPYRVVVLSFELLPAPATVCGPKKSTNLVKNKCVNFNFNGLTGTGVLTESNKKFLPFQQFGRDIADTTDAVRDPQTLEILDITPCSFGGVSVITPGTNTSNQVAVLYQGVNCTEVPVAIHADQLTPTWRVYSTGSNVFQTRAGCLIGAEHVNNSYECDIPIGAGICASYQTQTNSPRRARSVASQSIIAYTMSLGAENSVAYSNNSIAIPTNFTISVTTEILPVSMTKTSVDCTMYICGDSTECSNLLLQYGSFCTQLNRALTGIAVEQDKNTQEVFAQVKQIYKTPPIKDFGGFNFSQILPDPSKPSKRSFIEDLLFNKVTLADAGFIKQYGDCLGDIAARDLICAQKFNGLTVLPPLLTDEMIAQYCSALLAGTITSGWTFGAGAALQIPFAMQMAYRFNGIGVTQNVLYENQKLIANQFNSAIGKIQDSLSSAAPALGKLQDVVNQNAQALNTLVKQLSSNFGAISSVLNDILSRLDKVEAEVQIDRLITGRLQSLQTYVTQQLIRAAEIRASANLAATKMSECVLGQSKRVDFCGKGYHLMSFPQCAPHGVVFLHVTYVPAQEKNFTTAPAICHDGKAHFPREGVFVSNGTHWFVTQRNFYEPQIITTDNTFVSGNCDVVIGIVNNTVYDPLQPELDSGGGSGGGQIYEGKLTAEGLRFGIVASRFNHALVDRLVEGAIDAIVRHGGREEDITLVRVPGSWEIPVAAGELARKEDIDAVIAIGVLIRGATPHFDYIASEVSKGLADLSLELRKPITFGVITADTLEQAIERAGTKHGNKGWEAALSAIEMANLFKSLR

SEQ ID NO: 8605 - protein, 1307 aa, Artificial Sequence
  SARS-CoV-2/USA/WA8-UW5/2020__EPI_ISL_413486 spike protein (1-1147)(T874C_S1055C) LumSynth construct
MFVFLVLLPLVSSQCVNLTTRTQLPPAYTNSFTRGVYYPDKVFRSSVLHSTQDLFLPFFSNVTWFHAIHVSGTNGTKRFDNPVLPFNDGVYFASTEKSNIIRGWIFGTTLDSKTQSLLIVNNATNVVIKVCEFQFCNDPFLGVYYHKNNKSWMESEFRVYSSANNCTFEYVSQPFLMDLEGKQGNFKNLREFVFKNIDGYFKIYSKHTPINLVRDLPQGFSALEPLVDLPIGINITRFQTLLALHRSYLTPGDSSSGWTAGAAAYYVGYLQPRTFLLKYNENGTITDAVDCALDPLSETKCTLKSFTVEKGIYQTSNFRVQPTESIVRFPNITNLCPFGEVFNATRFASVYAWNRKRISNCVADYSVLYNSASFSTFKCYGVSPTKLNDLCFTNVYADSFVIRGDEVRQIAPGQTGKIADYNYKLPDDFTGCVIAWNSNNLDSKVGGNYNYLYRLFRKSNLKPFERDISTEIYQAGSTPCNGVEGFNCYFPLQSYGFQPTNGVGYQPYRVVVLSFELLHAPATVCGPKKSTNLVKNKCVNFNFNGLTGTGVLTESNKKFLPFQQFGRDIADTTDAVRDPQTLEILDITPCSFGGVSVITPGTNTSNQVAVLYQDVNCTEVPVAIHADQLTPTWRVYSTGSNVFQTRAGCLIGAEYVNNSYECDIPIGAGICASYQTQTNSPRRARSVASQSIIAYTMSLGAENSVAYSNNSIAIPTNFTISVTTEILPVSMTKTSVDCTMYICGDSTECSNLLLQYGSFCTQLNRALTGIAVEQDKNTQEVFAQVKQIYKTPPIKDFGGFNFSQILPDPSKPSKRSFIEDLLFNKVTLADAGFIKQYGDCLGDIAARDLICAQKFNGLTVLPPLLTDEMIAQYCSALLAGTITSGWTFGAGAALQIPFAMQMAYRFNGIGVTQNVLYENQKLIANQFNSAIGKIQDSLSSTASALGKLQDVVNQNAQALNTLVKQLSSNFGAISSVLNDILSRLDKVEAEVQIDRLITGRLQSLQTYVTQQLIRAAEIRASANLAATKMSECVLGQSKRVDFCGKGYHLMSFPQCAPHGVVFLHVTYVPAQEKNFTTAPAICHDGKAHFPREGVFVSNGTHWFVTQRNFYEPQIITTDNTFVSGNCDVVIGIVNNTVYDPLQPELDSGGGSGGGQIYEGKLTAEGLRFGIVASRFNHALVDRLVEGAIDAIVRHGGREEDITLVRVPGSWEIPVAAGELARKEDIDAVIAIGVLIRGATPHFDYIASEVSKGLADLSLELRKPITFGVITADTLEQAIERAGTKHGNKGWEAALSAIEMANLFKSLR

SEQ ID NO: 8606 - protein, 1307 aa, Artificial Sequence
  SARS-CoV-2/England/20102000506/2020__EPI_ISL_415147 spike protein (1-1147)(T874C_S1055C) LumSynth construct
MFVFLVLLPLVSSQCVNLTTRTQLPPAYTNSFTRGVYYPDKVFRSSVLHSTQDLFLPFFSNVTWFHAIHVSGTNGTKRFDNPVLPFNDGVYFASTEKSNIIRGWIFGTTLDSKTQSLLIVNNATNVVIKVCEFQFCNDPFLGVYYHKNNKSWMESEFRVYSSANNCTFEYVSQPFLMDLEGKQGNFKNLREFVFKNIDGYFKIYSKHTPINLVRDLPQGFSALEPLVDLPIGINITRFQTLLALHRSYLTPGDSSSGWTAGAAAYYVGYLQPRTFLLKYNENGTITDAVDCALDPLSETKCTLKSFTVEKGIYQTSNFRVQPTESIVRFPNITNLCPFGEVFNATRFASVYAWNRKRISNCVADYSVLYNSASFSTFKCYGVSPTKLNDLCFTNVYADSFVIRGDEVRQIAPGQTGKIADYNYKLPDDFTGCVIAWNSNNLDSKVGGNYNYLYRLFRKSNLKPFERDISTEIYQAGSTPCNGVEGFNCYFPLQSYGFQPTNGVGYQPYRVVVLSFELLHAPATVCGPKKSTNLVKNKCVNFNFNGLTGTGVLTESNKKFLPFQQFGRDIADTTDAVRDPQTLEILDITPCSFGGVSVITPGTNTSNQVAVLYQGVNCTEVPVAIHADQLTPTWRVYSTGSNVFQTRAGCLIGAEHVNNSYECDIPIGAGICASYQTQTNSPRRARSVASQSIIAYTMSLGAENSVAYSNNSIAIPTNFTISVTTEILPVSMTKTSVDCTMYICGDSTECSNLLLQYGSFCTQLNRALTGIAVEQDKNTQEVFAQVKQIYKTPPIKDFGGFNFSQILPDPSKPSKRSFIEDLLFNKVTLADAGFIKQYGYCLGDIAARDLICAQKFNGLTVLPPLLTDEMIAQYCSALLAGTITSGWTFGAGAALQIPFAMQMAYRFNGIGVTQNVLYENQKLIANQFNSAIGKIQDSLSSTASALGKLQDVVNQNAQALNTLVKQLSSNFGAISSVLNDILSRLDKVEAEVQIDRLITGRLQSLQTYVTQQLIRAAEIRASANLAATKMSECVLGQSKRVDFCGKGYHLMSFPQCAPHGVVFLHVTYVPAQEKNFTTAPAICHDGKAHFPREGVFVSNGTHWFVTQRNFYEPQIITTDNTFVSGNCDVVIGIVNNTVYDPLQPELDSGGGSGGGQIYEGKLTAEGLRFGIVASRFNHALVDRLVEGAIDAIVRHGGREEDITLVRVPGSWEIPVAAGELARKEDIDAVIAIGVLIRGATPHFDYIASEVSKGLADLSLELRKPITFGVITADTLEQAIERAGTKHGNKGWEAALSAIEMANLFKSLR

SEQ ID NO: 8607 - protein, 1307 aa, Artificial Sequence
  SARS-CoV-2/Belgium/VAG-03013/2020__EPI_ISL_415155 spike protein (1-1147)(T874C_S1055C) LumSynth construct
MFVFLVLLPLVSSQCVNLTTRTQLPPAYTNSFTRGVYYPDKVFRSSVLHSTQDLFLPFFSNVTWFHAIHVSGTNGTKRFDNPVLPFNDGVYFASTEKSNIIRGWIFGTTLDSKTQSLLIVNNATNVVIKVCEFQFCNDPFLGVYYHKNNKSWMESEFRVYSSANNCTFEYVSQPFLMDLEGKQGNFKNLREFVFKNIDGYFKIYSKHTPINLVRDLPQGFSALEPLVDLPIGINITRFQTLLALHRSYLTPGDSSSGWTAGAAAYYVGYLQPRTFLLKYNENGTITDAVDCALDPLSETKCTLKSFTVEKGIYQTSNFRVQPTESIVRFPNITNLCPFGEVFNATRFASVYAWNRKRISNCVADYSVLYNSASFSTFKCYGVSPTKLNDLCFTNVYADSFVIRGDEVRQIAPGQTGKIADYNYKLPDDFTGCVIAWNSNNLDSKVGGNYNYLYRLFRKSNLKPFERDISTEIYQAGSTPCNGVEGFNCYFPLQSYGFQPTNGVGYQPYRVVVLSFELLHAPATVCGPKKSTNLVKNKCVNFNFNGLTGTGVLTESNKKFLPFQQFGRDIADTTDAVRDPQTLEILDITPCSFGGVSVITPGTNTSNQVAVLYQGVNCTEVPVAIHADQLTPTWRVYSTGSNVFQTRAGCLIGAEHVNNSYECDIPIGAGICASYQTQTNSPRRARSVASQSIIAYTMSLGAENSVAYSNNSIAIPTNFTISVTTEILPVSMTKTSVDCTMYICGDSTECSNLLLQYGSFCTQLNRALTGIAVEQDKNTQEVFAQVKQIYKTPPIKDFGGFNFSQILPDPSKPSKRSFIEDLLFNKVTLADAGFIKQYGDCLGDIAARDLICAQKFNGLTVLPPLLTDEMIAQYCSALLAGTITSGWTFGAGAALQIPFAMQMAYRFNGIGVTQNVLYENQKLIANQFNSAIGKIQDSLSSTATALGKLQDVVNQNAQALNTLVKQLSSNFGAISSVLNDILSRLDKVEAEVQIDRLITGRLQSLQTYVTQQLIRAAEIRASANLAATKMSECVLGQSKRVDFCGKGYHLMSFPQCAPHGVVFLHVTYVPAQEKNFTTAPAICHDGKAHFPREGVFVSNGTHWFVTQRNFYEPQIITTDNTFVSGNCDVVIGIVNNTVYDPLQPELDSGGGSGGGQIYEGKLTAEGLRFGIVASRFNHALVDRLVEGAIDAIVRHGGREEDITLVRVPGSWEIPVAAGELARKEDIDAVIAIGVLIRGATPHFDYIASEVSKGLADLSLELRKPITFGVITADTLEQAIERAGTKHGNKGWEAALSAIEMANLFKSLR

SEQ ID NO: 8608 - protein, 1307 aa, Artificial Sequence
  SARS-CoV-2/Belgium/BC-03016/2020__EPI_ISL_415157 spike protein (1-1147)(T874C_S1055C) LumSynth construct
MFVFLVLLPLVSSQCVNLTTRTQLPPAYTNSFTRGVYYPDKVFRSSVLHSTQDLFLPFFSNVTWFHAIHVSGTNGTKRFDNPVLPFNDGVYFASTEKSNIIRGWIFGTTLDSKTQSLLIVNNATNVVIKVCEFQFCNDPFLGVYYHKNNKSWMESEFRVYSSANNCTFEYVSQPFLMDLEGKQGNFKNLREFVFKNIDGYFKIYSKHTPINLVRDLPQGFSALEPLVDLPIGINITRFQTLLALHRSYLTPGDSSSGWTAGAAAYYVGYLQPRTFLLKYNENGTITDAVDCALDPLSETKCTLKSFTVEKGIYQTSNFRVQPTESIVRFPNITNLCPFGEVFNATRFASVYAWNRKRISNCVADYSVLYNSASFSTFKCYGVSPTKLNDLCFTNVYADSFVIRGDEVRQIAPGQTGKIADYNYKLPDDFTGCVIAWNSNNLDSKVGGNYNYLYRLFRKSNLKPFERDISTEIYQAGSTPCNGVEGFNCYFPLQSYGFQPTNGVGYQPYRVVVLSFELLHAPATVCGPKKSTNLVKNKCVNFNFNGLTGTGVLTESNKKFLPFQQFGRDIADTTDAVRDPQTLEILDITPCSFGGVSVITPGTNTSNQVAVLYQGVNCTEVPVAIHADQLTPTWRVYSTGSNVFQTRAGCLIGAEHVNNSYECDIPIGAGICASYQTQTNSPRRARSVASQSIIAYTMSLGAENSVAYSNNSIAIPTNFTISVTTEILPVSMTKTSVDCTMYICGDSTECSNLLLQYGSFCTQLNRALTGIAVEQDKNTQEVFAQVKQIYKTPPIKDFGGFNFSQILPDPSKPSKRSFIEDLLFNKVTLADAGFIKQYGDCLGDIAARDLICAQKFNGLTVLPPLLTDEMIAQYCSALLAGTITSGWTFGAGAALQIPFAMQMAYRFNGIGVTQNVLYENQKLIANQFNSAIGKIQDSLSSTAPALGKLQDVVNQNAQALNTLVKQLSSNFGAISSVLNDILSRLDKVEAEVQIDRLITGRLQSLQTYVTQQLIRAAEIRASANLAATKMSECVLGQSKRVDFCGKGYHLMSFPQCAPHGVVFLHVTYVPAQEKNFTTAPAICHDGKAHFPREGVFVSNGTHWFVTQRNFYEPQIITTDNTFVSGNCDVVIGIVNNTVYDPLQPELDSGGGSGGGQIYEGKLTAEGLRFGIVASRFNHALVDRLVEGAIDAIVRHGGREEDITLVRVPGSWEIPVAAGELARKEDIDAVIAIGVLIRGATPHFDYIASEVSKGLADLSLELRKPITFGVITADTLEQAIERAGTKHGNKGWEAALSAIEMANLFKSLR

SEQ ID NO: 8609 - protein, 1307 aa, Artificial Sequence
  SARS-CoV-2/Germany/BavPat3/2020__EPI_ISL_414521 spike protein (1-1147)(T874C_S1055C) LumSynth construct
MFVFLVLLPLVSSQCVNLTTRTQLPPAYTNSFTRGVYYPDKVFRSSVLHSTQDLFLPFFSNVTWFHAIHVSGTNGTKRFDNPVLPFNDGVYFASTEKSNIIRGWIFGTTLDSKTQSLLIVNNATNVVIKVCEFQFCNDPFLGVYYHKNNKSWMESEFRVYSSANNCTFEYVSQPFLMDLEGKQGNFKNLREFVFKNIDGYFKIYSKHTPINLVRDLPQGFSALEPLVDLPIGINITRFQTLLALHRSYLTPGDSSSGWTAGAAAYYVGYLQPRTFLLKYNENGTITDAVDCALDPLSETKCTLKSFTVEKGIYQTSNFRVQPTESIVRFPNITNLCPFGEVFNATRFASVYAWNRKRISNCVADYSVLYNSASFSTFKCYGVSPTKLNDLCFTNVYADSFVIRGDEVRQIAPGQTGKIADYNYKLPDDFTGCVIAWNSNNLDSKVGGNYNYLYRLFRKSNLKPFERDISTEIYQAGSTPCNGVEGFNCYFPLQSYGFQPTNGVGYQPYRVVVLSFELLHAPATVCGPKKSTNLVKNKCVNFNFNGLTGTGVLTESNKKFLPFQQFGRDIADTTDAVRDPQTLEILDITPCSFGGVSVITPGTNTSNQVAVLYQDVNCTEVPVAIHADQLTPTWRVYSTGSNVFQTRAGCLIGAEHVNNSYECDIPIGAGICASYQTQTNSPRRARSVASQSIIAYTMSLGAENSVAYSNNSIAIPTNFTISVTTEILPVSMTKTSVDCTMYICGDSTECSNLLLQYGSFCTQLNRALTGIAVEQDKNTQQVFAQVKQIYKTPPIKDFGGFNFSQILPDPSKPSKRSFIEDLLFNKVTLADAGFIKQYGDCLGDIAARDLICAQKFNGLTVLPPLLTDEMIAQYCSALLAGTITSGWTFGAGAALQIPFAMQMAYRFNGIGVTQNVLYENQKLIANQFNSAIGKIQDSLSSTASALGKLQDVVNQNAQALNTLVKQLSSNFGAISSVLNDILSRLDKVEAEVQIDRLITGRLQSLQTYVTQQLIRAAEIRASANLAATKMSECVLGQSKRVDFCGKGYHLMSFPQCAPHGVVFLHVTYVPAQEKNFTTAPAICHDGKAHFPREGVFVSNGTHWFVTQRNFYEPQIITTDNTFVSGNCDVVIGIVNNTVYDPLQPELDSGGGSGGGQIYEGKLTAEGLRFGIVASRFNHALVDRLVEGAIDAIVRHGGREEDITLVRVPGSWEIPVAAGELARKEDIDAVIAIGVLIRGATPHFDYIASEVSKGLADLSLELRKPITFGVITADTLEQAIERAGTKHGNKGWEAALSAIEMANLFKSLR

SEQ ID NO: 8610 - protein, 1307 aa, Artificial Sequence
  SARS-CoV-2/France/HF1805/2020__EPI_ISL_414628 spike protein (1-1147)(T874C_S1055C) LumSynth construct
MFVFLVLLPLVSSQCVNLTTRTQLPPAYTNSFTRGVYYPDKVFRSSVLHSTQDLFLPFFSNVTWFHAIHVSGTNGTKRFDNPVLPFNDGVYFASTEKSNIIRGWIFGTTLDSKTQSLLIVNNATNVVIKVCEFQFCNDPFLGVYYHKNNKSWMESEFRVYSSANNCTFEYVSQPFLMDLEGKQGNFKNLREFVFKNIDGYFKIYSKHTPINLVRDLPQGFSALEPLVDLPIGINITRFQTLLALHRSYLTPGDSSSGWTAGAAAYYVGYLQPRTFLLKYNENGTITDAVDCALDPLSETKCTLKSFTVEKGIYQTSNFRVQPTESIVRFPNITNLCPFGEVFNATRFASVYAWNRKRISNCVADYSVLYNSASFSTFKCYGVSPTKLNDLCFTNVYADSFVIRGDEVRQIAPGQTGKIADYNYKLPDDFTGCVIAWNSNNLDSKVGGNYNYLYRLFRKSNLKPFERDISTEIYQAGSTPCNGVEGFNCYFPLQSYGFQPTNGVGYQPYRVVVLSFELLHAPATVCGPKKSTNLVKNKCVNFNFNGLTGTGVLTESNKKFLPFQQFGRDIADTTDAVRDPQTLEILDITPCSFGGVSVITPGTNTSNQVAVLYQGVNCTEVPVAIHADQLTPTWRVYSTGSNVFQTRAGCLIGAEHVNNSYECDIPIGAGICASYQTQTNSPRRARSVASQSIIAYTMSLGAENSVAYSNNSIAIPTNFTISVTTEILPVSMTKTSVDCTMYICGDSTECSNLLLQYGSFCTQLNRALTGIAVEQDKNTQEVFAQVKQIYKTPPIKDFGGFNFSQILPDPSKPSKRSFIEDLLFNKVTLADAGFIKQYGDCLGDIAARDLICAQKFNGLTVLPPLLTDEMIAQYCSALLAGTITSGWTFGAGAALQIPFAMQMAYRFNGIGVTQNVLYENQKLIANQFNSAIGKIQDSLSSTASALGKLQDVVNQNAQALNTLVKQLSSNFGAISSVLNDILSRLDKVEAEVQIDRLITGRLQSLQTYVTQQLIRAAEIRASANLAATKMSECVLGQSKRVDFCGKGYHLMSFPQCAPHGVVFLHVTYVPAQEKNFTTAPAICHDGKAHFPREGVFVSNGTHWFVTQRNFYEPQIITTDNTFVSGNCDVVIGVVNNTVYDPLQPELDSGGGSGGGQIYEGKLTAEGLRFGIVASRFNHALVDRLVEGAIDAIVRHGGREEDITLVRVPGSWEIPVAAGELARKEDIDAVIAIGVLIRGATPHFDYIASEVSKGLADLSLELRKPITFGVITADTLEQAIERAGTKHGNKGWEAALSAIEMANLFKSLR

SEQ ID NO: 8611 - protein, 1307 aa, Artificial Sequence
  SARS-CoV-2/Netherlands/ZuidHolland_9/2020__EPI_ISL_414445 spike protein (1-1147)(T874C_S1055C) LumSynth construct
MFVFLVLLPLVSSQCVNLTTRTQLPPAYTNSFTRGVYYPDKVFRSSVLHSTQDLFLPFFSNVTWFHAIHVSGTNGTKRFDNPVLPFNDGVYFASTEKSNIIRGWIFGTTLDSKTQSLLIVNNATNVVIKVCEFQFCNDPFLGVYYHKNNKSWMESEFRVYSSANNCTFEYVSQPFLMDLEGKQGNFKNLREFVFKNIDGYFKIYSKHTPINLVRDLPQGFSALEPLVDLPIGINITRFQTLLALHRSYLTPGDSSSGWTAGAAAYYVGYLQPRTFLLKYNENGTITDAVDCALDPLSETKCTLKSFTVEKGIYQTSNFRVQPTESIVRFPNITNLCPFGEVFNATRFASVYAWNRKRISNCVADYSVLYNSASFSTFKCYGVSPTKLNDLCFTNVYADSFVIRGDEVRQIAPGQTGKIADYNYKLPDDFTGCVIAWNSNNLDSKVGGNYNYLYRLFRKSNLKPFERDISTEIYQAGSTPCNGVEGFNCYFPLQSYGFQPTNGVGYQPYRVVVLSFELLHAPATVCGPKKSTNLVKNKCVNFNFNGLTGTGVLTESNKKFLPFQQFGRDIADTTDAVRDPQTLEILDITPCSFGGVSVITPGTNTSNQVAVLYQGVNCTEVPVAIHADQLTPTWRVYSTGSNVFQTRAGCLIGAEHVNNSYECDIPIGAGICASYQTQTNSPRRARSVASQSIIAYTMSLGAENSVAYSNNSIAIPTNFTISVTTEILPVSMTKTSVDCTMYICGDSTECSNLLLQYGSFCTQLNRALTGIAVEQDKNTQEVFAQVKQIYKTPPIKDFGGFNFSQILPDPSKPSKRSFIEDLLFNKVTLADAGFIKQYGDCLGDIAARDLICVQKFNGLTVLPPLLTDEMIAQYCSALLAGTITSGWTFGAGAALQIPFAMQMAYRFNGIGVTQNVLYENQKLIANQFNSAIGKIQDSLSSTASALGKLQDVVNQNAQALNTLVKQLSSNFGAISSVLNDILSRLDKVEAEVQIDRLITGRLQSLQTYVTQQLIRAAEIRASANLAATKMSECVLGQSKRVDFCGKGYHLMSFPQCAPHGVVFLHVTYVPAQEKNFTTAPAICHDGKAHFPREGVFVSNGTHWFVTQRNFYEPQIITTDNTFVSGNCDVVIGIVNNTVYDPLQPELDSGGGSGGGQIYEGKLTAEGLRFGIVASRFNHALVDRLVEGAIDAIVRHGGREEDITLVRVPGSWEIPVAAGELARKEDIDAVIAIGVLIRGATPHFDYIASEVSKGLADLSLELRKPITFGVITADTLEQAIERAGTKHGNKGWEAALSAIEMANLFKSLR

SEQ ID NO: 8612 - protein, 1307 aa, Artificial Sequence
  SARS-CoV-2/Finland/FIN03032020A/2020__EPI_ISL_413602 spike protein (1-1147)(T874C_S1055C) LumSynth construct
MFVFLVLLPLVSSQCVNLTTRTQLPPAYTNSFTRGVYYPDKVFRSSVLHSTQDLFLPFFSNVTWFHAIHVSGTNGTKRFDNPVLPFNDGVYFASTEKSNIIRGWIFGTTLDSKTQSLLIVNNATNVVIKVCEFQFCNDPFLGVYYHKNNKSWMESEFRVYSSANNCTFEYVSQPFLMDLEGKQGNFKNLREFVFKNIDGYFKIYSKHTPINLVRDLPQGFSALEPLVDLPIGINITRFQTLLALHRSYLTPGDSSSGWTAGAAAYYVGYLQPRTFLLKYNENGTITDAVDCALDPLSETKCTLKSFTVEKGIYQTSNFRVQPTESIVRFPNITNLCPFGEVFNATRFASVYAWNRKRISNCVADYSVLYNSASFSTFKCYGVSPTKLNDLCFTNVYADSFVIRGDEVRQIAPGQTGKIADYNYKLPDDFTGCVISWNSNNLDSKVGGNYNYLYRLFRKSNLKPFERDISTEIYQAGSTPCNGVEGFNCYFPLQSYGFQPTNGVGYQPYRVVVLSFELLHAPATVCGPKKSTNLVKNKCVNFNFNGLTGTGVLTESNKKFLPFQQFGRDIADTTDAVRDPQTLEILDITPCSFGGVSVITPGTNTSNQVAVLYQGVNCTEVPVAIHADQLTPTWRVYSTGSNVFQTRAGCLIGAEHVNNSYECDIPIGAGICASYQTQTNSPRRARSVASQSIIAYTMSLGAENSVAYSNNSIAIPTNFTISVTTEILPVSMTKTSVDCTMYICGDSTECSNLLLQYGSFCTQLNRALTGIAVEQDKNTQEVFAQVKQIYKTPPIKDFGGFNFSQILPDPSKPSKRSFIEDLLFNKVTLADAGFIKQYGDCLGDIAARDLICAQKFNGLTVLPPLLTDEMIAQYCSALLAGTITSGWTFGAGAALQIPFAMQMAYRFNGIGVTQNVLYENQKLIANQFNSAIGKIQDSLSSTASALGKLQDVVNQNAQALNTLVKQLSSNFGAISSVLNDILSRLDKVEAEVQIDRLITGRLQSLQTYVTQQLIRAAEIRASANLAATKMSECVLGQSKRVDFCGKGYHLMSFPQCAPHGVVFLHVTYVPAQEKNFTTAPAICHDGKAHFPREGVFVSNGTHWFVTQRNFYEPQIITTDNTFVSGNCDVVIGIVNNTVYDPLQPELDSGGGSGGGQIYEGKLTAEGLRFGIVASRFNHALVDRLVEGAIDAIVRHGGREEDITLVRVPGSWEIPVAAGELARKEDIDAVIAIGVLIRGATPHFDYIASEVSKGLADLSLELRKPITFGVITADTLEQAIERAGTKHGNKGWEAALSAIEMANLFKSLR

SEQ ID NO: 8613 - protein, 1307 aa, Artificial Sequence
  SARS-CoV-2/France/GE1977/2020__EPI_ISL_414632 spike protein (1-1147)(T874C_S1055C) LumSynth construct
MFVFLVLLPLVSSQCVNLTTRTQLPPAYTNSFTRGVYYPDKVFRSSVLHSTQDLFLPFFSNVTWFHAIHVSGTNGTKRFDNPVLPFNDGVYFASTEKSNIIRGWIFGTTLDSKTQSLLIVNNATNVVIKVCEFQFCNDPFLGVYYHKNNKSWMESEFRVYSSANNCTFEYVSQPFLMDLEGKQGNFKNLREFVFKNIDGYFKIYSKHTPINLVRDLPQGFSALEPLVDLPIGINITRFQTLLALHRSYLTPGDSSSGWTAGAAAYYVGYLQPRTFLLKYNENGTITDAVDCALDPLSETKCTLKSFTVEKGIYQTSNFRVQPTESIVRFPNITNLCPFGEVFNATRFASVYAWNRKRISNCVADYSVLYNSASFSTFKCYGVSPTKLNDLCFTNVYADSFVIRGDEVRQIAPGQTGKIADYNYKLPDDFTGCVIAWNSNNLDSKVGGNYNYLYRLFRKSNLKPFERDISTEIYQAGSTPCNGVEGFNCYFPLQSYGFQPTNGVGYQPYRVVVLSFELLHAPATVCGPKKSTNLVKNKCVNFNFNGLTGTGVLTESNKKFLPFQQFGRDIADTTDAVRDPQTLEILDITPCSFGGVSVITPGTNTSNQVAVLYQGVNCTEVPVAIHADQLTPTWRVYSTGSNVFQTRAGCLIGAEHVNNSYECDIPIGAGICASYQTQTNSPRRARSVASQSIIAYTMSLGAENSVAYSNNSIAIPTNFTISVTTEILPVSMTKTSVDCTMYICGDSTECSNLLLQYGSFCTQLNRALTGIAVEQDKNTQEVFAQVKQIYKTPPIKDFGGFNFSQILPDPSKPSKRSFIEDLLFNKVTLADAGFIKQYGDCLGDIAARDLICAQKFNGLTVLPPLLTDEMIAQYCSALLAGTITSGWTFGAGAALQIPFAMQMAYRFNGIGVTQNVLYENQKLIANQFNSAIGKIQDSLFSTASALGKLQDVVNQNAQALNTLVKQLSSNFGAISSVLNDILSRLDKVEAEVQIDRLITGRLQSLQTYVTQQLIRAAEIRASANLAATKMSECVLGQSKRVDFCGKGYHLMSFPQCAPHGVVFLHVTYVPAQEKNFTTAPAICHDGKAHFPREGVFVSNGTHWFVTQRNFYEPQIITTDNTFVSGNCDVVIGIVNNTVYDPLQPELDSGGGSGGGQIYEGKLTAEGLRFGIVASRFNHALVDRLVEGAIDAIVRHGGREEDITLVRVPGSWEIPVAAGELARKEDIDAVIAIGVLIRGATPHFDYIASEVSKGLADLSLELRKPITFGVITADTLEQAIERAGTKHGNKGWEAALSAIEMANLFKSLR

SEQ ID NO: 8614 - protein, 1307 aa, Artificial Sequence
  SARS-CoV-2/Finland/FIN-313/2020__EPI_ISL_414641 spike protein (1-1147)(T874C_S1055C) LumSynth construct
MFVFLVLLPLVSSQCVNLTTRTQLPPAYTNSFTRGVYYPDKVFRSSVLHSTQDLFLPFFSNVTWFHAIHVSGTNGTKRFDNPVLPFNDGVYFASTEKSNIIRGWIFGTTLDSKTQSLLIVNNATNVVIKVCEFQFCNDPFLGVYYHKNNKSWMESEFRVYSSANNCTFEYVSQPFLMDLEGKQGNFKNLREFVFKNIDGYFKIYSKHTPINLVRDLPQGFSALEPLVDLPIGINITRFKTLLALHRSYLTPGDSSSGWTAGAAAYYVGYLQPRTFLLKYNENGTITDAVDCALDPLSETKCTLKSFTVEKGIYQTSNFRVQPTESIVRFPNITNLCPFGEVFNATRFASVYAWNRKRISNCVADYSVLYNSASFSTFKCYGVSPTKLNDLCFTNVYADSFVIRGDEVRQIAPGQTGKIADYNYKLPDDFTGCVIAWNSNNLDSKVGGNYNYLYRLFRKSNLKPFERDISTEIYQAGSTPCNGVEGFNCYFPLQSYGFQPTNGVGYQPYRVVVLSFELLHAPATVCGPKKSTNLVKNKCVNFNFNGLTGTGVLTESNKKFLPFQQFGRDIADTTDAVRDPQTLEILDITPCSFGGVSVITPGTNTSNQVAVLYQGVNCTEVPVAIHADQLTPTWRVYSTGSNVFQTRAGCLIGAEHVNNSYECDIPIGAGICASYQTQTNSPRRARSVASQSIIAYTMSLGAENSVAYSNNSIAIPTNFTISVTTEILPVSMTKTSVDCTMYICGDSTECSNLLLQYGSFCTQLNRALTGIAVEQDKNTQEVFAQVKQIYKTPPIKDFGGFNFSQILPDPSKPSKRSFIEDLLFNKVTLADAGFIKQYGDCLGDIAARDLICAQKFNGLTVLPPLLTDEMIAQYCSALLAGTITSGWTFGAGAALQIPFAMQMAYRFNGIGVTQNVLYENQKLIANQFNSAIGKIQDSLSSTASALGKLQDVVNQNAQALNTLVKQLSSNFGAISSVLNDILSRLDKVEAEVQIDRLITGRLQSLQTYVTQQLIRAAEIRASANLAATKMSECVLGQSKRVDFCGKGYHLMSFPQCAPHGVVFLHVTYVPAQEKNFTTAPAICHDGKAHFPREGVFVSNGTHWFVTQRNFYEPQIITTDNTFVSGNCDVVIGIVNNTVYDPLQPELDSGGGSGGGQIYEGKLTAEGLRFGIVASRFNHALVDRLVEGAIDAIVRHGGREEDITLVRVPGSWEIPVAAGELARKEDIDAVIAIGVLIRGATPHFDYIASEVSKGLADLSLELRKPITFGVITADTLEQAIERAGTKHGNKGWEAALSAIEMANLFKSLR

SEQ ID NO: 8615 - protein, 1307 aa, Artificial Sequence
  SARS-CoV-2/Netherlands/ZuidHolland_2/2020__EPI_ISL_414556 spike protein (1-1147)(T874C_S1055C) LumSynth construct
MFVFLVLLPLVSSQCVNLTTRTQLPPAYTNSFTRGVYYPDKVFRSSVLHSTQDLFLPFFSNVTWFHAIHVSGTNGTKRFDNPVLPFNDGVYFASTEKSNIIRGWIFGTTLDSKTQSLLIVNNATNVVIKVCEFQFCNDPFLGVYYHKNNKSWMESEFRVYSSANNCTFEYVSQPFLMDLEGKQGNFKNLREFVFKNIDGYFKIYSKHTPINLVRDLPQGFSALEPLVDLPIGINITRFQTLLALHRSYLTPGDSSSGWTAGAAAYYVGYLQPRTFLLKYNENGTITDAVDCALDPLSETKCTLKSFTVEKGIYQTSNFRVQPTESIVRFPNITNLCPFGEVFNATRFASVYAWNRKRISNCVADYSVLYNSASFSTFKCYGVSPTKLNDLCFTNVYADSFVIRGDEVRQIAPGQTGKIADYNYKLPDDFTGCVIAWNSNNLDSKVGGNYNYLYRLFRKSNLKPFERDISTEIYQAGSTPCNGVEGFNCYFPLQSYGFQPTNGVGYQPYRVVVLSFELLHAPATVCGPKKSTNLVKNKCVNFNFNGLTGTGVLTESNKKFLPFQQFGRDIADTTDAVRDPQTLEILDITPCSFGGVSVITPGTNTSNQVAVLYQGVNCTEVPVAIHADQLTPTWRVYSTGSNVFQTRAGCLIGAEHVNNSYECDIPIGAGICASYQTQTNSPRRARSVASQSIIAYTMSLGAENSVAYSNNSIAIPTNFTISVTTEILPVSMTKTSVDCTMYICGDSTECSNLLLQYGSFCTQLNRALTGIALEQDKNTQEVFAQVKQIYKTPPIKDFGGFNFSQILPDPSKPSKRSFIEDLLFNKVTLADAGFIKQYGDCLGDIAARDLICAQKFNGLTVLPPLLTDEMIAQYCSALLAGTITSGWTFGAGAALQIPFAMQMAYRFNGIGVTQNVLYENQKLIANQFNSAIGKIQDSLSSTASALGKLQDVVNQNAQALNTLVKQLSSNFGAISSVLNDILSRLDKVEAEVQIDRLITGRLQSLQTYVTQQLIRAAEIRASANLAATKMSECVLGQSKRVDFCGKGYHLMSFPQCAPHGVVFLHVTYVPAQEKNFTTAPAICHDGKAHFPREGVFVSNGTHWFVTQRNFYEPQIITTDNTFVSGNCDVVIGIVNNTVYDPLQPELDSGGGSGGGQIYEGKLTAEGLRFGIVASRFNHALVDRLVEGAIDAIVRHGGREEDITLVRVPGSWEIPVAAGELARKEDIDAVIAIGVLIRGATPHFDYIASEVSKGLADLSLELRKPITFGVITADTLEQAIERAGTKHGNKGWEAALSAIEMANLFKSLR

SEQ ID NO: 8616 - protein, 1307 aa, Artificial Sequence
  SARS-CoV-2/USA/WA-UW31/2020__EPI_ISL_414618 spike protein (1-1147)(T874C_S1055C) LumSynth construct
MFVFLVLLPLVSSQCVNLTTRTQLPPAYTNSFTRGVYYPDKVFRSSVLHSTQDLFLPFFSNVTWFHAIHVSGTNGTKRFDNPVLPFNDGVYFASTEKSNIIRGWIFGTTLDSKTQSLLIVNNATNVVIKVCEFQFCNDPFLGVYYHKNNKSWMESEFRVYSSANNCTFEYVSQPFLMDLEGKQGNFKNLREFVFKNIDGYFKIYSKHTPINLVRDLPQGFSALEPLVDLPIGINITRFQTLLALHRSYLTPGDSSSGWTAGAAAYYVGYLQPRTFLLKYNENGTITDAVDCALDPLSETKCTLKSFTVEKGIYQTSNFRVQPTESIVRFPNITNLCPFGEVFNATRFASVYAWNRKRISNCVADYSVLYNSASFSTFKCYGVSPTKLNDLCFTNVYADSFVIRGDEVRQIAPGQTGKIADYNYKLPDDFTGCVIAWNSNNLDSKVGGNYNYLYRLFRKSNLKPFERDISTEIYQAGSTPCNGAEGFNCYFPLQSYGFQPTNGVGYQPYRVVVLSFELLHAPATVCGPKKSTNLVKNKCVNFNFNGLTGTGVLTESNKKFLPFQQFGRDIADTTDAVRDPQTLEILDITPCSFGGVSVITPGTNTSNQVAVLYQDVNCTEVPVAIHADQLTPTWRVYSTGSNVFQTRAGCLIGAEHVNNSYECDIPIGAGICASYQTQTNSPRRARSVASQSIIAYTMSLGAENSVAYSNNSIAIPTNFTISVTTEILPVSMTKTSVDCTMYICGDSTECSNLLLQYGSFCTQLNRALTGIAVEQDKNTQEVFAQVKQIYKTPPIKDFGGFNFSQILPDPSKPSKRSFIEDLLFNKVTLADAGFIKQYGDCLGDIAARDLICAQKFNGLTVLPPLLTDEMIAQYCSALLAGTITSGWTFGAGAALQIPFAMQMAYRFNGIGVTQNVLYENQKLIANQFNSAIGKIQDSLSSTASALGKLQDVVNQNAQALNTLVKQLSSNFGAISSVLNDILSRLDKVEAEVQIDRLITGRLQSLQTYVTQQLIRAAEIRASANLAATKMSECVLGQSKRVDFCGKGYHLMSFPQCAPHGVVFLHVTYVPAQEKNFTTAPAICHDGKAHFPREGVFVSNGTHWFVTQRNFYEPQIITTDNTFVSGNCDVVIGIVNNTVYDPLQPELDSGGGSGGGQIYEGKLTAEGLRFGIVASRFNHALVDRLVEGAIDAIVRHGGREEDITLVRVPGSWEIPVAAGELARKEDIDAVIAIGVLIRGATPHFDYIASEVSKGLADLSLELRKPITFGVITADTLEQAIERAGTKHGNKGWEAALSAIEMANLFKSLR

SEQ ID NO: 8617 - protein, 1307 aa, Artificial Sequence
  SARS-CoV-2/South Korea/SNU01/2020__EPI_ISL_411929 spike protein (1-1147)(T874C_S1055C) LumSynth construct
MFVFLVLLPLVSSQCVNLTTRTQLPPAYTNSFTRGVYYPDKVFRSSVLHSTQDLFLPFFSNVTWFHAIHVSGTNGTKRFDNPVLPFNDGVYFASTEKSNIIRGWIFGTTLDSKTQSLLIVNNATNVVIKVCEFQFCNDPFLGVYYHKNNKSWMESEFRVYSSANNCTFEYVSQPFLMDLEGKQGNFKNLREFVFKNIDGYFKIYSKHTPINLVRDLPQGFWALEPLVDLPIGINITRFQTLLALHRSYLTPGDSSSGWTAGAAAYYVGYLQPRTFLLKYNENGTITDAVDCALDPLSETKCTLKSFTVEKGIYQTSNFRVQPTESIVRFPNITNLCPFGEVFNATRFASVYAWNRKRISNCVADYSVLYNSASFSTFKCYGVSPTKLNDLCFTNVYADSFVIRGDEVRQIAPGQTGKIADYNYKLPDDFTGCVIAWNSNNLDSKVGGNYNYLYRLFRKSNLKPFERDISTEIYQAGSTPCNGVEGFNCYFPLQSYGFQPTNGVGYQPYRVVVLSFELLHAPATVCGPKKSTNLVKNKCVNFNFNGLTGTGVLTESNKKFLPFQQFGRDIADTTDAVRDPQTLEILDITPCSFGGVSVITPGTNTSNQVAVLYQDVNCTEVPVAIHADQLTPTWRVYSTGSNVFQTRAGCLIGAEHVNNSYECDIPIGAGICASYQTQTNSPRRARSVASQSIIAYTMSLGAENSVAYSNNSIAIPTNFTISVTTEILPVSMTKTSVDCTMYICGDSTECSNLLLQYGSFCTQLNRALTGIAVEQDKNTQEVFAQVKQIYKTPPIKDFGGFNFSQILPDPSKPSKRSFIEDLLFNKVTLADAGFIKQYGDCLGDIAARDLICAQKFNGLTVLPPLLTDEMIAQYCSALLAGTITSGWTFGAGAALQIPFAMQMAYRFNGIGVTQNVLYENQKLIANQFNSAIGKIQDSLSSTASALGKLQDVVNQNAQALNTLVKQLSSNFGAISSVLNDILSRLDKVEAEVQIDRLITGRLQSLQTYVTQQLIRAAEIRASANLAATKMSECVLGQSKRVDFCGKGYHLMSFPQCAPHGVVFLHVTYVPAQEKNFTTAPAICHDGKAHFPREGVFVSNGTHWFVTQRNFYEPQIITTDNTFVSGNCDVVIGIVNNTVYDPLQPELDSGGGSGGGQIYEGKLTAEGLRFGIVASRFNHALVDRLVEGAIDAIVRHGGREEDITLVRVPGSWEIPVAAGELARKEDIDAVIAIGVLIRGATPHFDYIASEVSKGLADLSLELRKPITFGVITADTLEQAIERAGTKHGNKGWEAALSAIEMANLFKSLR

SEQ ID NO: 8618 - protein, 1307 aa, Artificial Sequence
  SARS-CoV-2/China/WF0004/2020__EPI_ISL_413694 spike protein (1-1147)(T874C_S1055C) LumSynth construct
MFVFLVLLPLVSSQCVNLTTRTQLPPAYTNSFTRGVYYPDKVFRSSVLHSTQDLFLPFFSNVTWFHAIHVSGTNGTKRFDNPVLPFNDGVYFASTEKSNIIRGWIFGTTLDSKTQSLLIVNNATNVVIKVCEFQFCNDPFLGVYYHKNNKSWTESEFRVYSSANNCTFEYVSQPFLMDLEGKQGNFKNLREFVFKNIDGYFKIYSKHTPINLVRDLPQGFSALEPLVDLPIGINITRFQTLLALHRSYLTPGDSSSGWTAGAAAYYVGYLQPRTFLLKYNENGTITDAVDCALDPLSETKCTLKSFTVEKGIYQTSNFRVQPTESIVRFPNITNLCPFGEVFNATRFASVYAWNRKRISNCVADYSVLYNSASFSTFKCYGVSPTKLNDLCFTNVYADSFVIRGDEVRQIAPGQTGKIADYNYKLPDDFTGCVIAWNSNNLDSKVGGNYNYLYRLFRKSNLKPFERDISTEIYQAGSTPCNGVEGFNCYFPLQSYGFQPTNGVGYQPYRVVVLSFELLHAPATVCGPKKSTNLVKNKCVNFNFNGLTGTGVLTESNKKFLPFQQFGRDIADTTDAVRDPQTLEILDITPCSFGGVSVITPGTNTSNQVAVLYQDVNCTEVPVAIHADQLTPTWRVYSTGSNVFQTRAGCLIGAEHVNNSYECDIPIGAGICASYQTQTNSPRRARSVASQSIIAYTMSLGAENSVAYSNNSIAIPTNFTISVTTEILPVSMTKTSVDCTMYICGDSTECSNLLLQYGSFCTQLNRALTGIAVEQDKNTQEVFAQVKQIYKTPPIKDFGGFNFSQILPDPSKPSKRSFIEDLLFNKVTLADAGFIKQYGDCLGDIAARDLICAQKFNGLTVLPPLLTDEMIAQYCSALLAGTITSGWTFGAGAALQIPFAMQMAYRFNGIGVTQNVLYENQKLIANQFNSAIGKIQDSLSSTASALGKLQDVVNQNAQALNTLVKQLSSNFGAISSVLNDILSRLDKVEAEVQIDRLITGRLQSLQTYVTQQLIRAAEIRASANLAATKMSECVLGQSKRFDFCGKGYHLMSFPQCAPHGVVFLHVTYVPAQEKNFTTAPAICHDGKAHFPREGVFVSNGTHWFVTQRNFYEPQIITTDNTFVSGNCDVVIGIVNNTVYDPLQPELDSGGGSGGGQIYEGKLTAEGLRFGIVASRFNHALVDRLVEGAIDAIVRHGGREEDITLVRVPGSWEIPVAAGELARKEDIDAVIAIGVLIRGATPHFDYIASEVSKGLADLSLELRKPITFGVITADTLEQAIERAGTKHGNKGWEAALSAIEMANLFKSLR

SEQ ID NO: 8619 - protein, 1307 aa, Artificial Sequence
  SARS-CoV-2/China/WF0028/2020__EPI_ISL_413791 spike protein (1-1147)(T874C_S1055C) LumSynth construct
MFVFLVLLPLVSSQCVNLTTRTQLPPAYTNSFTRGVYYPDKVFRSSVLHSTQDLFLPFFSNVTWFHAIHVSGTNGTKRFDNPVLPFNDGVYFASTEKSNIIRGWIFGTTLDSKTQSLLIVNNATNVVIKVCEFQFCNDPFLGVYYHKNNKSWMESEFRVYSSANNCTFEYVSQPFLMDLEGKQGNFKNLREFVFKNIDGYFKIYSKHTPINLVRDLPQGFSALEPLVDLPIGINITRFQTLLALHRSYLTPGDSSSGWTAGAAAYYVGYLQPRTFLLKYNENGTITDAVDCALDPLSETKCTLKSFTVEKGIYQTSNFRVQPTESIVRFPNITNLCPFGEVFNATRFASVYAWNRKRISNCVADYSVLYNSASFSTFKCYGVSPTKLNDLCFTNVYADSFVIRGDEVRQIAPGQTGKIADYNYKLPDDFTGCVIAWNSNNLDSKVGGNYNYLYRLFRKSNLKPFERDISTEIYQAGSTPCNGVEGFNCYFPLQSYGFQPTNGVGYQPYRVVVLSFELLHAPATVCGPKKSTNLVKNKCVNFNFNGLTGTGVLTESNKKFLPFQQFGRDIADTTDAVRDPQTLEILDITPCSFGGVSVITPGTNTSNQVAVLYQDVNCTEVPVAIHADQLTPTWRVYSTGSNVFQTRAGCLIGAEHVNNSYECDIPIGAGICASYQTQTNSPRRARSVASQSIIAYTMSLGAENSVAYSNNSIAIPTNFTISVTTEILPVSMTKTSVDCTMYICGDSTECSNLLLQYGSFCTQLNRALTGIAVEQDKNTQEVFAQVKQIYKTPPIKDFGGFNFSQILPDPSKPSKRSFIEDLLFNKVTLADAGFIKQYGDCLGDIAARDLICAQKFNGLTVLPPLLTDEMIAQYCSALLAGTITSGWTFGAGAALQIPFAMQMAYRFNGIGVTQNVLYENQKLIANQFNSAIGKIQDSLSSTASALGKLQDVVNQNAQALNTLVKQLSSNFGAISSVLNDILSRLDKVEAEVQIDRLITGRLQSLQTYVTQQLIRAAEIRASANLAATKMSECVLGQSKRVDFCGKGYHLMSFPQCAPHGVVFLHVTYVPAQEKNFTTAPAICHDGKAHFPREGVFVSNGTHWFVTQRNFYEPQIITTDNTFVSGNCDVVIGIVNNTVYDPLQPELESGGGSGGGQIYEGKLTAEGLRFGIVASRFNHALVDRLVEGAIDAIVRHGGREEDITLVRVPGSWEIPVAAGELARKEDIDAVIAIGVLIRGATPHFDYIASEVSKGLADLSLELRKPITFGVITADTLEQAIERAGTKHGNKGWEAALSAIEMANLFKSLR

SEQ ID NO: 8620 - protein, 1307 aa, Artificial Sequence
  SARS-CoV-2/2019-nCoV/USA-CruiseA-18/2020__MT159716.1 spike protein (1-1147)(T874C_S1055C) LumSynth construct
MFVFLVLLPLVSSQCVNLTTRTQLPPAYTNSFTRGVYYPDKVFRSSVLHSTQDLFLPFFSNVTWFHAIHVSGTNGTKRFDNPVLPFNDGVYFASTEKSNIIRGWIFGTTLDSKTQSLLIVNNATNVVIKVCEFQFCNDPFLGVYYHKNNKSWMESELRVYSSANNCTFEYVSQPFLMDLEGKQGNFKNLREFVFKNIDGYFKIYSKHTPINLVRDLPQGFSALEPLVDLPIGINITRFQTLLALHRSYLTPGDSSSGWTAGAAAYYVGYLQPRTFLLKYNENGTITDAVDCALDPLSETKCTLKSFTVEKGIYQTSNFRVQPTESIVRFPNITNLCPFGEVFNATRFASVYAWNRKRISNCVADYSVLYNSASFSTFKCYGVSPTKLNDLCFTNVYADSFVIRGDEVRQIAPGQTGKIADYNYKLPDDFTGCVIAWNSNNLDSKVGGNYNYLYRLFRKSNLKPFERDISTEIYQAGSTPCNGVEGFNCYFPLQSYGFQPTNGVGYQPYRVVVLSFELLHAPATVCGPKKSTNLVKNKCVNFNFNGLTGTGVLTESNKKFLPFQQFGRDIADTTDAVRDPQTLEILDITPCSFGGVSVITPGTNTSNQVAVLYQDVNCTEVPVAIHADQLTPTWRVYSTGSNVFQTRAGCLIGAEHVNNSYECDIPIGAGICASYQTQTNSPRRARSVASQSIIAYTMSLGAENSVAYSNNSIAIPTNFTISVTTEILPVSMTKTSVDCTMYICGDSTECSNLLLQYGSFCTQLNRALTGIAVEQDKNTQEVFAQVKQIYKTPPIKDFGGFNFSQILPDPSKPSKRSFIEDLLFNKVTLADAGFIKQYGDCLGDIAARDLICAQKFNGLTVLPPLLTDEMIAQYCSALLAGTITSGWTFGAGAALQIPFAMQMAYRFNGIGVTQNVLYENQKLIANQFNSAIGKIQDSLSSTASALGKLQDVVNQNAQALNTLVKQLSSNFGAISSVLNDILSRLDKVEAEVQIDRLITGRLQSLQTYVTQQLIRAAEIRASANLAATKMSECVLGQSKRVDFCGKGYHLMSFPQCAPHGVVFLHVTYVPAQEKNFTTAPAICHDGKAHFPREGVFVSNGTHWFVTQRNFYEPQIITTDNTFVSGNCDVVIGIVNNTVYDPLQPELDSGGGSGGGQIYEGKLTAEGLRFGIVASRFNHALVDRLVEGAIDAIVRHGGREEDITLVRVPGSWEIPVAAGELARKEDIDAVIAIGVLIRGATPHFDYIASEVSKGLADLSLELRKPITFGVITADTLEQAIERAGTKHGNKGWEAALSAIEMANLFKSLR

SEQ ID NO: 8621 - protein, 1307 aa, Artificial Sequence
  SARS-CoV-2/SARS-CoV-2/Yunnan-01/human/2020/CHN__MT049951.1 spike protein (1-1147)(T874C_S1055C) LumSynth construct
MFVFLVLLPLVSSQCVNLTTRTQLPPANTNSFTRGVYYPDKVFRSSVLHSTQDLFLPFFSNVTWFHAIHVSGTNGTKRFDNPVLPFNDGVYFASTEKSNIIRGWIFGTTLDSKTQSLLIVNNATNVVIKVCEFQFCNDPFLGVYYHKNNKSWMESEFRVYSSANNCTFEYVSQPFLMDLEGKQGNFKNLREFVFKNIDGYFKIYSKHTPINLVRDLPQGFSALEPLVDLPIGINITRFQTLLALHRSYLTPGDSSSGWTAGAAAYYVGYLQPRTFLLKYNENGTITDAVDCALDPLSETKCTLKSFTVEKGIYQTSNFRVQPTESIVRFPNITNLCPFGEVFNATRFASVYAWNRKRISNCVADYSVLYNSASFSTFKCYGVSPTKLNDLCFTNVYADSFVIRGDEVRQIAPGQTGKIADYNYKLPDDFTGCVIAWNSNNLDSKVGGNYNYLYRLFRKSNLKPFERDISTEIYQAGSTPCNGVEGFNCYFPLQSYGFQPTNGVGYQPYRVVVLSFELLHAPATVCGPKKSTNLVKNKCVNFNFNGLTGTGVLTESNKKFLPFQQFGRDIADTTDAVRDPQTLEILDITPCSFGGVSVITPGTNTSNQVAVLYQDVNCTEVPVAIHADQLTPTWRVYSTGSNVFQTRAGCLIGAEHVNNSYECDIPIGAGICASYQTQTNSPRRARSVASQSIIAYTMSLGAENSVAYSNNSIAIPTNFTISVTTEILPVSMTKTSVDCTMYICGDSTECSNLLLQYGSFCTQLNRALTGIAVEQDKNTQEVFAQVKQIYKTPPIKDFGGFNFSQILPDPSKPSKRSFIEDLLFNKVTLADAGFIKQYGDCLGDIAARDLICAQKFNGLTVLPPLLTDEMIAQYCSALLAGTITSGWTFGAGAALQIPFAMQMAYRFNGIGVTQNVLYENQKLIANQFNSAIGKIQDSLSSTASALGKLQDVVNQNAQALNTLVKQLSSNFGAISSVLNDILSRLDKVEAEVQIDRLITGRLQSLQTYVTQQLIRAAEIRASANLAATKMSECVLGQSKRVDFCGKGYHLMSFPQCAPHGVVFLHVTYVPAQEKNFTTAPAICHDGKAHFPREGVFVSNGTHWFVTQRNFYEPQIITTDNTFVSGNCDVVIGIVNNTVYDPLQPELDSGGGSGGGQIYEGKLTAEGLRFGIVASRFNHALVDRLVEGAIDAIVRHGGREEDITLVRVPGSWEIPVAAGELARKEDIDAVIAIGVLIRGATPHFDYIASEVSKGLADLSLELRKPITFGVITADTLEQAIERAGTKHGNKGWEAALSAIEMANLFKSLR

SEQ ID NO: 8622 - protein, 1307 aa, Artificial Sequence
  SARS-CoV-2/USA/WA-UW292/2020__EPI_ISL_418077 spike protein (1-1147)(T874C_S1055C) LumSynth construct
MFVFLVLLPLVSSQCVNLTTRTQLPPAYTNSFTRGVYYPDKVFRSSVLHSTQDLFLPFFSNVTWFHAIHVSGTNGTKRFDNPVLPFNDGVYFASTEKSNIIRGWIFGTTLDSKTQSLLIVNNATNVVIKVCEFQFCNDPFLGVYYHKNNKSWMESEFRVYSSANNCTFEYVSQPFLMDLEGKQGNFKNLREFVFKNIDGYFKIYSKHTPINLVRDLPQGFSALEPLVDLPIGINITRFQTLLALHRSYLTPGDSSSGWTAGAAAYYVGYLQPRTFLLKYNENGTITDAVDCALDPLSETKCTLKSFTVEKGIYQTSNFRVQPTESIVRFPNITNLCPFGEVFNATRFASVYAWNRKRISNCVADYSVLYNSASFSTFKCYGVSPTKLNDLCFTNVYADSFVIRGDEVRQIAPGQTGKIADYNYKLPDDFTGCVIAWNSNNLDSKVGGNYNYLYRLFRKSNLKPFERDISTEIYQASSTPCNGVEGFNCYFPLQSYGFQPTNGVGYQPYRVVVLSFELLHAPATVCGPKKSTNLVKNKCVNFNFNGLTGTGVLTESNKKFLPFQQFGRDIADTTDAVRDPQTLEILDITPCSFGGVSVITPGTNTSNQVAVLYQDVNCTEVPVAIHADQLTPTWRVYSTGSNVFQTRAGCLIGAEHVNNSYECDIPIGAGICASYQTQTNSPRRARSVASQSIIAYTMSLGAENSVAYSNNSIAIPTNFTISVTTEILPVSMTKTSVDCTMYICGDSTECSNLLLQYGSFCTQLNRALTGIAVEQDKNTQEVFAQVKQIYKTPPIKDFGGFNFSQILPDPSKPSKRSFIEDLLFNKVTLADAGFIKQYGDCLGDIAARDLICAQKFNGLTVLPPLLTDEMIAQYCSALLAGTITSGWTFGAGAALQIPFAMQMAYRFNGIGVTQNVLYENQKLIANQFNSAIGKIQDSLSSTASALGKLQDVVNQNAQALNTLVKQLSSNFGAISSVLNDILSRLDKVEAEVQIDRLITGRLQSLQTYVTQQLIRAAEIRASANLAATKMSECVLGQSKRVDFCGKGYHLMSFPQCAPHGVVFLHVTYVPAQEKNFTTAPAICHDGKAHFPREGVFVSNGTHWFVTQRNFYEPQIITTDNTFVSGNCDVVIGIVNNTVYDPLQPELDSGGGSGGGQIYEGKLTAEGLRFGIVASRFNHALVDRLVEGAIDAIVRHGGREEDITLVRVPGSWEIPVAAGELARKEDIDAVIAIGVLIRGATPHFDYIASEVSKGLADLSLELRKPITFGVITADTLEQAIERAGTKHGNKGWEAALSAIEMANLFKSLR

SEQ ID NO: 8623 - protein, 1307 aa, Artificial Sequence
  SARS-CoV-2/Iceland/192/2020__EPI_ISL_417819 spike protein (1-1147)(T874C_S1055C) LumSynth construct
MFVFFVLLPLVSSQCVNLTTRTQLPPAYTNSFTRGVYYPDKVFRSSVLHSTQDLFLPFFSNVTWFHAIHVSGTNGTKRFDNPVLPFNDGVYFASTEKSNIIRGWIFGTTLDSKTQSLLIVNNATNVVIKVCEFQFCNDPFLGVYYHKNNKSWMESEFRVYSSANNCTFEYVSQPFLMDLEGKQGNFKNLREFVFKNIDGYFKIYSKHTPINLVRDLPQGFSALEPLVDLPIGINITRFQTLLALHRSYLTPGDSSSGWTAGAAAYYVGYLQPRTFLLKYNENGTITDAVDCALDPLSETKCTLKSFTVEKGIYQTSNFRVQPTESIVRFPNITNLCPFGEVFNATRFASVYAWNRKRISNCVADYSVLYNSASFSTFKCYGVSPTKLNDLCFTNVYADSFVIRGDEVRQIAPGQTGKIADYNYKLPDDFTGCVIAWNSNNLDSKVGGNYNYLYRLFRKSNLKPFERDISTEIYQAGSTPCNGVEGFNCYFPLQSYGFQPTNGVGYQPYRVVVLSFELLHAPATVCGPKKSTNLVKNKCVNFNFNGLTGTGVLTESNKKFLPFQQFGRDIADTTDAVRDPQTLEILDITPCSFGGVSVITPGTNTSNQVAVLYQGVNCTEVPVAIHADQLTPTWRVYSTGSNVFQTRAGCLIGAEHVNNSYECDIPIGAGICASYQTQTNSPRRARSVASQSIIAYTMSLGAENSVAYSNNSIAIPTNFTISVTTEILPVSMTKTSVDCTMYICGDSTECSNLLLQYGSFCTQLNRALTGIAVEQDKNTQEVFAQVKQIYKTPPIKDFGGFNFSQILPDPSKPSKRSFIEDLLFNKVTLADAGFIKQYGDCLGDIAARDLICAQKFNGLTVLPPLLTDEMIAQYCSALLAGTITSGWTFGAGAALQIPFAMQMAYRFNGIGVTQNVLYENQKLIANQFNSAIGKIQDSLSSTASALGKLQDVVNQNAQALNTLVKQLSSNFGAISSVLNDILSRLDKVEAEVQIDRLITGRLQSLQTYVTQQLIRAAEIRASANLAATKMSECVLGQSKRVDFCGKGYHLMSFPQCAPHGVVFLHVTYVPAQEKNFTTAPAICHDGKAHFPREGVFVSNGTHWFVTQRNFYEPQIITTDNTFVSGNCDVVIGIVNNTVYDPLQPELDSGGGSGGGQIYEGKLTAEGLRFGIVASRFNHALVDRLVEGAIDAIVRHGGREEDITLVRVPGSWEIPVAAGELARKEDIDAVIAIGVLIRGATPHFDYIASEVSKGLADLSLELRKPITFGVITADTLEQAIERAGTKHGNKGWEAALSAIEMANLFKSLR

SEQ ID NO: 8624 - protein, 1307 aa, Artificial Sequence
  SARS-CoV-2/Belgium/ULG-6939/2020__EPI_ISL_417020 spike protein (1-1147)(T874C_S1055C) LumSynth construct
MFVFLVLLPLVSSQCVNLTTRTQLPPAYTNSFTRGVYYPDKVFRSSVLHSTQDLFLPFFSNVTWFHAIHVSGTNGTKRFDNPVLPFNDGVYFASTEKSNIIRGWIFGTTLDSKTQSLLIVNNATNVVIKVCEFQFCNDPFLGVYYHKNNKSWMESEFRVYSSANNCTFEYVSQPFLMDLEGKQGNFKNLREFVFKNIDGYFKIYSKHTPINLVRDLPQGFSALEPLVDLPIGINITRFQTLLALHRSYLTPGDSSSGWTAGAAAYYVGYLQPRTFLLKYNENGTITDAVDCALDPLSETKCTLKSFTVEKGIYQTSNFRVQPTESIVRFPNITNLCPFGEVFNATRFASVYAWNRKRISNCVADYSVLYNSASFSTFKCYGVSPTKLNDLCFTNVYADSFVIRGDEVRQIAPGQTGKIADYNYKLPDDFTGCVIAWNSNNLDSKVGGNYNYLYRLFRKSNLKPFERDISTEIYQAGSTPCNGVEGFNCYFPLQSYGFQPTNGVGYQPYRVVVLSFELLHAPATVCGPKKSTNLVKNKCVNFNFNGLTGTGVLTESNKKFLPFQQFGRDIADTTDAVRDPQTLEILDITPCSFGGVSVITPGTNTSNQVAVLYQGVNCTEVPVAIHADQLTPTWRVYSTGSNVFQTRAGCLIGAEHVNNSYECDIPIGAGICASYQTQTNSPRRARSVASQSIIAYTMSLGAENSVVYSNNSIAIPTNFTISVTTEILPVSMTKTSVDCTMYICGDSTECSNLLLQYGSFCTQLNRALTGIAVEQDKNTQEVFAQVKQIYKTPPIKDFGGFNFSQILPDPSKPSKRSFIEDLLFNKVTLADAGFIKQYGDCLGDIAARDLICAQKFNGLTVLPPLLTDEMIAQYCSALLAGTITSGWTFGAGAALQIPFAMQMAYRFNGIGVTQNVLYENQKLIANQFNSAIGKIQDSLSSTASALGKLQDVVNQNAQALNTLVKQLSSNFGAISSVLNDILSRLDKVEAEVQIDRLITGRLQSLQTYVTQQLIRAAEIRASANLAATKMSECVLGQSKRVDFCGKGYHLMSFPQCAPHGVVFLHVTYVPAQEKNFTTAPAICHDGKAHFPREGVFVSNGTHWFVTQRNFYEPQIITTDNTFVSGNCDVVIGIVNNTVYDPLQPELDSGGGSGGGQIYEGKLTAEGLRFGIVASRFNHALVDRLVEGAIDAIVRHGGREEDITLVRVPGSWEIPVAAGELARKEDIDAVIAIGVLIRGATPHFDYIASEVSKGLADLSLELRKPITFGVITADTLEQAIERAGTKHGNKGWEAALSAIEMANLFKSLR

SEQ ID NO: 8625 - protein, 1307 aa, Artificial Sequence
  SARS-CoV-2/France/HF2496/2020__EPI_ISL_418231 spike protein (1-1147)(T874C_S1055C) LumSynth construct
MFVFLVLLPLVSSQCVNLTTRTQLPPAYTNSFTRGVYYPDKVFRSSVLHSTQDLFLPFFSNVTWFHAIHVSGTNGTKRFDNPVLPFNDGVYFASTEKSNIIRGWIFGTTLDSKTQSLLIVNNATNVVIKVCEFQFCNDPFLGVYYHKNNKSWMESEFRVYSSANNCTFEYVSQPFLMDLEGKQGNFKNLREFVFKNIDGYFKIYSKHTPINLVRDLPQGFSALEPLVDLPIGINITRFQTLLALHRSYLTPGDSSSGWTAGAAAYYVGYLQPRTFLLKYNENGTITDAVDCALDPLSETKCTLKSFTVEKGIYQTSNFRVQPTESIVRFPNITNLCPFGEVFNATRFASVYAWNRKRISNCVADYSVLYNSASFSTFKCYGVSPTKLNDLCFTNVYADSFVIRGDEVRQIAPGQTGKIADYNYKLPDDFTGCVIAWNSNNLDSKVGGNYNYLYRLFRKSNLKPFERDISTEIYQAGSTPCNGVEGFNCYFPLQSYGFQPTNGVGYQPYRVVVLSFELLHAPATVCGPKKSTNLVKNKCVNFNFNGLTGTGVLTESNKKFLPFQQFGRDIADTTDAVRDPQTLEILDITPCSFGGVSVITPGTNTSNQVAVLYQGVNCTEVPVAIHADQLTPTWRVYSTGSNVFQTRAGCLIGAEHVNNSYECDIPIGAGICASYQTQTNSPRRARSVASQSIIAYTMSLGAENSVAYSNNSIAIPTNFTISVTTEILPVSMTKTSVDCTMYICGDSTECSNLLLQYGSFCTQLNRALTGIAVEQDKNTQEVFAQVKQIYKTPPIKDFGGFNFSQILPDPSKPSKRSFIEDLLFNKVTLADAGFIKQYGDCLGDIVARDLICAQKFNGLTVLPPLLTDEMIAQYCSALLAGTITSGWTFGAGAALQIPFAMQMAYRFNGIGVTQNVLYENQKLIANQFNSAIGKIQDSLSSTASALGKLQDVVNQNAQALNTLVKQLSSNFGAISSVLNDILSRLDKVEAEVQIDRLITGRLQSLQTYVTQQLIRAAEIRASANLAATKMSECVLGQSKRVDFCGKGYHLMSFPQCAPHGVVFLHVTYVPAQEKNFTTAPAICHDGKAHFPREGVFVSNGTHWFVTQRNFYEPQIITTDNTFVSGNCDVVIGIVNNTVYDPLQPELDSGGGSGGGQIYEGKLTAEGLRFGIVASRFNHALVDRLVEGAIDAIVRHGGREEDITLVRVPGSWEIPVAAGELARKEDIDAVIAIGVLIRGATPHFDYIASEVSKGLADLSLELRKPITFGVITADTLEQAIERAGTKHGNKGWEAALSAIEMANLFKSLR

SEQ ID NO: 8626 - protein, 1307 aa, Artificial Sequence
  SARS-CoV-2/USA/WA-UW291/2020__EPI_ISL_418076 spike protein (1-1147)(T874C_S1055C) LumSynth construct
MFVFLVLLPLVSSQCVNLTTRTQLPPAYTNSFTRGVYYPDKVFRSSVLHSTQDLFLPFFSNVTWFHAIHVSGTNGTKRFDNPVLPFNDGVYFASTEKSNIIRGWIFGTTLDSKTQSLLIVNNATNVVIKVCEFQFCNDPFLGVYYHKNNKSWMESEFRVYSSANNCTFEYVSQPFLMDLEGKQGNFKNLREFVFKNIDGYFKIYSKHTPINLVRDLPQGFSALEPLVDLPIGINITRFQTLLALHRSYLTPGDSSSGWTAGAAAYYVGYLQPRTFLLKYNENGTITDAVDCALDPLSETKCTLKSFTVEKGIYQTSNFRVQPTESIVRFPNITNLCPFGEVFNATRFASVYAWNRKRISNCVADYSVLYNSASFSTFKCYGVSPTKLNDLCFTNVYADSFVIRGDEVRQIAPGQTGKIADYNYKLPDDFTGCVIAWNSNNLDSKVGGNYNYLYRLFRKSNLKPFERDISTEIYQAGSTPCNGVEGFNCYFPLQSYGFQPTNGVGYQPYRVVVLSFELLHAPATVCGPKKSTNLVKNKCVNFNFNGLTGTGVLTESNKKFLPFQQFGRDIADTTDAVRDPQTLEILDITPCSFGGVSVITPGTNTSNQVAVLYQGVNCTEVPVAIHADQLTPTWRVYSTGSNVFQTRAGCLIGAEHVNNSYECDIPIGAGICASYQTQTNSPRRARSVASQSIIAYTMSLGAENSVAYSNNSIAIPTNFTISVTTEILPVSMTKTSVDCTMYICGDSTECSNLLLQYGSFCTQLNRALTGIAVEQDKNTQEVFAQVKQIYKTPPIKDFGGFNFSQILPDPSKPSKRSFIEDLLFNKVTLADAGFIKQYGDCLGDIAARDLICAQKFNGLTVLPPLLTDEMIAQYCSALLAGTITSGWTFGAGAALQIPFAMQMAYRFNGIGVTQNVLYENQKLIANQFNSAIGKIQYSLSSTASALGKLQDVVNQNAQALNTLVKQLSSNFGAISSVLNDILSRLDKVEAEVQIDRLITGRLQSLQTYVTQQLIRAAEIRASANLAATKMSECVLGQSKRVDFCGKGYHLMSFPQCAPHGVVFLHVTYVPAQEKNFTTAPAICHDGKAHFPREGVFVSNGTHWFVTQRNFYEPQIITTDNTFVSGNCDVVIGIVNNTVYDPLQPELDSGGGSGGGQIYEGKLTAEGLRFGIVASRFNHALVDRLVEGAIDAIVRHGGREEDITLVRVPGSWEIPVAAGELARKEDIDAVIAIGVLIRGATPHFDYIASEVSKGLADLSLELRKPITFGVITADTLEQAIERAGTKHGNKGWEAALSAIEMANLFKSLR

SEQ ID NO: 8627 - protein, 1307 aa, Artificial Sequence; identical to SEQ ID NO: 8590
  SARS-CoV-2/Portugal/PT0034/2020__EPI_ISL_418019 spike protein (1-1147)(T874C_S1055C) LumSynth construct

SEQ ID NO: 8628 - protein, 1307 aa, Artificial Sequence; identical to SEQ ID NO: 8582
  SARS-CoV-2/Iceland/202/2020__EPI_ISL_417750 spike protein (1-1147)(T874C_S1055C) LumSynth construct

SEQ ID NO: 8629 - protein, 1307 aa, Artificial Sequence
  SARS-CoV-2/USA/WA-UW261/2020__EPI_ISL_418046 spike protein (1-1147)(T874C_S1055C) LumSynth construct
MFVFLVLLPLVSSQCVNLTTRTQLPPAYTNSFTRGVYYPDKVFRSSVLHSTQDLFLPFFSNVTWFHAIHVSGTNGTKRFDNPVLPFNDGVYFASTEKSNIIRGWIFGTTLDSKTQSLLIVNNATNVVIKVCEFQFCNDPFLGVYYHKNNKSWMESEFRVYSSANNCTFEYVSQPFLMDLEGKQGNFKNLREFVFKNIDGYFKIYSKHTPINLVRDLPQGFSALEPLVDLPIGINITRFQTLLALHRSYLTPGDSSSGWTAGAAAYYVGYLQPRTFLLKYNENGTITDAVDCALDPLSETKCTLKSFTVEKGIYQTSNFRVQPTESIVRFPNITNLCPFGEVFNATRFTSVYAWNRKRISNCVADYSVLYNSASFSTFKCYGVSPTKLNDLCFTNVYADSFVIRGDEVRQIAPGQTGKIADYNYKLPDDFTGCVIAWNSNNLDSKVGGNYNYLYRLFRKSNLKPFERDISTEIYQAGSTPCNGVEGFNCYFPLQSYGFQPTNGVGYQPYRVVVLSFELLHAPATVCGPKKSTNLVKNKCVNFNFNGLTGTGVLTESNKKFLPFQQFGRDIADTTDAVRDPQTLEILDITPCSFGGVSVITPGTNTSNQVAVLYQDVNCTEVPVAIHADQLTPTWRVYSTGSNVFQTRAGCLIGAEHVNNSYECDIPIGAGICASYQTQTNSPRRARSVASQSIIAYTMSLGAENSVAYSNNSIAIPTNFTISVTTEILPVSMTKTSVDCTMYICGDSTECSNLLLQYGSFCTQLNRALTGIAVEQDKNTQEVFAQVKQIYKTPPIKDFGGFNFSQILPDPSKPSKRSFIEDLLFNKVTLADAGFIKQYGDCLGDIAARDLICAQKFNGLTVLPPLLTDEMIAQYCSALLAGTITSGWTFGAGAALQIPFAMQMAYRFNGIGVTQNVLYENQKLIANQFNSAIGKIQDSLSSTASALGKLQDVVNQNAQALNTLVKQLSSNFGAISSVLNDILSRLDKVEAEVQIDRLITGRLQSLQTYVTQQLIRAAEIRASANLAATKMSECVLGQSKRVDFCGKGYHLMSFPQCAPHGVVFLHVTYVPAQEKNFTTAPAICHDGKAHFPREGVFVSNGTHWFVTQRNFYEPQIITTDNTFVSGNCDVVIGIVNNTVYDPLQPELDSGGGSGGGQIYEGKLTAEGLRFGIVASRFNHALVDRLVEGAIDAIVRHGGREEDITLVRVPGSWEIPVAAGELARKEDIDAVIAIGVLIRGATPHFDYIASEVSKGLADLSLELRKPITFGVITADTLEQAIERAGTKHGNKGWEAALSAIEMANLFKSLR

SEQ ID NO: 8630 - protein, 1307 aa, Artificial Sequence
  SARS-CoV-2/Portugal/PT0035/2020__EPI_ISL_418020 spike protein (1-1147)(T874C_S1055C) LumSynth construct
MFVFLVLLPLVSSQCVNLTTRTQLPPAYTNSFTRGVYYPDKVFRSSVLHSTQDLFLPFFSNVTWFHAIHVSGTNGTKRFDNPVLPFNDGVYFASTEKSNIIRGWIFGTTLDSKTQSLLIVNNATNVVIKVCEFQFCNDPFLGVYYHKNNKSWMESEFRVYSSANNCTFEYVSQPFLMDLEGKQGNFKNLREFVFKNIDGYFKIYSKHTPINLVRDLPQGFSALEPLVDLPIGINITRFQTLLALHRSYLTPGDSSSGWTAGAAAYYVGYLQPRTFLLKYNENGTITDAVDCALDPLSETKCTLKSFTVEKGIYQTSNFRVQPTESIVRFPNITNLCPFGEVFNATRFASVYAWNRKRISNCVADYSVLYNSASFSTFKCYGVSPTKLNDLCFTNVYADSFVIRGDEVRQIAPGQTGKIADYNYKLPDDFTGCVIAWNSNNLDSKVGGNYNYLYRLFRKSNLKPFERDISTEIYQAGSTPCNGVEGFNCYFPLQSYGFQPTNGVGYQPYRVVVLSFELLHAPATVCGPKKSTNLVKNKCVNFNFNGLTGTGVLTESNKKFLPFQQFGRDIADTTDAVRDPQTLEILDITPCSFGGVSVITPGTNTSNQVAVLYQDVNCTEVPVAIHADQLTPTWRVYSTGSNVFQTRAGCLIGAEHVNNSYECDIPIGAGICASYQTQTNSPRRARSVASQSIIAYTMSLGAENSVAYSNNSIAIPTNFTISVTTEILPVSMTKTSVDCTMYICGDSTECSNLLLQYGSFCTQLNRALTGIAVEQDKNTQEVFAQVKQIYKTPPIKDFGGFNFSQILPDPSKPSKRSFIEDLLFNKVTLADAGFIKQYGDCLGDISARDLICAQKFNGLTVLPPLLTDEMIAQYCSALLAGTITSGWTFGAGAALQIPFAMQMAYRFNGIGVTQNVLYENQKLIANQFNSAIGKIQDSLSSTASALGKLQDVVNQNAQALNTLVKQLSSNFGAISSVLNDILSRLDKVEAEVQIDRLITGRLQSLQTYVTQQLIRAAEIRASANLAATKMSECVLGQSKRVDFCGKGYHLMSFPQCAPHGVVFLHVTYVPAQEKNFTTAPAICHDGKAHFPREGVFVSNGTHWFVTQRNFYEPQIITTDNTFVSGNCDVVIGIVNNTVYDPLQPELDSGGGSGGGQIYEGKLTAEGLRFGIVASRFNHALVDRLVEGAIDAIVRHGGREEDITLVRVPGSWEIPVAAGELARKEDIDAVIAIGVLIRGATPHFDYIASEVSKGLADLSLELRKPITFGVITADTLEQAIERAGTKHGNKGWEAALSAIEMANLFKSLR

SEQ ID NO: 8631 - protein, 1307 aa, Artificial Sequence
  SARS-CoV-2/USA/NY-NYUMC7/2020__EPI_ISL_418192 spike protein (1-1147)(T874C_S1055C) LumSynth construct
MFVFLVLLPLVSSQCVNLTTRTQLPPAYTNSFTRGVYYPDKVFRSSVLHSTQDLFLPFFSNVTWFHAIHVSGTNGTKRFDNPVLPFNDGVYFASTEKSNIIRGWIFGTTLDSKTQSLLIVNNATNVVIKVCEFQFCNDPFLGVYHHKNNKSWMESEFRVYSSANNCTFEYVSQPFLMDLEGKQGNFKNLREFVFKNIDGYFKIYSKHTPINLVRDLPQGFSALEPLVDLPIGINITRFQTLLALHRSYLTPGDSSSGWTAGAAAYYVGYLQPRTFLLKYNENGTITDAVDCALDPLSETKCTLKSFTVEKGIYQTSNFRVQPTESIVRFPNITNLCPFGEVFNATRFASVYAWNRKRISNCVADYSVLYNSASFSTFKCYGVSPTKLNDLCFTNVYADSFVIRGDEVRQIAPGQTGKIADYNYKLPDDFTGCVIAWNSNNLDSKVGGNYNYLYRLFRKSNLKPFERDISTEIYQAGSTPCNGVEGFNCYFPLQSYGFQPTNGVGYQPYRVVVLSFELLHAPATVCGPKKSTNLVKNKCVNFNFNGLTGTGVLTESNKKFLPFQQFGRDIADTTDAVRDPQTLEILDITPCSFGGVSVITPGTNTSNQVAVLYQGVNCTEVPVAIHADQLTPTWRVYSTGSNVFQTRAGCLIGAEHVNNSYECDIPIGAGICASYQTQTNSPRRARSVASQSIIAYTMSLGAENSVAYSNNSIAIPTNFTISVTTEILPVSMTKTSVDCTMYICGDSTECSNLLLQYGSFCTQLNRALTGIAVEQDKNTQEVFAQVKQIYKTPPIKDFGGFNFSQILPDPSKPSKRSFIEDLLFNKVTLADAGFIKQYGDCLGDIAARDLICAQKFNGLTVLPPLLTDEMIAQYCSALLAGTITSGWTFGAGAALQIPFAMQMAYRFNGIGVTQNVLYENQKLIANQFNSAIGKIQDSLSSTASALGKLQDVVNQNAQALNTLVKQLSSNFGAISSVLNDILSRLDKVEAEVQIDRLITGRLQSLQTYVTQQLIRAAEIRASANLAATKMSECVLGQSKRVDFCGKGYHLMSFPQCAPHGVVFLHVTYVPAQEKNFTTAPAICHDGKAHFPREGVFVSNGTHWFVTQRNFYEPQIITTDNTFVSGNCDVVIGIVNNTVYDPLQPELDSGGGSGGGQIYEGKLTAEGLRFGIVASRFNHALVDRLVEGAIDAIVRHGGREEDITLVRVPGSWEIPVAAGELARKEDIDAVIAIGVLIRGATPHFDYIASEVSKGLADLSLELRKPITFGVITADTLEQAIERAGTKHGNKGWEAALSAIEMANLFKSLR

SEQ ID NO: 8632 - protein, 1307 aa, Artificial Sequence
  SARS-CoV-2/Iceland/189/2020__EPI_ISL_417709 spike protein (1-1147)(T874C_S1055C) LumSynth construct
MFVFLVLLPLVSSQCVNLTTRTQLPPAYTNSFTRGVYYPDKVFRSSVLHSTQDLFLPFFSNVTWFHAIHVSGTNGTKRFDNPVLPFNDGVYFASTEKSNIIRGWIFGTTLDSKTQSLLIVNNATNVVIKVCEFQFCNDPFLGVYYHKNNKSWMESEFRVYSSANNCTFEYVSQPFLMDLEGKQGNFKNLREFVFKNIDGYFKIYSKHTPINLVRDLPQGFSALEPLVDLPIGINITRFQTLLALHRSYLTPGDSSSGWTAGAAAYYVGYLQPRTFLLKYNENGTITDAVDCALDPLSETKCTLKSFTVEKGIYQTSNFRVQPTESIVRFPNITNLCPFGEVFNATRFASVYAWNRKRISNCVADYSVLYNSASFSTFKCYGVSPTKLNDLCFTNVYADSFVIRGDEVRQIAPGQTGKIADYNYKLPDDFTGCVIAWNSNNLDSKVGGNYNYLYRLFRKSNLKPFERDISTEIYQAGSTPCNGVEGFNCYFPLQSYGFQPTNGVGYQPYRVVVLSFELLHAPATVCGPKKSTNLVKNKCVNFNFNGLTGTGVLTESNKKFLPFQQFGRDIADTTDAVRDPQTLEILDITPCSFGGVSVITPGTNTSNQVAVLYQGVNCTEVPVAIHADQLTPTWRVYSTGSNVFQTRAGCLIGAEHVNNSYECDIPIGAGICASYQTQTNSPRRARSVASQSIIAYTMSLGAENSVAYSNNSIAIPTNFTISVTTEILPVSMTKTSVDCTMYICGDSTECSNLLLQYGSFCTQLNRALTGIAVEQDKNTQEVFAQVKQIYKTPPIKDFGGFNFSQILPDPSKPSKRSFIEDLLFNKVTLADAGFTKQYGDCLGDIAARDLICAQKFNGLTVLPPLLTDEMIAQYCSALLAGTITSGWTFGAGAALQIPFAMQMAYRFNGIGVTQNVLYENQKLIANQFNSAIGKIQDSLSSTASALGKLQDVVNQNAQALNTLVKQLSSNFGAISSVLNDILSRLDKVEAEVQIDRLITGRLQSLQTYVTQQLIRAAEIRASANLAATKMSECVLGQSKRVDFCGKGYHLMSFPQCAPHGVVFLHVTYVPAQEKNFTTAPAICHDGKAHFPREGVFVSNGTHWFVTQRNFYEPQIITTDNTFVSGNCDVVIGIVNNTVYDPLQPELDSGGGSGGGQIYEGKLTAEGLRFGIVASRFNHALVDRLVEGAIDAIVRHGGREEDITLVRVPGSWEIPVAAGELARKEDIDAVIAIGVLIRGATPHFDYIASEVSKGLADLSLELRKPITFGVITADTLEQAIERAGTKHGNKGWEAALSAIEMANLFKSLR

SEQ ID NO: 8633 - protein, 1307 aa, Artificial Sequence
  SARS-CoV-2/Australia/NSW56/2020__EPI_ISL_417408 spike protein (1-1147)(T874C_S1055C) LumSynth construct
MFVFLVLLPLVSSQCVNLTTRTQLPPAYTNSFTRGVYYPDKVFRSSVLHSTQDLFLPFFSNVTWFHAIHVSGTNGTKRFDNPVLPFNDGVYFASTEKSNIIRGWIFGTTLDSKTQSLLIVNNATNVVIKVCEFQFCNDPFLGVYYHKNNKSWMESEFRVYSSANNCTFEYVSQPFLMDLEGKQGNFKNLREFVFKNIDGYFKIYSKHTPINLVRDLPQGFSALEPLVDLPIGINITRFQTLLALHRSYLTPGDSSSGWTAGAAAYYVGYLQPRTFLLKYNENGTITDAVDCALDPLSETKCTLKSFTVEKGIYQTSNFRVQPTESIVRFPNITNLCPFGEVFNATRFASVYAWNRKRISNCVADYSVLYNSASFSTFKCYGVSPTKLNDLCFTNVYADSFVIRGDEVRQIAPGQTGKIADYNYKLPDDFTGCVIAWNSNNLDSKVGGNYNYLYRLFRKSNLKPFERDISTEIYQAGSTPCNGVEGFNCYFPLQSYGFQPTNGVGYQPYRVVVLSFELLHAPATVCGPKKSTNLVKNKCVNFNFNGLTGTGVLTESNKKFLPFQQFGRDIADTTDAVRDPQTLEILDITPCSFGGVSVITPGTNTSNQVAVLYQDVNCTEVPVAIHADQLTPTWRVYSTGSNVFQTRAGCLIGAEHVNNSYECDIPIGAGICASYQTQTNSPRRARSVASQSIIAYTMSLGAENSVAYSNNSIAIPTNFTISVTTEILPVSMTKTSVDCTMYICGDSTECSNLLLQYGSFCTQLNRALTGIAVEQDKNTQEVFAQVKQIYKTPPIKDFGGFNFSQILPDSSKPSKRSFIEDLLFNKVTLADAGFIKQYGDCLGDIAARDLICAQKFNGLTVLPPLLTDEMIAQYCSALLAGTITSGWTFGAGAALQIPFAMQMAYRFNGIGVTQNVLYENQKLIANQFNSAIGKIQDSLSSTASALGKLQDVVNQNAQALNTLVKQLSSNFGAISSVLNDILSRLDKVEAEVQIDRLITGRLQSLQTYVTQQLIRAAEIRASANLAATKMSECVLGQSKRVDFCGKGYHLMSFPQCAPHGVVFLHVTYVPAQEKNFTTAPAICHDGKAHFPREGVFVSNGTHWFVTQRNFYEPQIITTDNTFVSGNCDVVIGIVNNTVYDPLQPELDSGGGSGGGQIYEGKLTAEGLRFGIVASRFNHALVDRLVEGAIDAIVRHGGREEDITLVRVPGSWEIPVAAGELARKEDIDAVIAIGVLIRGATPHFDYIASEVSKGLADLSLELRKPITFGVITADTLEQAIERAGTKHGNKGWEAALSAIEMANLFKSLR

SEQ ID NO: 8634 - protein, 1307 aa, Artificial Sequence
  SARS-CoV-2/Iceland/280/2020__EPI_ISL_417608 spike protein (1-1147)(T874C_S1055C) LumSynth construct
MFVFLVLLPLVSSQCVNLTTRTQLPPAYTNSFTRGVYYPDKVFRSSVLHSTQDLFLPFFSNVTWFHAIHVSGTNGTKRFDNPVLPFNDGVYFASTEKSNIIRGWIFGTTLDSKTQSLLIVNNATNVVIKVCEFQFCNDPFLGVYYHKNNKSWMESEFRVYSSANNCTFEYVSQPFLMDLEGKQGNFKNLREFVFKNIDGYFKIYSKHTPINLVRDLPQGFSALEPLVDLPIGINITRFQTLLALHRSYLTPGDSSSGWTAGAAAYYVGYLQPRTFLLKYNENGTITDAVDCALDPLSETKCTLKSFTVEKGIYQTSNFRVQPTESIVRFPNITNLCPFGEVFNATRFASVYAWNRKRISNCVADYSVLYNSASFSTFKCYGVSPTKLNDLCFTNVYADSFVIRGDEVRQIAPGQTGKIADYNYKLPDDFTGCVIAWNSNNLDSKVGGNYNYLYRLFRKSNLKPFERDISTEIYQAGSTPCNGVEGFNCYFPLQSYGFQPTNGVGYQPYRVVVLSFELLHAPATVCGPKKSTNLVKNKCVNFNFNGLTGTGVLTESNKKFLPFQQFGRDIADTTDAVRDPQTLEILDITPCSFGGVSVITPGTNTSNQVAVLYQGVNCTEVPVAIHADQLTPTWRVYSTGSNVFQTRAGCLIGAEHVNNSYECDIPIGAGICASYHTQTNSPRRARSVASQSIIAYTMSLGAENSVAYSNNSIAIPTNFTISVTTEILPVSMTKTSVDCTMYICGDSTECSNLLLQYGSFCTQLNRALTGIAVEQDKNTQEVFAQVKQIYKTPPIKDFGGFNFSQILPDPSKPSKRSFIEDLLFNKVTLADAGFIKQYGDCLGDIAARDLICAQKFNGLTVLPPLLTDEMIAQYCSALLAGTITSGWTFGAGAALQIPFAMQMAYRFNGIGVTQNVLYENQKLIANQFNSAIGKIQDSLSSTASALGKLQDVVNQNAQALNTLVKQLSSNFGAISSVLNDILSRLDKVEAEVQIDRLITGRLQSLQTYVTQQLIRAAEIRASANLAATKMSECVLGQSKRVDFCGKGYHLMSFPQCAPHGVVFLHVTYVPAQEKNFTTAPAICHDGKAHFPREGVFVSNGTHWFVTQRNFYEPQIITTDNTFVSGNCDVVIGIVNNTVYDPLQPELDSGGGSGGGQIYEGKLTAEGLRFGIVASRFNHALVDRLVEGAIDAIVRHGGREEDITLVRVPGSWEIPVAAGELARKEDIDAVIAIGVLIRGATPHFDYIASEVSKGLADLSLELRKPITFGVITADTLEQAIERAGTKHGNKGWEAALSAIEMANLFKSLR

SEQ ID NO: 8635 - protein, 1307 aa, Artificial Sequence; identical to SEQ ID NO: 8590
  SARS-CoV-2/Iceland/247/2020__EPI_ISL_417575 spike protein (1-1147)(T874C_S1055C) LumSynth construct

SEQ ID NO: 8636 - protein, 1307 aa, Artificial Sequence
  SARS-CoV-2/Iceland/238/2020__EPI_ISL_417566 spike protein (1-1147)(T874C_S1055C) LumSynth construct
MFVFLVLLPLVSSQCVNLTTRTQLPPAYTNSFTRGVYYPDKVFRSSVLHSTQDLFLPFFSNVTWFHAIHVSGTNGTKRFDNPVLPFNDGVYFASTEKSNIIRGWIFGTTLDSKTQSLLIVNNATNVVIKVCEFQFCNDPFLGVYYHKNNKSWMESEFRVYSSANNCTFEYVSQPFLMDLEGKQGNFKNLREFVFKNIDGYFKIYSKHTPINLVRDLPQGFSALEPLVDLPIGINITRFQTLLALHRSYLTPGDSSSGWTAGAAAYYVGYLQPRTFLLKYNENGTITDAVDCALDPLSETKCTLKSFTVEKGIYQTSNFRVQPTESIVRFPNITNLCPFGEVFNATRFASVYAWNRKRISNCVADYSVLYNSASFSTFKCYGVSPTKLNDLCFTNVYADSFVIRGDEVRQIAPGQTGKIADYNYKLPDDFTGCVIAWNSNNLDSKVGGNYNYLYRLFRKSNLKPFERDISTEIYQAGSTPCNGVEGFNCYFPLQSYGFQPTNGVGYQPYRVVVLSFELLHAPATVCGPKKSTNLVKNKCVNFNFNGLTGTGVLTESNKKFLPFQQFGRDIADTTDAVRDPQTLEILDITPCSFGGVSVITPGTNTSNQVAVLYQGVNCTEVPVAIHADQLTPTWRVYSTGSNVFQTRAGCLIGAEHVNNSYECDIPIGAGICASYQTQTNSPRRARSVASQSIIAYTMSLGAENSVAYSNNSIAIPTNFTISVTTEILPVSMTKTSVDCTMYICGDSTECSNLLLQYGSFCTQLNRALTGIAVEQDKNTQEVFAQVKQIYKTPPIKDFGGFNFSQILPDPSKPSKRSFIEDLLFNKVTLADVGFIKQYGDCLGDIAARDLICAQKFNGLTVLPPLLTDEMIAQYCSALLAGTITSGWTFGAGAALQIPFAMQMAYRFNGIGVTQNVLYENQKLIANQFNSAIGKIQDSLSSTASALGKLQDVVNQNAQALNTLVKQLSSNFGAISSVLNDILSRLDKVEAEVQIDRLITGRLQSLQTYVTQQLIRAAEIRASANLAATKMSECVLGQSKRVDFCGKGYHLMSFPQCAPHGVVFLHVTYVPAQEKNFTTAPAICHDGKAHFPREGVFVSNGTHWFVTQRNFYEPQIITTDNTFVSGNCDVVIGIVNNTVYDPLQPELDSGGGSGGGQIYEGKLTAEGLRFGIVASRFNHALVDRLVEGAIDAIVRHGGREEDITLVRVPGSWEIPVAAGELARKEDIDAVIAIGVLIRGATPHFDYIASEVSKGLADLSLELRKPITFGVITADTLEQAIERAGTKHGNKGWEAALSAIEMANLFKSLR

SEQ ID NO: 8637 - protein, 1307 aa, Artificial Sequence
  SARS-CoV-2/Greece/16/2020__EPI_ISL_418265 spike protein (1-1147)(T874C_S1055C) LumSynth construct
MFVFLVLLPLVSSQCVNLTTRTQLPPAYTNSFTRGVYYPDKVFRSSVLHSTQDLFLPFFSNVTWFHAIHVSGTNGTKRFDNPVLPFNDGVYFASTEKSNIIRGWIFGTTLDSKTQSLLIVNNATNVVIKVCEFQFCNDPFLGVYYHKNNKSWMESEFRVYSSANNCTFEYVSQPFLMDLEGKQGNFKNLREFVFKNVDGYFKIYSKHTPINLVRDLPQGFSALEPLVDLPIGINITRFQTLLALHRSYLTPGDSSSGWTAGAAAYYVGYLQPRTFLLKYNENGTITDAVDCALDPLSETKCTLKSFTVEKGIYQTSNFRVQPTESIVRFPNITNLCPFGEVFNATRFASVYAWNRKRISNCVADYSVLYNSASFSTFKCYGVSPTKLNDLCFTNVYADSFVIRGDEVRQIAPGQTGKIADYNYKLPDDFTGCVIAWNSNNLDSKVGGNYNYLYRLFRKSNLKPFERDISTEIYQAGSTPCNGVEGFNCYFPLQSYGFQPTNGVGYQPYRVVVLSFELLHAPATVCGPKKSTNLVKNKCVNFNFNGLTGTGVLTESNKKFLPFQQFGRDIADTTDAVRDPQTLEILDITPCSFGGVSVITPGTNTSNQVAVLYQDVNCTEVPVAIHADQLTPTWRVYSTGSNVFQTRAGCLIGAEHVNNSYECDIPIGAGICASYQTQTNSPRRARSVASQSIIAYTMSLGAENSVAYSNNSIAIPTNFTISVTTEILPVSMTKTSVDCTMYICGDSTECSNLLLQYGSFCTQLNRALTGIAVEQDKNTQEVFAQVKQIYKTPPIKDFGGFNFSQILPDPSKPSKRSFIEDLLFNKVTLADAGFIKQYGDCLGDIAARDLICAQKFNGLTVLPPLLTDEMIAQYCSALLAGTITSGWTFGAGAALQIPFAMQMAYRFNGIGVTQNVLYENQKLIANQFNSAIGKIQDSLSSTASALGKLQDVVNQNAQALNTLVKQLSSNFGAISSVLNDILSRLDKVEAEVQIDRLITGRLQSLQTYVTQQLIRAAEIRASANLAATKMSECVLGQSKRVDFCGKGYHLMSFPQCAPHGVVFLHVTYVPAQEKNFTTAPAICHDGKAHFPREGVFVSNGTHWFVTQRNFYEPQIITTDNTFVSGNCDVVIGIVNNTVYDPLQPELDSGGGSGGGQIYEGKLTAEGLRFGIVASRFNHALVDRLVEGAIDAIVRHGGREEDITLVRVPGSWEIPVAAGELARKEDIDAVIAIGVLIRGATPHFDYIASEVSKGLADLSLELRKPITFGVITADTLEQAIERAGTKHGNKGWEAALSAIEMANLFKSLR

SEQ ID NO: 8638 - protein, 1307 aa, Artificial Sequence
  SARS-CoV-2/Iceland/319/2020__EPI_ISL_417648 spike protein (1-1147)(T874C_S1055C) LumSynth construct
MFVFLVLLPLVSSQCVNLTTRTQLPPAYTNSFTRGVYYPDKVFRSSVLHSTQDLFLPFFSNVTWFHAIHVSGTNGTKRFDNPVLPFNDGVYFASTEKSNIIRGWIFGTTLDSKTQSLLIVNNATNVVIKVCEFQFCNDPFLGVYYHKNNKSWMESEFRVYSSANNCTFEYVSQPFLIDLEGKQGNFKNLREFVFKNIDGYFKIYSKHTPINLVRDLPQGFSALEPLVDLPIGINITRFQTLLALHRSYLTPGDSSSGWTAGAAAYYVGYLQPRTFLLKYNENGTITDAVDCALDPLSETKCTLKSFTVEKGIYQTSNFRVQPTESIVRFPNITNLCPFGEVFNATRFASVYAWNRKRISNCVADYSVLYNSASFSTFKCYGVSPTKLNDLCFTNVYADSFVIRGDEVRQIAPGQTGKIADYNYKLPDDFTGCVIAWNSNNLDSKVGGNYNYLYRLFRKSNLKPFERDISTEIYQAGSTPCNGVEGFNCYFPLQSYGFQPTNGVGYQPYRVVVLSFELLHAPATVCGPKKSTNLVKNKCVNFNFNGLTGTGVLTESNKKFLPFQQFGRDIADTTDAVRDPQTLEILDITPCSFGGVSVITPGTNTSNQVAVLYQGVNCTEVPVAIHADQLTPTWRVYSTGSNVFQTRAGCLIGAEHVNNSYECDIPIGAGICASYQTQTNSPRRARSVASQSIIAYTMSLGAENSVAYSNNSIAIPTNFTISVTTEILPVSMTKTSVDCTMYICGDSTECSNLLLQYGSFCTQLNRALTGIAVEQDKNTQEVFAQVKQIYKTPPIKDFGGFNFSQILPDPSKPSKRSFIEDLLFNKVTLADAGFIKQYGDCLGDIAARDLICAQKFNGLTVLPPLLTDEMIAQYCSALLAGTITSGWTFGAGAALQIPFAMQMAYRFNGIGVTQNVLYENQKLIANQFNSAIGKIQDSLSSTASALGKLQDVVNQNAQALNTLVKQLSSNFGAISSVLNDILSRLDKVEAEVQIDRLITGRLQSLQTYVTQQLIRAAEIRASANLAATKMSECVLGQSKRVDFCGKGYHLMSFPQCAPHGVVFLHVTYVPAQEKNFTTAPAICHDGKAHFPREGVFVSNGTHWFVTQRNFYEPQIITTDNTFVSGNCDVVIGIVNNTVYDPLQPELDSGGGSGGGQIYEGKLTAEGLRFGIVASRFNHALVDRLVEGAIDAIVRHGGREEDITLVRVPGSWEIPVAAGELARKEDIDAVIAIGVLIRGATPHFDYIASEVSKGLADLSLELRKPITFGVITADTLEQAIERAGTKHGNKGWEAALSAIEMANLFKSLR

SEQ ID NO: 8639 - protein, 1307 aa, Artificial Sequence
  SARS-CoV-2/Congo/94/2020__EPI_ISL_417947 spike protein (1-1147)(T874C_S1055C) LumSynth construct
MFVFLVLLPLVSSQCVNLTTRTQLPPAYTNSFTRGVYYPDKVFRSSVLHSTQDLFLPFFSNVTWFHAIHVSGTNGTKRFDNPVLPFNDGVYFASTEKSNIIRGWIFGTTLDSKTQSLLIVNNATNVVIKVCEFQFCNDPFLGVYYHKNNKSWMESEFRVYSSANNCTFEYVSQPFLMDLEGKQGNFKNLREFVFKNIDGYFKIYSKHTPINLVRDLPQGFSALEPLVDLPIGINITRFQTLLALHRSYLTPGDSSSGWTAGAAAYYVGYLQPRTFLLKYNENGTITDAVDCALDPLSETKCTLKSFTVEKGIYQTSNFRVQPTESIVRFPNITNLCPFGEVFNATRFASVYAWNRKRISNCVADYSVLYNSASFSTFKCYGVSPTKLNDLCFTNVYADSFVIRGDEVRQIAPGQTGKIADYNYKLPDDFTGCVIAWNSNNLDSKVGGNYNYLYRLFRKSNLKPFERDISTEIYQAGSTPCNGVEGFNCYFPLQSYGFQPTNGVGYQPYRVVVLSFELLHAPATVCGPKKSTNLVKNKCVNFNFNGLTGTGVLTESNKKFLPFQQFGRDIADTTDAVRDPQTLEILDITPCSFGGVSVITPGTNTSNQVAVLYQGVNCTEVPVAIHADQLTPTWRVYSTGSNVFQTRAGCLIGAEHVNNSYECDIPIGAGICASYQTQTNSPRRARSVASQSIIAYTMSLGAENSVAYSNNSIAIPTNFTISVTTEILPVSMTKTSVDCTMYICGDSTECSNLLLQYGSFCTQLNRALTGIAVEQDKNTQEVFAQVKQIYKTPPIKDFGGFNFSQILPDPSKPSKRSFIEDILFNKVTLADAGFIKQYGDCLGDIAARDLICAQKFNGLTVLPPLLTDEMIAQYCSALLAGTITSGWTFGAGAALQIPFAMQMAYRFNGIGVTQNVLYENQKLIANQFNSAIGKIQDSLSSTASALGKLQDVVNQNAQALNTLVKQLSSNFGAISSVLNDILSRLDKVEAEVQIDRLITGRLQSLQTYVTQQLIRAAEIRASANLAATKMSECVLGQSKRVDFCGKGYHLMSFPQCAPHGVVFLHVTYVPAQEKNFTTAPAICHDGKAHFPREGVFVSNGTHWFVTQRNFYEPQIITTDNTFVSGNCDVVIGIVNNTVYDPLQPELDSGGGSGGGQIYEGKLTAEGLRFGIVASRFNHALVDRLVEGAIDAIVRHGGREEDITLVRVPGSWEIPVAAGELARKEDIDAVIAIGVLIRGATPHFDYIASEVSKGLADLSLELRKPITFGVITADTLEQAIERAGTKHGNKGWEAALSAIEMANLFKSLR

SEQ ID NO: 8640 - protein, 1307 aa, Artificial Sequence
  SARS-CoV-2/Congo/158/2020__EPI_ISL_417950 spike protein (1-1147)(T874C_S1055C) LumSynth construct
MFVFLVLLPLVSSQCVNLTTRTQLPPAYTNSFTRGVYYPDKVFRSSVLHSTQDLFLPFFSNVTWFHAIHVSGTNGTKRFDNPVLPFNDGVYFASTEKSNIIRGWIFGTTLDSKTQSLLIVNNATNVVIKVCEFQFCNDPFLGVYYHKNNKSWMESEFRVYSSANNCTFEYVSQPFLMDLEGKQGNFKNLREFVFKNIDGYFKIYSKHTPINLVRDLPQGFSALEPLVDLPIGINITRFQTLLALHRSYLTPGDSSSGWTAGAAAYYVGYLQPRTFLLKYNENGTITDAVDCALDPLSETKCTLKSFTVEKGIYQTSNFRVQPTESIVRFPNITNLCPFGEVFNATRFASVYAWNRKRISNCVADYSVLYNSASFSTFKCYGVSPTKLNDLCFTNVYADSFVIRGDEVRQIAPGQTGKIADYNYKLPDDFTGCVIAWNSNNLDSKVGGNYNYLYRLFRKSNLKPFERDISTEIYQAGSTPCNGVEGFNCYFPLQSYGFQPTNGVGYQPYRVVVLSFELLHAPATVCGPKKSTNLVKNKCVNFNFNGLTGTGVLTESNKKFLPFQQFGRDIADTTDAVRDPQTLEILDITPCSFGGVSVITPGTNTSNQVAVLYQDVNCTEVPVAIHADQLTPTWRVYSTGSNVFQTRAGCLIGAEHVNNSYECDIPIGAGICASYQTQTNSPRRARSVASQSIIAYTMSLGAENSVAYSNNSIAIPTNFTISVTTEILPVSMTKTSVDCTMYICGDSTECSNLLLQYGSFCTQLNRALTGIAVEQDKNTQEVFAQVKQIYKTPPIKDFGGFNFSQILPDPSKPSKRSFIEDLLFNKVTLADAGFIKQYGDCLGDIAARDLICAQKFNGLTVLPPLLTDEMIAQYCSALLAGTITSGWTFGAGAALQIPFAMQMAYRFNGIGVTQNVLYENQKLIANQFNSAIGKIQDSLSSTASALGKLQDVVNQNAQALNTLVKQLSSNFGAISSVLNDILSRLDKVEAEVQIDRLITGRLQSLQTYVTQQLIRAAEIRASANLAATKMSECVLGQSKRVDFCGKGYHLMSFPQCAPHGVVFLHVTYVPAQEKNFTTAPAICHDGKAHFPREGVFVSNGTHWFVTQRNFYEPQIITTDNTFLSGNCDVVIGIVNNTVYDPLQPELDSGGGSGGGQIYEGKLTAEGLRFGIVASRFNHALVDRLVEGAIDAIVRHGGREEDITLVRVPGSWEIPVAAGELARKEDIDAVIAIGVLIRGATPHFDYIASEVSKGLADLSLELRKPITFGVITADTLEQAIERAGTKHGNKGWEAALSAIEMANLFKSLR

SEQ ID NO: 8641 - protein, 1307 aa, Artificial Sequence
  SARS-CoV-2/USA/UT-00034/2020__EPI_ISL_417977 spike protein (1-1147)(T874C_S1055C) LumSynth construct
MFVFLVLLPLVSSQCVNLTTRTQLPPAYTNSFTRGVYYPDKVFRSSVLHSTQDLFLPFFSNVTWFHAIHVSGTNGTKRFDNPVLPFNDGVYFASTEKSNIIRGWIFGTTLDSKTQSLLIVNNATNVVIKVCEFQFCNDPFLGVYYYKNNKSWMESEFRVYSSANNCTFEYVSQPFLMDLEGKQGNFKNLREFVFKNIDGYFKIYSKHTPINLVRDLPQGFSALEPLVDLPIGINITRFQTLLALHRSYLTPGDSSSGWTAGAAAYYVGYLQPRTFLLKYNENGTITDAVDCALDPLSETKCTLKSFTVEKGIYQTSNFRVQPTESIVRFPNITNLCPFGEVFNATRFASVYAWNRKRISNCVADYSVLYNSASFSTFKCYGVSPTKLNDLCFTNVYADSFVIRGDEVRQIAPGQTGKIADYNYKLPDDFTGCVIAWNSNNLDSKVGGNYNYLYRLFRKSNLKPFERDISTEIYQAGSTPCNGVEGFNCYFPLQSYGFQPTNGVGYQPYRVVVLSFELLHAPATVCGPKKSTNLVKNKCVNFNFNGLTGTGVLTESNKKFLPFQQFGRDIADTTDAVRDPQTLEILDITPCSFGGVSVITPGTNTSNQVAVLYQGVNCTEVPVAIHADQLTPTWRVYSTGSNVFQTRAGCLIGAEHVNNSYECDIPIGAGICASYQTQTNSPRRARSVASQSIIAYTMSLGAENSVAYSNNSIAIPTNFTISVTTEILPVSMTKTSVDCTMYICGDSTECSNLLLQYGSFCTQLNRALTGIAVEQDKNTQEVFAQVKQIYKTPPIKDFGGFNFSQILPDPSKPSKRSFIEDLLFNKVTLADAGFIKQYGDCLGDIAARDLICAQKFNGLTVLPPLLTDEMIAQYCSALLAGTITSGWTFGAGAALQIPFAMQMAYRFNGIGVTQNVLYENQKLIANQFNSAIGKIQDSLSSTASALGKLQDVVNQNAQALNTLVKQLSSNFGAISSVLNDILSRLDKVEAEVQIDRLITGRLQSLQTYVTQQLIRAAEIRASANLAATKMSECVLGQSKRVDFCGKGYHLMSFPQCAPHGVVFLHVTYVPAQEKNFTTAPAICHDGKAHFPREGVFVSNGTHWFVTQRNFYEPQIITTDNTFVSGNCDVVIGIVNNTVYDPLQPELDSGGGSGGGQIYEGKLTAEGLRFGIVASRFNHALVDRLVEGAIDAIVRHGGREEDITLVRVPGSWEIPVAAGELARKEDIDAVIAIGVLIRGATPHFDYIASEVSKGLADLSLELRKPITFGVITADTLEQAIERAGTKHGNKGWEAALSAIEMANLFKSLR

SEQ ID NO: 8642 - protein, 1307 aa, Artificial Sequence
  SARS-CoV-2/USA/UT-00033/2020__EPI_ISL_417976 spike protein (1-1147)(T874C_S1055C) LumSynth construct
MFVFLVLLPLVSSQCVNLTTRTQLPPAYTNSFTRGVYYPDKVFRSSVLHSTQDLFLPFFSNVTWFHAIHVSGTNGTKRFDNPVLPFNDGVYFASTEKSNIIRGWIFGTTLDSKTQSLLIVNNATNVVIKVCEFQFCNDPFLGVYYHKNNKSWMESEFRVYSSANNCTFEYVSQPFLMDLEGKQGNFKNLREFVFKNIDGYFKIYSKHTPINLVRDLPQGFSALEPLVDLPIGINITRFQTLLALHRSYLTPGDSSSGLTAGAAAYYVGYLQPRTFLLKYNENGTITDAVDCALDPLSETKCTLKSFTVEKGIYQTSNFRVQPTESIVRFPNITNLCPFGEVFNATRFASVYAWNRKRISNCVADYSVLYNSASFSTFKCYGVSPTKLNDLCFTNVYADSFVIRGDEVRQIAPGQTGKIADYNYKLPDDFTGCVIAWNSNNLDSKVGGNYNYLYRLFRKSNLKPFERDISTEIYQAGSTPCNGVEGFNCYFPLQSYGFQPTNGVGYQPYRVVVLSFELLHAPATVCGPKKSTNLVKNKCVNFNFNGLTGTGVLTESNKKFLPFQQFGRDIADTTDAVRDPQTLEILDITPCSFGGVSVITPGTNTSNQVAVLYQGVNCTEVPVAIHADQLTPTWRVYSTGSNVFQTRAGCLIGAEHVNNSYECDIPIGAGICASYQTQTNSPRRARSVASQSIIAYTMSLGAENSVAYSNNSIAIPTNFTISVTTEILPVSMTKTSVDCTMYICGDSTECSNLLLQYGSFCTQLNRALTGIAVEQDKNTQEVFAQVKQIYKTPPIKDFGGFNFSQILPDPSKPSKRSFIEDLLFNKVTLADAGFIKQYGDCLGDIAARDLICAQKFNGLTVLPPLLTDEMIAQYCSALLAGTITSGWTFGAGAALQIPFAMQMAYRFNGIGVTQNVLYENQKLIANQFNSAIGKIQDSLSSTASALGKLQDVVNQNAQALNTLVKQLSSNFGAISSVLNDILSRLDKVEAEVQIDRLITGRLQSLQTYVTQQLIRAAEIRASANLAATKMSECVLGQSKRVDFCGKGYHLMSFPQCAPHGVVFLHVTYVPAQEKNFTTAPAICHDGKAHFPREGVFVSNGTHWFVTQRNFYEPQIITTDNTFVSGNCDVVIGIVNNTVYDPLQPELDSGGGSGGGQIYEGKLTAEGLRFGIVASRFNHALVDRLVEGAIDAIVRHGGREEDITLVRVPGSWEIPVAAGELARKEDIDAVIAIGVLIRGATPHFDYIASEVSKGLADLSLELRKPITFGVITADTLEQAIERAGTKHGNKGWEAALSAIEMANLFKSLR

SEQ ID NO: 8643 - protein, 1307 aa, Artificial Sequence
  SARS-CoV-2/USA/WI-13/2020__EPI_ISL_417516 spike protein (1-1147)(T874C_S1055C) LumSynth construct
MFVFLVLLPLVSSQCVNLTTRTQLPPAYTNSFTRGVYYPDKVFRSSVLHSTQDLFLPFFSNVTWFHAIHVSGTNGTKRFDNPVLPFNDGVYFASTEKSNIIRGWIFGTTLDSKTQSLLIVNNATNVVIKVCEFQFCNDPFLGVYYHKNNKSWMESEFRVYSSANNCTFEYVSQPFLMDLEGKQGNFKNLREFVFKNIDGYFKIYSKHTPINLVRDLPQGFSALEPLVDLPIGINITRFQTLLALHRSYLTPGDSSSGWTAGAAAYYVGYLQPRTFLLKYNENGTITDAVDCALDPLSETKCTLKSFTVEKGIYQTSNFRVLPTESIVRFPNITNLCPFGEVFNATRFASVYAWNRKRISNCVADYSVLYNSASFSTFKCYGVSPTKLNDLCFTNVYADSFVIRGDEVRQIAPGQTGKIADYNYKLPDDFTGCVIAWNSNNLDSKVGGNYNYLYRLFRKSNLKPFERDISTEIYQAGSTPCNGVEGFNCYFPLQSYGFQPTNGVGYQPYRVVVLSFELLHAPATVCGPKKSTNLVKNKCVNFNFNGLTGTGVLTESNKKFLPFQQFGRDIADTTDAVRDPQTLEILDITPCSFGGVSVITPGTNTSNQVAVLYQGVNCTEVPVAIHADQLTPTWRVYSTGSNVFQTRAGCLIGAEHVNNSYECDIPIGAGICASYQTQTNSPRRARSVASQSIIAYTMSLGAENSVAYSNNSIAIPTNFTISVTTEILPVSMTKTSVDCTMYICGDSTECSNLLLQYGSFCTQLNRALTGIAVEQDKNTQEVFAQVKQIYKTPPIKDFGGFNFSQILPDPSKPSKRSFIEDLLFNKVTLADAGFIKQYGDCLGDIAARDLICAQKFNGLTVLPPLLTDEMIAQYCSALLAGTITSGWTFGAGAALQIPFAMQMAYRFNGIGVTQNVLYENQKLIANQFNSAIGKIQDSLSSTASALGKLQDVVNQNAQALNTLVKQLSSNFGAISSVLNDILSRLDKVEAEVQIDRLITGRLQSLQTYVTQQLIRAAEIRASANLAATKMSECVLGQSKRVDFCGKGYHLMSFPQCAPHGVVFLHVTYVPAQEKNFTTAPAICHDGKAHFPREGVFVSNGTHWFVTQRNFYEPQIITTDNTFVSGNCDVVIGIVNNTVYDPLQPELDSGGGSGGGQIYEGKLTAEGLRFGIVASRFNHALVDRLVEGAIDAIVRHGGREEDITLVRVPGSWEIPVAAGELARKEDIDAVIAIGVLIRGATPHFDYIASEVSKGLADLSLELRKPITFGVITADTLEQAIERAGTKHGNKGWEAALSAIEMANLFKSLR

SEQ ID NO: 8644 - protein, 1306 aa, Artificial Sequence
  SARS-CoV-2/India/1-27/2020__EPI_ISL_413522 spike protein (1-1146)(T873C_S1054C) LumSynth construct
MFVFLVLLPLVSSQCVNLTTRTQLPPAYTNSFTRGVYYPDKVFRSSVLHSTQDLFLPFFSNVTWFHAIHVSGTNGTKRFDNPVLPFNDGVYFASTEKSNIIRGWIFGTTLDSKTQSLLIVNNATNVVIKVCEFQFCNDPFLGVYHKNNKSWMESEFRVYSSANNCTFEYVSQPFLMDLEGKQGNFKNLREFVFKNIDGYFKIYSKHTPINLVRDLPQGFSALEPLVDLPIGINITRFQTLLALHRSYLTPGDSSSGWTAGAAAYYVGYLQPRTFLLKYNENGTITDAVDCALDPLSETKCTLKSFTVEKGIYQTSNFRVQPTESIVRFPNITNLCPFGEVFNATRFASVYAWNRKRISNCVADYSVLYNSASFSTFKCYGVSPTKLNDLCFTNVYADSFVIRGDEVIQIAPGQTGKIADYNYKLPDDFTGCVIAWNSNNLDSKVGGNYNYLYRLFRKSNLKPFERDISTEIYQAGSTPCNGVEGFNCYFPLQSYGFQPTNGVGYQPYRVVVLSFELLHAPATVCGPKKSTNLVKNKCVNFNFNGLTGTGVLTESNKKFLPFQQFGRDIADTTDAVRDPQTLEILDITPCSFGGVSVITPGTNTSNQVAVLYQDVNCTEVPVAIHADQLTPTWRVYSTGSNVFQTRAGCLIGAEHVNNSYECDIPIGAGICASYQTQTNSPRRARSVASQSIIAYTMSLGAENSVAYSNNSIAIPTNFTISVTTEILPVSMTKTSVDCTMYICGDSTECSNLLLQYGSFCTQLNRALTGIAVEQDKNTQEVFAQVKQIYKTPPIKDFGGFNFSQILPDPSKPSKRSFIEDLLFNKVTLADAGFIKQYGDCLGDIAARDLICAQKFNGLTVLPPLLTDEMIAQYCSALLAGTITSGWTFGAGAALQIPFAMQMAYRFNGIGVTQNVLYENQKLIANQFNSAIGKIQDSLSSTASALGKLQDVVNQNAQALNTLVKQLSSNFGAISSVLNDILSRLDKVEAEVQIDRLITGRLQSLQTYVTQQLIRAAEIRASANLAATKMSECVLGQSKRVDFCGKGYHLMSFPQCAPHGVVFLHVTYVPAQEKNFTTAPAICHDGKAHFPREGVFVSNGTHWFVTQRNFYEPQIITTDNTFVSGNCDVVIGIVNNTVYDPLQPELDSGGGSGGGQIYEGKLTAEGLRFGIVASRFNHALVDRLVEGAIDAIVRHGGREEDITLVRVPGSWEIPVAAGELARKEDIDAVIAIGVLIRGATPHFDYIASEVSKGLADLSLELRKPITFGVITADTLEQAIERAGTKHGNKGWEAALSAIEMANLFKSLR

SEQ ID NO: 8645 - protein, 1301 aa, Artificial Sequence
  SARS-CoV-2/pangolin/Guangxi/P4L/2017__EPI_ISL_410538 spike protein (1-1141)(T868C_S1049C) LumSynth construct
MFVFLFVLPLVSSQCVNLTTRTGIPPGYTNSSTRGVYYPDKVFRSSILHLTQDLFLPFFSNVTWFNTINYQGGFKKFDNPVLPFNDGVYFASTEKSNIIRGWIFGTTLDARTQSLLIVNNATNVVIKVCEFQFCTDPFLGVYYHNNNKTWVENEFRVYSSANNCTFEYISQPFLMDLEGKQGNFKNLREFVFKNVDGYFKIYSKHTPIDLVRDLPRGFAALEPLVDLPIGINITRFQTLLALHRSYLTPGNLESGWTTGAAAYYVGYLQQRTFLLSYNQNGTITDAVDCSLDPLSETKCTLKSLTVEKGIYQTSNFRVQPTISIVRFPNITNLCPFGEVFNASKFASVYAWNRKRISNCVADYSVLYNSTSFSTFKCYGVSPTKLNDLCFTNVYADSFVVKGDEVRQIAPGQTGVIADYNYKLPDDFTGCVIAWNSVKQDALTGGNYGYLYRLFRKSKLKPFERDISTEIYQAGSTPCNGQVGLNCYYPLERYGFHPTTGVNYQPFRVVVLSFELLNGPATVCGPKLSTTLVKDKCVNFNFNGLTGTGVLTTSKKQFLPFQQFGRDISDTTDAVRDPQTLEILDITPCSFGGVSVITPGTNTSNQVAVLYQDVNCTEVPMAIHAEQLTPAWRVYSAGANVFQTRAGCLVGAEHVNNSYECDIPVGAGICASYHSMSSLRSVNQRSIIAYTMSLGAENSVAYSNNSIAIPTNFTISVTTEILPVSMTKTSVDCTMYICGDSIECSNLLLQYGSFCTQLNRALTGIAVEQDKNTQEVFAQVKQIYKTPPIKDFGGFNFSQILPDPSKPSKRSFIEDLLFNKVTLADAGFIKQYGDCLGDIAARDLICAQKFNGLTVLPPLLTDEMIAQYCSALLAGTITSGWTFGAGAALQIPFAMQMAYRFNGIGVTQNVLYENQKLIANQFNSAIGKIQDSLSSTASALGKLQDVVNQNAQALNTLVKQLSSNFGAISSVLNDILSRLDKVEAEVQIDRLITGRLQSLQTYVTQQLIRAAEIRASANLAATKMSECVLGQSKRVDFCGKGYHLMSFPQCAPHGVVFLHVTYVPAQEKNFTTAPAICHEGKAHFPREGVFVSNGTHWFITQRNFYEPQIITTDNTFVSGSCDVVIGIVNNTVYDPLQPELDSGGGSGGGQIYEGKLTAEGLRFGIVASRFNHALVDRLVEGAIDAIVRHGGREEDITLVRVPGSWEIPVAAGELARKEDIDAVIAIGVLIRGATPHFDYIASEVSKGLADLSLELRKPITFGVITADTLEQAIERAGTKHGNKGWEAALSAIEMANLFKSLR

SEQ ID NO: 8646 - protein, 1301 aa, Artificial Sequence
  SARS-CoV-2/pangolin/Guangxi/P5L/2017__EPI_ISL_410540 spike protein (1-1141)(T868C_S1049C) LumSynth construct
MFVFLFVLPLVSSQCVNLTTRTGIPPGYTNSSTRGVYYPDKVFRSSILHLTQDLFLPFFSNVTWFNTINYQGGFKKFDNPVLPFNDGVYFASTEKSNIIRGWIFGTTLDARTQSLLIVNNATNVVIKVCEFQFCTDPFLGVYYHNNNKTWVENEFRVYSSANNCTFEYISQPFLMDLEGKQGNFKNLREFVFKNVDGYFKIYSKHTPIDLVRDLPRGFAALEPLVDLPIGINITRFQTLLALHRSYLTPGKLESGWTTGAAAYYVGYLQQRTFLLSYNQNGTITDAVDCSLDPLSETKCTLKSLTVEKGIYQTSNFRVQPTISIVRFPNITNLCPFGEVFNASKFASVYAWNRKRISNCVADYSVLYNSTSFSTFKCYGVSPTKLNDLCFTNVYADSFVVKGDEVRQIAPGQTGVIADYNYKLPDDFTGCVIAWNSVKQDALTGGNYGYLYRLFRKSKLKPFERDISTEIYQAGSTPCNGQVGLNCYYPLERYGFHPTTGVNYQPFRVVVLSFELLNGPATVCGPKLSTTLVKDKCVNFNFNGLTGTGVLTTSKKQFLPFQQFGRDISDTTDAVRDPQTLEILDITPCSFGGVSVITPGTNTSNQVAVLYQDVNCTEVPMAIHAEQLTPAWRVYSAGANVFQTRAGCLVGAEHVNNSYECDIPVGAGICASYHSMSSFRSVNQRSIIAYTMSLGAENSVAYSNNSIAIPTNFTISVTTEILPVSMTKTSVDCTMYICGDSIECSNLLLQYGSFCTQLNRALTGIAVEQDKNTQEVFAQVKQIYKTPPIKDFGGFNFSQILPDPSKPSKRSFIEDLLFNKVTLADAGFIKQYGDCLGDIAARDLICAQKFNGLTVLPPLLTDEMIAQYCSALLAGTITSGWTFGAGAALQIPFAMQMAYRFNGIGVTQNVLYENQKLIANQFNSAIGKIQDSLSSTASALGKLQDVVNQNAQALNTLVKQLSSNFGAISSVLNDILSRLDKVEAEVQIDRLITGRLQSLQTYVTQQLIRAAEIRASANLAATKMSECVLGQSKRVDFCGKGYHLMSFPQCAPHGVVFLHVTYVPAQEKNFTTAPAICHEGKAHFPREGVFVSNGTHWFITQRNFYEPQIITTDNTFVSGSCDVVIGIVNNTVYDPLQPELDSGGGSGGGQIYEGKLTAEGLRFGIVASRFNHALVDRLVEGAIDAIVRHGGREEDITLVRVPGSWEIPVAAGELARKEDIDAVIAIGVLIRGATPHFDYIASEVSKGLADLSLELRKPITFGVITADTLEQAIERAGTKHGNKGWEAALSAIEMANLFKSLR

SEQ ID NO: 8647 - protein, 1301 aa, Artificial Sequence
  SARS-CoV-2/pangolin/Guangxi/P5E/2017__EPI_ISL_410541 spike protein (1-1141)(T868C_S1049C) LumSynth construct
MFVFLFVLPLVSSQCVNLTTRTGIPPGYTNSSTRGVYYPDKVFRSSILHLTQDLFLPFFSNVTWFNTITYQGGSKKFDNPVLPFNDGVYFASTEKSNIIRGWIFGTTLDARTQSLLIVNNATNVVIKVCEFQFCTDPFLGVYYHNNNKTWVENEFRVYSSANNCTFEYISQPFLMDLEGKQGNFKNLREFVFKNVDGYFKIYSKHTPIDLVRDLPRGFAALEPLVDLPIGINITRFQTLLALHRSYLTPGKLESGWTTGAAAYYVGYLQQRTFLLSYNQNGTITDAVDCSLDPLSETKCTLKSLTVEKGIYQTSNFRVQPTISIVRFPNITNLCPFGEVFNASKFASVYAWNRKRISNCVADYSVLYNSTSFSTFKCYGVSPTKLNDLCFTNVYADSFVVKGDEVRQIAPGQTGVIADYNYKLPDDFTGCVIAWNSVKQDALTGDNYGYLYRLFRKSKLKPFERDISTEIYQAGSTPCNGQVGLNCYYPLERYGFHPTTGVNYQPFRVVVLSFELLNGPATVCGPKLSTTLVKDKCVNFNFNGLTGTGVLTTSKKQFLPFQQFGRDISDTTDAVRDPQTLEILDITPCSFGGVSVITPGTNTSNQVAVLYQDVNCTEVPMAIHAEQLTPAWRVYSAGANVFQTRAGCLVGAEHVNNSYECDIPVGAGICASYHSMSSFRSVNQRSIIAYTMSLGAENSVAYSNNSIAIPTNFTISVTTEILPVSMTKTSVDCTMYICGDSIECSNLLLQYGSFCTQLNRALTGIAVEQDKNTQEVFAQVKQIYKTPPIKDFGGFNFSQILPDPSKPSKRSFIEDLLFNKVTLADAGFIKQYGDCLGDIAARDLICAQKFNGLTVLPPLLTDEMIAQYCSALLAGTITSGWTFGAGAALQIPFAMQMAYRFNGIGVTQNVLYENQKLIANQFNSAIGKIQDSLSSTASALGKLQDVVNQNAQALNTLVKQLSSNFGAISSVLNDILSRLDKVEAEVQIDRLITGRLQSLQTYVTQQLIRAAEIRASANLAATKMSECVLGQSKRVDFCGKGYHLMSFPQCAPHGVVFLHVTYVPAQEKNFTTAPAICHEGKAHFPREGVFVSNGTHWFITQRNFYEPQIITTDNTFVSGSCDVVIGIVNNTVYDPLQPELDSGGGSGGGQIYEGKLTAEGLRFGIVASRFNHALVDRLVEGAIDAIVRHGGREEDITLVRVPGSWEIPVAAGELARKEDIDAVIAIGVLIRGATPHFDYIASEVSKGLADLSLELRKPITFGVITADTLEQAIERAGTKHGNKGWEAALSAIEMANLFKSLR

SEQ ID NO: 8648 - protein, 1299 aa, Artificial Sequence
  SARS-CoV-2/pangolin/Guangxi/P1E/2017__EPI_ISL_410539 spike protein (1-1139)(T866C_S1047C) LumSynth construct
MFVFLFVLPLVSSQCVNLTTRTGIQPGYTNSSTRGVYYPDKVFRSSILHLTQDLFLPFFSNVTWFNTINYQGGFKKFDNPVLPFNDGVYFASTEKSNIIRGWIFGTTLDARTQSLLIVNNATNVVIKVCEFQFCTDPFLGVYYHNNNKTWVENEFRVYSSANNCTFEYISQPFLMDLEGKQGNFKNLREFVFKNVDGYFKIYSKHTPIDLVRDLPRGFAALEPLVDLPIGINITRFQTLLALHRSYLTPGKLESGWTTGAAAYYVGYLQQRTFLLSYNQNGTITDAVDCSLDPLSETKCTLKSLTVEKGIYQTSNFRVQPTISIVRFPNITNLCPFGEVFNASKFASVYAWNRKRISNCVADYSVLYNSTSFSTFKCYGVSPTKLNDLCFTNVYADSFVVKGDEVRQIAPGQTGVIADYNYKLPDDFTGCVIAWNSVKQDALTGGNYLYRLFRKSKLKPFERDISTEIYQAGSTPCNGQVGLNCYYPLERYGFHPTTGVNYQPFRVVVLSFELLNGPATVCGPKLSTTLVKDKCVNFNFNGLTGTGVLTTSKKQFLPFQQFGRDISDTTDAVRDPQTLEILDITPCSFGGVSVITPGTNTSNQVAVLYQDVNCTEVPMAIHAEQLTPAWRVYSAGANVFQTRAGCLVGAEHVNNSYECDIPVGAGICASYHSMSSLRSVNQRSIIAYTMSLGAENSVAYSNNSIAIPTNFTISVTTEILPVSMTKTSVDCTMYICGDSIECSNLLLQYGSFCTQLNRALTGIAVEQDKNTQEVFAQVKQIYKTPPIKDFGGFNFSQILPDPSKPSKRSFIEDLLFNKVTLADAGFIKQYGDCLGDIAARDLICAQKFNGLTVLPPLLTDEMIAQYCSALLAGTITSGWTFGAGAALQIPFAMQMAYRFNGIGVTQNVLYENQKLIANQFNSAIGKIQDSLSSTASALGKLQDVVNQNAQALNTLVKQLSSNFGAISSVLNDILSRLDKVEAEVQIDRLITGRLQSLQTYVTQQLIRAAEIRASANLAATKMSECVLGQSKRVDFCGKGYHLMSFPQCAPHGVVFLHVTYVPAQEKNFTTAPAICHEGKAHFPREGVFVSNGTHWFITQRNFYEPQIITTDNTFVSGSCDVVIGIVNNTVYDPLQPELDSGGGSGGGQIYEGKLTAEGLRFGIVASRFNHALVDRLVEGAIDAIVRHGGREEDITLVRVPGSWEIPVAAGELARKEDIDAVIAIGVLIRGATPHFDYIASEVSKGLADLSLELRKPITFGVITADTLEQAIERAGTKHGNKGWEAALSAIEMANLFKSLR

SEQ ID NO: 8649 - protein, 1315 aa, Artificial Sequence
  SARS-CoV-2/Wuhan/WIV05/2019__EPI_ISL_402128 spike protein (1-1147) Ferritin construct
MFVFLVLLPLVSSQCVNLTTRTQLPPAYTNSFTRGVYYPDKVFRSSVLHSTQDLFLPFFSNVTWFHAIHVSGTNGTKRFDNPVLPFNDGVYFASTEKSNIIRGWIFGTTLDSKTQSLLIVNNATNVVIKVCEFQFCNDPFLGVYYHKNNKSWMESEFRVYSSANNCTFEYVSQPFLMDLEGKQGNFKNLREFVFKNIDGYFKIYSKHTPINLVRDLPQGFSALEPLVDLPIGINITRFQTLLALHRSYLTPGDSSSGWTAGAAAYYVGYLQPRTFLLKYNENGTITDAVDCALDPLSETKCTLKSFTVEKGIYQTSNFRVQPTESIVRFPNITNLCPFGEVFNATRFASVYAWNRKRISNCVADYSVLYNSASFSTFKCYGVSPTKLNDLCFTNVYADSFVIRGDEVRQIAPGQTGKIADYNYKLPDDFTGCVIAWNSNNLDSKVGGNYNYLYRLFRKSNLKPFERDISTEIYQAGSTPCNGVEGFNCYFPLQSYGFQPTNGVGYQPYRVVVLSFELLHAPATVCGPKKSTNLVKNKCVNFNFNGLTGTGVLTESNKKFLPFQQFGRDIADTTDAVRDPQTLEILDITPCSFGGVSVITPGTNTSNQVAVLYQDVNCTEVPVAIHADQLTPTWRVYSTGSNVFQTRAGCLIGAEHVNNSYECDIPIGAGICASYQTQTNSPRRARSVASQSIIAYTMSLGAENSVAYSNNSIAIPTNFTISVTTEILPVSMTKTSVDCTMYICGDSTECSNLLLQYGSFCTQLNRALTGIAVEQDKNTQEVFAQVKQIYKTPPIKDFGGFNFSQILPDPSKPSKRSFIEDLLFNKVTLADAGFIKQYGDCLGDIAARDLICAQKFNGLTVLPPLLTDEMIAQYTSALLAGTITSGWTFGAGAALQIPFAMQMAYRFNGIGVTQNVLYENQKLIANQFNSAIGKIQDSLSSTASALGKLQDVVNQNAQALNTLVKQLSSNFGAISSVLNDILSRLDKVEAEVQIDRLITGRLQSLQTYVTQQLIRAAEIRASANLAATKMSECVLGQSKRVDFCGKGYHLMSFPQSAPHGVVFLHVTYVPAQEKNFTTAPAICHDGKAHFPREGVFVSNGTHWFVTQRNFYEPQIITTDNTFVSGNCDVVIGIVNNTVYDPLQPELDSGGGGSDIIKLLNEQVNKEMQSSNLYMSMSSWCYTHSLDGAGLFLFDHAAEEYEHAKKLIIFLNENNVPVQLTSISAPEHKFEGLTQIFQKAYEHEQHISESINNIVDHAIKSKDHATFNFLQWYVAEQHEEEVLFKDILDKIELIGNENHGLYLADQYVKGIAKSRKS

SEQ ID NO: 8650 - protein, 1311 aa, Artificial Sequence
  SARS-CoV-2/bat/Yunnan/RaTG13/2013__EPI_ISL_402131 spike protein (1-1143) Ferritin construct
MFVFLVLLPLVSSQCVNLTTRTQLPPAYTNSSTRGVYYPDKVFRSSVLHLTQDLFLPFFSNVTWFHAIHVSGTNGIKRFDNPVLPFNDGVYFASTEKSNIIRGWIFGTTLDSKTQSLLIVNNATNVVIKVCEFQFCNDPFLGVYYHKNNKSWMESEFRVYSSANNCTFEYVSQPFLMDLEGKQGNFKNLREFVFKNIDGYFKIYSKHTPINLVRDLPPGFSALEPLVDLPIGINITRFQTLLALHRSYLTPGDSSSGWTAGAAAYYVGYLQPRTFLLKYNENGTITDAVDCALDPLSETKCTLKSFTVEKGIYQTSNFRVQPTDSIVRFPNITNLCPFGEVFNATTFASVYAWNRKRISNCVADYSVLYNSTSFSTFKCYGVSPTKLNDLCFTNVYADSFVITGDEVRQIAPGQTGKIADYNYKLPDDFTGCVIAWNSKHIDAKEGGNFNYLYRLFRKANLKPFERDISTEIYQAGSKPCNGQTGLNCYYPLYRYGFYPTDGVGHQPYRVVVLSFELLNAPATVCGPKKSTNLVKNKCVNFNFNGLTGTGVLTESNKKFLPFQQFGRDIADTTDAVRDPQTLEILDITPCSFGGVSVITPGTNASNQVAVLYQDVNCTEVPVAIHADQLTPTWRVYSTGSNVFQTRAGCLIGAEHVNNSYECDIPIGAGICASYQTQTNSRSVASQSIIAYTMSLGAENSVAYSNNSIAIPTNFTISVTTEILPVSMTKTSVDCTMYICGDSTECSNLLLQYGSFCTQLNRALTGIAVEQDKNTQEVFAQVKQIYKTPPIKDFGGFNFSQILPDPSKPSKRSFIEDLLFNKVTLADAGFIKQYGDCLGDIAARDLICAQKFNGLTVLPPLLTDEMIAQYTSALLAGTITSGWTFGAGAALQIPFAMQMAYRFNGIGVTQNVLYENQKLIANQFNSAIGKIQDSLSSTASALGKLQDVVNQNAQALNTLVKQLSSNFGAISSVLNDILSRLDKVEAEVQIDRLITGRLQSLQTYVTQQLIRAAEIRASANLAATKMSECVLGQSKRVDFCGKGYHLMSFPQSAPHGVVFLHVTYVPAQEKNFTTAPAICHDGKAHFPREGVFVSNGTHWFVTQRNFYEPQIITTDNTFVSGSCDVVIGIVNNTVYDPLQPELDSGGGGSDIIKLLNEQVNKEMQSSNLYMSMSSWCYTHSLDGAGLFLFDHAAEEYEHAKKLIIFLNENNVPVQLTSISAPEHKFEGLTQIFQKAYEHEQHISESINNIVDHAIKSKDHATFNFLQWYVAEQHEEEVLFKDILDKIELIGNENHGLYLADQYVKGIAKSRKS

SEQ ID NO: 8651 - protein, 1315 aa, Artificial Sequence
  SARS-CoV-2/Wuhan/HBCDC-HB-01/2019__EPI_ISL_402132 spike protein (1-1147) Ferritin construct
MFVFLVLLPLVSSQCVNLTTRTQLPPAYTNSITRGVYYPDKVFRSSVLHSTQDLFLPFFSNVTWFHAIHVSGTNGTKRFDNPVLPFNDGVYFASTEKSNIIRGWIFGTTLDSKTQSLLIVNNATNVVIKVCEFQFCNDPFLGVYYHKNNKSWMESEFRVYSSANNCTFEYVSQPFLMDLEGKQGNFKNLREFVFKNIDGYFKIYSKHTPINLVRDLPQGFSALEPLVDLPIGINITRFQTLLALHRSYLTPGDSSSGWTAGAAAYYVGYLQPRTFLLKYNENGTITDAVDCALDPLSETKCTLKSFTVEKGIYQTSNFRVQPTESIVRFPNITNLCPFGEVFNATRFASVYAWNRKRISNCVADYSVLYNSASFSTFKCYGVSPTKLNDLCFTNVYADSFVIRGDEVRQIAPGQTGKIADYNYKLPDDFTGCVIAWNSNNLDSKVGGNYNYLYRLFRKSNLKPFERDISTEIYQAGSTPCNGVEGFNCYFPLQSYGFQPTNGVGYQPYRVVVLSFELLHAPATVCGPKKSTNLVKNKCVNFNFNGLTGTGVLTESNKKFLPFQQFGRDIADTTDAVRDPQTLEILDITPCSFGGVSVITPGTNTSNQVAVLYQDVNCTEVPVAIHADQLTPTWRVYSTGSNVFQTRAGCLIGAEHVNNSYECDIPIGAGICASYQTQTNSPRRARSVASQSIIAYTMSLGAENSVAYSNNSIAIPTNFTISVTTEILPVSMTKTSVDCTMYICGDSTECSNLLLQYGSFCTQLNRALTGIAVEQDKNTQEVFAQVKQIYKTPPIKDFGGFNFSQILPDPSKPSKRSFIEDLLFNKVTLADAGFIKQYGDCLGDIAARDLICAQKFNGLTVLPPLLTDEMIAQYTSALLAGTITSGWTFGAGAALQIPFAMQMAYRFNGIGVTQNVLYENQKLIANQFNSAIGKIQDSLSSTASALGKLQDVVNQNAQALNTLVKQLSSNFGAISSVLNDILSRLDKVEAEVQIDRLITGRLQSLQTYVTQQLIRAAEIRASANLAATKMSECVLGQSKRVDFCGKGYHLMSFPQSAPHGVVFLHVTYVPAQEKNFTTAPAICHDGKAHFPREGVFVSNGTHWFVTQRNFYEPQIITTDNTFVSGNCDVVIGIVNNTVYDPLQPELDSGGGGSDIIKLLNEQVNKEMQSSNLYMSMSSWCYTHSLDGAGLFLFDHAAEEYEHAKKLIIFLNENNVPVQLTSISAPEHKFEGLTQIFQKAYEHEQHISESINNIVDHAIKSKDHATFNFLQWYVAEQHEEEVLFKDILDKIELIGNENHGLYLADQYVKGIAKSRKS

SEQ ID NO: 8652 - protein, 1315 aa, Artificial Sequence
  SARS-CoV-2/Guangdong/20SF028/2020__EPI_ISL_403936 spike protein (1-1147) Ferritin construct
MFVFLVLLPLVSSQCVNLTTRTQLPPAYTNSFTRGVYYPDKVFRSSVLYSTQDLFLPFFSNVTWFHAIHVSGTNGTKRFDNPVLPFNDGVYFASTEKSNIIRGWIFGTTLDSKTQSLLIVNNATNVVIKVCEFQFCNDPFLGVYYHKNNKSWMESEFRVYSSANNCTFEYVSQPFLMDLEGKQGNFKNLREFVFKNIDGYFKIYSKHTPINLVRDLPQGFSALEPLVDLPIGINITRFQTLLALHRSYLTPGDSSSGWTAGAAAYYVGYLQPRTFLLKYNENGTITDAVDCALDPLSETKCTLKSFTVEKGIYQTSNFRVQPTESIVRFPNITNLCPFGEVFNATRFASVYAWNRKRISNCVADYSVLYNSASFSTFKCYGVSPTKLNDLCFTNVYADSFVIRGDEVRQIAPGQTGKIADYNYKLPDDFTGCVIAWNSNNLDSKVGGNYNYLYRLFRKSNLKPFERDISTEIYQAGSTPCNGVEGFNCYFPLQSYGFQPTNGVGYQPYRVVVLSFELLHAPATVCGPKKSTNLVKNKCVNFNFNGLTGTGVLTESNKKFLPFQQFGRDIADTTDAVRDPQTLEILDITPCSFGGVSVITPGTNTSNQVAVLYQDVNCTEVPVAIHADQLTPTWRVYSTGSNVFQTRAGCLIGAEHVNNSYECDIPIGAGICASYQTQTNSPRRARSVASQSIIAYTMSLGAENSVAYSNNSIAIPTNFTISVTTEILPVSMTKTSVDCTMYICGDSTECSNLLLQYGSFCTQLNRALTGIAVEQDKNTQEVFAQVKQIYKTPPIKDFGGFNFSQILPDPSKPSKRSFIEDLLFNKVTLADAGFIKQYGDCLGDIAARDLICAQKFNGLTVLPPLLTDEMIAQYTSALLAGTITSGWTFGAGAALQIPFAMQMAYRFNGIGVTQNVLYENQKLIANQFNSAIGKIQDSLSSTASALGKLQDVVNQNAQALNTLVKQLSSNFGAISSVLNDILSRLDKVEAEVQIDRLITGRLQSLQTYVTQQLIRAAEIRASANLAATKMSECVLGQSKRVDFCGKGYHLMSFPQSAPHGVVFLHVTYVPAQEKNFTTAPAICHDGKAHFPREGVFVSNGTHWFVTQRNFYEPQIITTDNTFVSGNCDVVIGIVNNTVYDPLQPELDSGGGGSDIIKLLNEQVNKEMQSSNLYMSMSSWCYTHSLDGAGLFLFDHAAEEYEHAKKLIIFLNENNVPVQLTSISAPEHKFEGLTQIFQKAYEHEQHISESINNIVDHAIKSKDHATFNFLQWYVAEQHEEEVLFKDILDKIELIGNENHGLYLADQYVKGIAKSRKS

SEQ ID NO: 8653 - protein, 1315 aa, Artificial Sequence
  SARS-CoV-2/Shenzhen/SZTH-001/2020__EPI_ISL_406592 spike protein (1-1147) Ferritin construct
MFVFLVLLPLVSSQCVNLTTRTQLPPAYTNSFTRGVYYPDKVFRSSVLHSTQDLFLPFFSNVTWFHAIHVSGTNGTKRFDNPVLPFNDGVYFASTEKSNIIRGWIFGTTLDSKTQSLLIVNNATNVVIKVCEFQFCNDPFLGVYYHKNNKSWMESEFRVYSSANNCTFEYVSQPFLMDLEGKQGNFKNLREFVFKNIDGYFKIYSKHTPINLVRDLPQGFSALEPLVDLPIGINITRFQTLLALHRSYLTPGDSSSGWTAGAAAYYVGYLQPRTFLLKYNENGTITDAVDCALDPLSETKCTLKSFTVEKGIYQTSNFRVQPTESIVRFPNITNLCPFGEVFNATRFASVYAWNRKRISNCVADYSVLYNSASFSTFKCYGVSPTKLNDLCFTNVYADSFVIRGDEVRQIAPGQTGKIADYNYKLPDDFTGCVIAWNSNNLDSKVGGNYNYLYRLFRKSNLKPFERDISTEIYQAGSTPCNGVEGFNCYFPLQSYGFQPTNGVGYQPYRVVVLSFELLHAPATVCGPKKSTNLVKNKCVNFNFNGLTGTGVLTESNKKFLPFQQFGRDIADTTDAVRDPQTLEILDITPCSFGGVSVITPGTNTSNQVAVLYQDVNCTEVPVAIHADQLTPTWRVYSTGSNVFQTRAGCLIGAEHVNNSYECDIPIGAGICASYQTQTNSPRRARSVASQSIIAYTMSLGAENSVAYSNNSIAIPTNFTISVTTEILPVSMTKTSVDCTMYICGDSTECSNLLLQYGSFCTQLNRALTGIAVEQDKNTQEVFAQVKQIYKTPPIKDFGGFNFSQILPDPSKPSKRSFIEDLLFNKVTLADAGFIKQYGDCLGDIAARDLICAQKFNGLTVLPPLLTDEMIAQYTSALLAGTITSGWTFGAGAALQIPFAMQMAYRFNGIGVTQNVLYENQKLIANQFNSAIGKIQDSLSSTASALGKLQDVVNQNAQALNTLVKQLSSNFGAISSVLNDILSRLDKVEAEVQIDRLITGRLQSLQTYVTQQLIRAAEIRASANLAATKMSECVLGQSKRVDFCGKGYHLMSFPQSAPHGVVFLHVTYVPAQEKNFTTAPAICHDGKAHFPREGVFVSNGTHWFVTQRNFYEPQIITTDNTFVSGNCDVLIGIVNNTVYDPLQPELDSGGGGSDIIKLLNEQVNKEMQSSNLYMSMSSWCYTHSLDGAGLFLFDHAAEEYEHAKKLIIFLNENNVPVQLTSISAPEHKFEGLTQIFQKAYEHEQHISESINNIVDHAIKSKDHATFNFLQWYVAEQHEEEVLFKDILDKIELIGNENHGLYLADQYVKGIAKSRKS

SEQ ID NO: 8654 - protein, 1315 aa, Artificial Sequence
  SARS-CoV-2/Shenzhen/SZTH-004/2020__EPI_ISL_406595 spike protein (1-1147) Ferritin construct
MFVFLVLLPLVSSQCVNLTTRTQLPPAYTNSFTRGVYYPDKVFRSSVLHSTQDLFLPFFSNVTWFHAIHVSGTNGTKRFDNPVLPFNDGVYFASTEKSNIIRGWIFGTTLDSKTQSLLIVNNATNVVIKVCEFQFCNDPFLGVYYHKNNKSWMESEFRVYSSANNCTFEYVSQPFLMDLEGKQGNFKNLREFVFKNIDGYFKIYSKHTPINLVRDLPQGFSALEPLVDLPIGINITRFQTLLALHRSYLTPGDSSSGWTAGAAAYYVGYLQPRTFLLKYNENGTITDAVDCALDPLSETKCTLKSFTVEKGIYQTSNFRVQPTESIVRFPNITNLCPFGEVFNATRFASVYAWDRKRISNCVAYYSVLYNSASFSTFKCYGVSPTKLNDLCFTNVYADSFVIRGDEVRQIAPGQTGKIADYNYKLPDDFTGCVIAWNSNNLDSKVGGNYNYLYRLFRKSNLKPFERDISTEIYQAGSTPCNGVEGFNCYFPLQSYGFQPTNGVGYQPYRVVVLSFELLHAPATVCGPKKSTNLVKNKCVNFNFNGLTGTGVLTESNKKFLPFQQFGRDIADTTDAVRDPQTLEILDITPCSFGGVSVITPGTNTSNQVAVLYQDVNCTEVPVAIHADQLTPTWRVYSTGSNVFQTRAGCLIGAEHVNNSYECDIPIGAGICASYQTQTNSPRRARSVASQSIIAYTMSLGAENSVAYSNNSIAIPTNFTISVTTEILPVSMTKTSVDCTMYICGDSTECSNLLLQYGSFCTQLNRALTGIAVEQDKNTQEVFAQVKQIYKTPPIKDFGGFNFSQILPDPSKPSKRSFIEDLLFNKVTLADAGFIKQYGDCLGDIAARDLICAQKFNGLTVLPPLLTDEMIAQYTSALLAGTITSGWTFGAGAALQIPFAMQMAYRFNGIGVTQNVLYENQKLIANQFNSAIGKIQDSLSSTASALGKLQDVVNQNAQALNTLVKQLSSNFGAISSVLNDILSRLDKVEAEVQIDRLITGRLQSLQTYVTQQLIRAAEIRASANLAATKMSECVLGQSKRVDFCGKGYHLMSFPQSAPHGVVFLHVTYVPAQEKNFTTAPAICHDGKAHFPREGVFVSNGTHWFVTQRNFYEPQIITTDNTFVSGNCDVVIGIVNNTVYDPLQPELDSGGGGSDIIKLLNEQVNKEMQSSNLYMSMSSWCYTHSLDGAGLFLFDHAAEEYEHAKKLIIFLNENNVPVQLTSISAPEHKFEGLTQIFQKAYEHEQHISESINNIVDHAIKSKDHATFNFLQWYVAEQHEEEVLFKDILDKIELIGNENHGLYLADQYVKGIAKSRKS

SEQ ID NO: 8655 - protein, 1315 aa, Artificial Sequence
  SARS-CoV-2/France/IDF0372/2020__EPI_ISL_406596 spike protein (1-1147) Ferritin construct
MFVFLVLLPLVSSQCVNLTTRTQLPPAYTNSFTRGVYYPDKVFRSSVLHSTQDLFLPFFSNVTWFHAIHVSGTNGTKRFDNPVLPFNDGVYFASTEKSNIIRGWIFGTTLDSKTQSLLIVNNATNVVIKVCEFQFCNDPFLGVYYHKNNKSWMESEFRVYSSANNCTFEYVSQPFLMDLEGKQGNFKNLREFVFKNIDGYFKIYSKHTPINLVRDLPQGFSALEPLVDLPIGINITRFQTLLALHRSYLTPGDSSSGWTAGAAAYYVGYLQPRTFLLKYNENGTITDAVDCALDPLSETKCTLKSFTVEKGIYQTSNFRVQPTESIVRFPNITNLCPFGEVFNATRFASVYAWNRKRISNCVADYSFLYNSASFSTFKCYGVSPTKLNDLCFTNVYADSFVIRGDEVRQIAPGQTGKIADYNYKLPDDFTGCVIAWNSNNLDSKVGGNYNYLYRLFRKSNLKPFERDISTEIYQAGSTPCNGVEGFNCYFPLQSYGFQPTNGVGYQPYRVVVLSFELLHAPATVCGPKKSTNLVKNKCVNFNFNGLTGTGVLTESNKKFLPFQQFGRDIADTTDAVRDPQTLEILDITPCSFGGVSVITPGTNTSNQVAVLYQDVNCTEVPVAIHADQLTPTWRVYSTGSNVFQTRAGCLIGAEHVNNSYECDIPIGAGICASYQTQTNSPRRARSVASQSIIAYTMSLGAENSVAYSNNSIAIPTNFTISVTTEILPVSMTKTSVDCTMYICGDSTECSNLLLQYGSFCTQLNRALTGIAVEQDKNTQEVFAQVKQIYKTPPIKDFGGFNFSQILPDPSKPSKRSFIEDLLFNKVTLADAGFIKQYGDCLGDIAARDLICAQKFNGLTVLPPLLTDEMIAQYTSALLAGTITSGWTFGAGAALQIPFAMQMAYRFNGIGVTQNVLYENQKLIANQFNSAIGKIQDSLSSTASALGKLQDVVNQNAQALNTLVKQLSSNFGAISSVLNDILSRLDKVEAEVQIDRLITGRLQSLQTYVTQQLIRAAEIRASANLAATKMSECVLGQSKRVDFCGKGYHLMSFPQSAPHGVVFLHVTYVPAQEKNFTTAPAICHDGKAHFPREGVFVSNGTHWFVTQRNFYEPQIITTDNTFVSGNCDVVIGIVNNTVYDPLQPELDSGGGGSDIIKLLNEQVNKEMQSSNLYMSMSSWCYTHSLDGAGLFLFDHAAEEYEHAKKLIIFLNENNVPVQLTSISAPEHKFEGLTQIFQKAYEHEQHISESINNIVDHAIKSKDHATFNFLQWYVAEQHEEEVLFKDILDKIELIGNENHGLYLADQYVKGIAKSRKS

SEQ ID NO: 8656 - protein, 1315 aa, Artificial Sequence
  SARS-CoV-2/Australia/VIC01/2020__EPI_ISL_406844 spike protein (1-1147) Ferritin construct
MFVFLVLLPLVSSQCVNLTTRTQLPPAYTNSFTRGVYYPDKVFRSSVLHSTQDLFLPFFSNVTWFHAIHVSGTNGTKRFDNPVLPFNDGVYFASTEKSNIIRGWIFGTTLDSKTQSLLIVNNATNVVIKVCEFQFCNDPFLGVYYHKNNKSWMESEFRVYSSANNCTFEYVSQPFLMDLEGKQGNFKNLREFVFKNIDGYFKIYSKHTPINLVRDLPQGFSALEPLVDLPIGINITRFQTLLALHRRYLTPGDSSSGWTAGAAAYYVGYLQPRTFLLKYNENGTITDAVDCALDPLSETKCTLKSFTVEKGIYQTSNFRVQPTESIVRFPNITNLCPFGEVFNATRFASVYAWNRKRISNCVADYSVLYNSASFSTFKCYGVSPTKLNDLCFTNVYADSFVIRGDEVRQIAPGQTGKIADYNYKLPDDFTGCVIAWNSNNLDSKVGGNYNYLYRLFRKSNLKPFERDISTEIYQAGSTPCNGVEGFNCYFPLQSYGFQPTNGVGYQPYRVVVLSFELLHAPATVCGPKKSTNLVKNKCVNFNFNGLTGTGVLTESNKKFLPFQQFGRDIADTTDAVRDPQTLEILDITPCSFGGVSVITPGTNTSNQVAVLYQDVNCTEVPVAIHADQLTPTWRVYSTGSNVFQTRAGCLIGAEHVNNSYECDIPIGAGICASYQTQTNSPRRARSVASQSIIAYTMSLGAENSVAYSNNSIAIPTNFTISVTTEILPVSMTKTSVDCTMYICGDSTECSNLLLQYGSFCTQLNRALTGIAVEQDKNTQEVFAQVKQIYKTPPIKDFGGFNFSQILPDPSKPSKRSFIEDLLFNKVTLADAGFIKQYGDCLGDIAARDLICAQKFNGLTVLPPLLTDEMIAQYTSALLAGTITSGWTFGAGAALQIPFAMQMAYRFNGIGVTQNVLYENQKLIANQFNSAIGKIQDSLSSTASALGKLQDVVNQNAQALNTLVKQLSSNFGAISSVLNDILSRLDKVEAEVQIDRLITGRLQSLQTYVTQQLIRAAEIRASANLAATKMSECVLGQSKRVDFCGKGYHLMSFPQSAPHGVVFLHVTYVPAQEKNFTTAPAICHDGKAHFPREGVFVSNGTHWFVTQRNFYEPQIITTDNTFVSGNCDVVIGIVNNTVYDPLQPELDSGGGGSDIIKLLNEQVNKEMQSSNLYMSMSSWCYTHSLDGAGLFLFDHAAEEYEHAKKLIIFLNENNVPVQLTSISAPEHKFEGLTQIFQKAYEHEQHISESINNIVDHAIKSKDHATFNFLQWYVAEQHEEEVLFKDILDKIELIGNENHGLYLADQYVKGIAKSRKS

SEQ ID NO: 8657 - protein, 1315 aa, Artificial Sequence
  SARS-CoV-2/Germany/BavPat1/2020__EPI_ISL_406862 spike protein (1-1147) Ferritin construct
MFVFLVLLPLVSSQCVNLTTRTQLPPAYTNSFTRGVYYPDKVFRSSVLHSTQDLFLPFFSNVTWFHAIHVSGTNGTKRFDNPVLPFNDGVYFASTEKSNIIRGWIFGTTLDSKTQSLLIVNNATNVVIKVCEFQFCNDPFLGVYYHKNNKSWMESEFRVYSSANNCTFEYVSQPFLMDLEGKQGNFKNLREFVFKNIDGYFKIYSKHTPINLVRDLPQGFSALEPLVDLPIGINITRFQTLLALHRSYLTPGDSSSGWTAGAAAYYVGYLQPRTFLLKYNENGTITDAVDCALDPLSETKCTLKSFTVEKGIYQTSNFRVQPTESIVRFPNITNLCPFGEVFNATRFASVYAWNRKRISNCVADYSVLYNSASFSTFKCYGVSPTKLNDLCFTNVYADSFVIRGDEVRQIAPGQTGKIADYNYKLPDDFTGCVIAWNSNNLDSKVGGNYNYLYRLFRKSNLKPFERDISTEIYQAGSTPCNGVEGFNCYFPLQSYGFQPTNGVGYQPYRVVVLSFELLHAPATVCGPKKSTNLVKNKCVNFNFNGLTGTGVLTESNKKFLPFQQFGRDIADTTDAVRDPQTLEILDITPCSFGGVSVITPGTNTSNQVAVLYQGVNCTEVPVAIHADQLTPTWRVYSTGSNVFQTRAGCLIGAEHVNNSYECDIPIGAGICASYQTQTNSPRRARSVASQSIIAYTMSLGAENSVAYSNNSIAIPTNFTISVTTEILPVSMTKTSVDCTMYICGDSTECSNLLLQYGSFCTQLNRALTGIAVEQDKNTQEVFAQVKQIYKTPPIKDFGGFNFSQILPDPSKPSKRSFIEDLLFNKVTLADAGFIKQYGDCLGDIAARDLICAQKFNGLTVLPPLLTDEMIAQYTSALLAGTITSGWTFGAGAALQIPFAMQMAYRFNGIGVTQNVLYENQKLIANQFNSAIGKIQDSLSSTASALGKLQDVVNQNAQALNTLVKQLSSNFGAISSVLNDILSRLDKVEAEVQIDRLITGRLQSLQTYVTQQLIRAAEIRASANLAATKMSECVLGQSKRVDFCGKGYHLMSFPQSAPHGVVFLHVTYVPAQEKNFTTAPAICHDGKAHFPREGVFVSNGTHWFVTQRNFYEPQIITTDNTFVSGNCDVVIGIVNNTVYDPLQPELDSGGGGSDIIKLLNEQVNKEMQSSNLYMSMSSWCYTHSLDGAGLFLFDHAAEEYEHAKKLIIFLNENNVPVQLTSISAPEHKFEGLTQIFQKAYEHEQHISESINNIVDHAIKSKDHATFNFLQWYVAEQHEEEVLFKDILDKIELIGNENHGLYLADQYVKGIAKSRKS

SEQ ID NO: 8658 - protein, 1315 aa, Artificial Sequence
  SARS-CoV-2/Wuhan/HBCDC-HB-02/2020__EPI_ISL_412978 spike protein (1-1147) Ferritin construct
MFVFLVLLPLVSSQCVNLTTRTQLPPAYTNSFTRGVYYPDKVFRSSVLHSTQDLFLPFFSNVTWFHAIHVSGTNGTKRFDNPVLPFNDGVYFASTEKSNIIRGWIFGTTLDSKTQSLLIVNNATNVVIKVCEFQFCNDPFLGVYYHKNNKSWMESEFRVYSSANNCTFEYVSQPFLMDLEGKQGNFKNLREFVFKNIDGYFKIYSKHTPINLVRDLPQGFSALEPLVDLPIGINITRFQTLLALHRSYLTPGDSSSGWTAGAAAYYVGYLQPRTFLLKYNENGTITDAVDCALDPLSETKCTLKSFTVEKGIYQTSNFRVQPTESIVRFPNITNLCPFGEVFNATRFASVYAWNRKRISNCVADYSVLYNSASFSTFKCYGVSPTKLNDLCFTNVYADSFVIRGDEVRQIAPGQTGKIADYNYKLPDDFTGCVIAWNSNNLDSKVGGNYNYLYRLFRKSNLKPFERDISTEIYQAGSTPCNGVEGFNCYFPLQSYGFQPTNGVGYQPYRVVVLSFELLHAPATVCGPKKSTNLVKNKCVNFNFNGLTGTGVLTESNKKFLPFQQFGRDIADTTDAVRDPQTLEILDITPCSFGGVSVITPGTNTSNQVAVLYQDVNCTEVPVAIHADQLTPTWRVYSTGSNVFQTRAGCLIGAEHVNNSYECDIPIGAGICASYQTQTNSPRRARSVASQSIIAYTMSLGAENSVAYSNNSIAIPTNFTISVTTEILPVSMTKTSVDCTMYICGDSTECSNFLLQYGSFCTQLNRALTGIAVEQDKNTQEVFAQVKQIYKTPPIKDFGGFNFSQILPDPSKPSKRSFIEDLLFNKVTLADAGFIKQYGDCLGDIAARDLICAQKFNGLTVLPPLLTDEMIAQYTSALLAGTITSGWTFGAGAALQIPFAMQMAYRFNGIGVTQNVLYENQKLIANQFNSAIGKIQDSLSSTASALGKLQDVVNQNAQALNTLVKQLSSNFGAISSVLNDILSRLDKVEAEVQIDRLITGRLQSLQTYVTQQLIRAAEIRASANLAATKMSECVLGQSKRVDFCGKGYHLMSFPQSAPHGVVFLHVTYVPAQEKNFTTAPAICHDGKAHFPREGVFVSNGTHWFVTQRNFYEPQIITTDNTFVSGNCDVVIGIVNNTVYDPLQPELDSGGGGSDIIKLLNEQVNKEMQSSNLYMSMSSWCYTHSLDGAGLFLFDHAAEEYEHAKKLIIFLNENNVPVQLTSISAPEHKFEGLTQIFQKAYEHEQHISESINNIVDHAIKSKDHATFNFLQWYVAEQHEEEVLFKDILDKIELIGNENHGLYLADQYVKGIAKSRKS

SEQ ID NO: 8659 - protein, 1315 aa, Artificial Sequence
  SARS-CoV-2/Australia/QLD02/2020__EPI_ISL_407896 spike protein (1-1147) Ferritin construct
MFVFLVLLPLVSSQCVNLTTRTQLPPAYTNSFTRGVYYPDKVFRSSVLHSTQDLFLPFFSNVTWFHAIHVSGTNGTKRFDNPVLPFNDGVYFASTEKSNIIRGWIFGTTLDSKTQSLLIVNNATNVVIKVCEFQFCNDPFLGVYYHKNNKSWMESEFRVYSSANNCTFEYVSQPFLMDLEGKQGNFKNLREFVFKNIDGYFKIYSKHTPINLVRDLPQGFSALEPLVDLPIGINITRFQTLLALHRSYLTPGDSSSGWTAGAAAYYVGYLQPRTFLLKYNENGTITDAVDCALDPLSETKCTLKSFTVEKGIYQTSNFRVQPTESIVRFPNITNLCPFGEVFNATRFASVYAWNRKRISNCVADYSVLYNSASFSTFKCYGVSPTKLNDLCFTNVYADSFVIRGDEVRQIAPGQTGKIADYNYKLPDDFTGCVIAWNSNNLDSKVGGNYNYLYRLFRKSNLKPFERDISTEIYQAGSTPCNGVEGFNCYFPLQSYGFQPTNGVGYQPYRVVVLSFELLHAPATVCGPKKSTNLVKNKCVNFNFNGLTGTGVLTESNKKFLPFQQFGRDIADTTDAVRDPQTLEILDITPCSFGGVSVITPGTNTSNQVAVLYQDVNCTEVPVAIHADQLTPTWRVYSTGSNVFQTRAGCLIGAEHVNNSYECDIPIGAGICASYQTQTNSPRRARSVASQSIIAYTMSLGAENSVAYSNNSIAIPTNFTISVTTEILPVSMTKTSVDCTMYICGDSTECSNLLLQYGSFCTQLNRALTGIAVEQDKNTQEVFAQVKQIYKTPPIKDFGGFNFSQILPDPSKPSKRSFIEDLLFNKVTLADAGFIKQYGDCLGDIAARDLICAQKFNGLTVLPPLLTDEMIAQYTSALLAGTITSGWTFGAGAALQIPFAMQMAYRFNGIGVTQNVLYENQKLIANQFNSAIGKIQDSLSSTASALGKLQDVVNQNAQALNTLVKQLSSNFGAISSVLNDILSRLDKVEAEVQIDRLITGRLQSLQTYVTQQLIRAAEIRASANLAATKMSECVLGQSKRVDFCGKGYHLMSFPQSAPHGVVFLHVTYVPAQEKNFTTAPAICHDGKAHFPREGVFVSNGTHWFVTQRNFYEPQIITTDNTFVSGNCDVVIGIVNNTVYDPLQLELDSGGGGSDIIKLLNEQVNKEMQSSNLYMSMSSWCYTHSLDGAGLFLFDHAAEEYEHAKKLIIFLNENNVPVQLTSISAPEHKFEGLTQIFQKAYEHEQHISESINNIVDHAIKSKDHATFNFLQWYVAEQHEEEVLFKDILDKIELIGNENHGLYLADQYVKGIAKSRKS

SEQ ID NO: 8660 - protein, 1315 aa, Artificial Sequence
  SARS-CoV-2/India/1-31/2020__EPI_ISL_413523 spike protein (1-1147) Ferritin construct
MFVFLVLLPLVSSQCVNLTTRTQLPPAYTNSFTRGVYYPDKVFRSSVLHSTQDLFLPFFSNVTWFHAIHVSGTNGTKRFDNPVLPFNDGVYFASTEKSNIIRGWIFGTTLDSKTQSLLIVNNATNVVIKVCEFQFCNDPFLGVYYHKNNKSWMESEFRVYSSANNCTFEYVSQPFLMDLEGKQGNFKNLREFVFKNIDGYFKIYSKHTPINLVRDLPQGFSALEPLVDLPIGINITRFQTLLALHRSYLTPGDSSSGWTAGAAAYYVGYLQPRTFLLKYNENGTITDAVDCALDPLSETKCTLKSFTVEKGIYQTSNFRVQPTESIVRFPNITNLCPFGEVFNATRFASVYAWNRKRISNCVADYSVLYNSASFSTFKCYGVSPTKLNDLCFTNVYADSFVIRGDEVRQIAPGQTGKIADYNYKLPDDFTGCVIAWNSNNLDSKVGGNYNYLYRLFRKSNLKPFERDISTEIYQAGSTPCNGVEGFNCYFPLQSYGFQPTNGVGYQPYRVVVLSFELLHAPATVCGPKKSTNLVKNKCVNFNFNGLTGTGVLTESNKKFLPFQQFGRDIADTTDAVRDPQTLEILDITPCSFGGVSVITPGTNTSNQVAVLYQDVNCTEVPVAIHADQLTPTWRVYSTGSNVFQTRAGCLIGAEHVNNSYECDIPIGAGICASYQTQTNSPRRARSVASQSIIAYTMSLGAENSVAYSNNSIAIPTNFTISVTTEILPVSMTKTSVDCTMYICGDSTECSNLLLQYGSFCTQLNRALTGIAVEQDKNTQEVFAQVKQIYKTPPIKDFGGFNFSQILPDPSKPSKRSFIEDLLFNKVTLADAGFIKQYGDCLGDIAARDLICAQKFNGLTVLPPLLTDEMIAQYTSALLAGTITSGWTFGAGAALQIPFAMQMAYRFNGIGVTQNVLYENQKLIANQFNSVIGKIQDSLSSTASALGKLQDVVNQNAQALNTLVKQLSSNFGAISSVLNDILSRLDKVEAEVQIDRLITGRLQSLQTYVTQQLIRAAEIRASANLAATKMSECVLGQSKRVDFCGKGYHLMSFPQSAPHGVVFLHVTYVPAQEKNFTTAPAICHDGKAHFPREGVFVSNGTHWFVTQRNFYEPQIITTDNTFVSGNCDVVIGIVNNTVYDPLQPELDSGGGGSDIIKLLNEQVNKEMQSSNLYMSMSSWCYTHSLDGAGLFLFDHAAEEYEHAKKLIIFLNENNVPVQLTSISAPEHKFEGLTQIFQKAYEHEQHISESINNIVDHAIKSKDHATFNFLQWYVAEQHEEEVLFKDILDKIELIGNENHGLYLADQYVKGIAKSRKS

SEQ ID NO: 8661 - protein, 1315 aa, Artificial Sequence
  SARS-CoV-2/Guangdong/GD2020087-P0008/2020__EPI_ISL_413863 spike protein (1-1147) Ferritin construct
MFVFLVLLPLVSSQCVNLTTRTQLPPAYTNSFTRGVYYPDKVFRSSVLHSTQDLFLPFFSNVTWFHAIHVSGTNGTKRFDNPVLPFNDGVYFASTEKSNIIRGWIFGTTLDSKTQSLLIVNNATNVVIKVCEFQFCNDPFLGVYYHKNNKSWMESEFRVYSSANNCTFEYVSQPFLMDLEGKQGNFKNLREFVFKNIDGYFKIYSKHTPINLVRDLPQGFSALEPLVDLPIGINITRFQTLLALHRSYLTPGDSSSGWTAGAAAYYVGYLQPRTFLLKYNENGTITDAVDCALDPLSETKCTLKSFTVEKGIYQTSNFRVQPTESIVRFPNITNLCPFGEVFNATRFASVYAWNRKRISNCVADYSVLYNSASFSTFKCYGVSPTKLNDLCFTNVYADSFVIRGDEVREIAPGQTGKIADYNYKLPDDFTGCVIAWNSNNLDSKVGGNYNYLYRLFRKSNLKPFERDISTEIYQAGSTPCNGVEGFNCYFPLQSYGFQPTNGVGYQPYRVVVLSFELLHAPATVCGPKKSTNLVKNKCVNFNFNGLTGTGVLTESNKKFLPFQQFGRDIADTTDAVRDPQTLEILDITPCSFGGVSVITPGTNTSNQVAVLYQDVNCTEVPVAIHADQLTPTWRVYSTGSNVFQTRAGCLIGAEHVNNSYECDIPIGAGICASYQTQTNSPRRARSVASQSIIAYTMSLGAENSVAYSNNSIAIPTNFTISVTTEILPVSMTKTSVDCTMYICGDSTECSNLLLQYGSFCTQLNRALTGIAVEQDKNTQEVFAQVKQIYKTPPIKDFGGFNFSQILPDPSKPSKRSFIEDLLFNKVTLADAGFIKQYGDCLGDIAARDLICAQKFNGLTVLPPLLTDEMIAQYTSALLAGTITSGWTFGAGAALQIPFAMQMAYRFNGIGVTQNVLYENQKLIANQFNSAIGKIQDSLSSTASALGKLQDVVNQNAQALNTLVKQLSSNFGAISSVLNDILSRLDKVEAEVQIDRLITGRLQSLQTYVTQQLIRAAEIRASANLAATKMSECVLGQSKRVDFCGKGYHLMSFPQSAPHGVVFLHVTYVPAQEKNFTTAPAICHDGKAHFPREGVFVSNGTHWFVTQRNFYEPQIITTDNTFVSGNCDVVIGIVNNTVYDPLQPELDSGGGGSDIIKLLNEQVNKEMQSSNLYMSMSSWCYTHSLDGAGLFLFDHAAEEYEHAKKLIIFLNENNVPVQLTSISAPEHKFEGLTQIFQKAYEHEQHISESINNIVDHAIKSKDHATFNFLQWYVAEQHEEEVLFKDILDKIELIGNENHGLYLADQYVKGIAKSRKS

SEQ ID NO: 8662 - protein, 1315 aa, Artificial Sequence
  SARS-CoV-2/Sweden/01/2020__EPI_ISL_411951 spike protein (1-1147) Ferritin construct
MFVFLVLLPLVSSQCVNLTTRTQLPPAYTNSFTRGVYYPDKVFRSSVLHSTQDLFLPFFSNVTWFHAIHVSGTNGTKRFDNPVLPFNDGVYFASTEKSNIIRGWIFGTTLDSKTQSLLIVNNATNVVIKVCEFQFCNDPFLGVYYHKNNKSWMESEFRVYSSANNCTFEYVSQPFLMDLEGKQGNFKNLREFVFKNIDGYFKIYSKHTPINLVRDLPQGFSALEPLVDLPIGINITRFQTLLALHRSYLTPGDSSSGWTAGAAAYYVGYLQPRTFLLKYNENGTITDAVDCALDPLSETKCTLKSFTVEKGIYQTSNFRVQPTESIVRFPNITNLCPFGEVFNATRFASVYAWNRKRISNCVADYSVLYNSASFSTFKCYGVSPTKLNDLCFTNVYADSFVIRGDEVRQIAPGQTGKIADYNYKLPDDFTGCVIAWNSNNLDSKVGGNYNYLYRLFRKSNLKPFERDISTEIYQAGSTPCNGVEGFNCYFPLQSYGFQPTNGVGYQPYRVVVLSFELLHAPATVCGPKKSTNLVKNKCVNFNFNGLTGTGVLTESNKKFLPFQQFGRDIADTTDAVRDPQTLEILDITPCSFGGVSVITPGTNTSNQVAVLYQDVNCTEVPVAIHADQLTPTWRVYSTGSNVFQTRAGCLIGAEHVNNSYECDIPIGAGICASYQTQTNSPRRARSVASQSIIAYTMSLGAENSVAYSNNSIAIPTNFTISVTTEILPVSMTKTSVDCTMYICGDSTECSNLLLQYGSFCTQLNRALTGIAVEQDKNTQEVFAQVKQIYKTPPIKDCGGFNFSQILPDPSKPSKRSFIEDLLFNKVTLADAGFIKQYGDCLGDIAARDLICAQKFNGLTVLPPLLTDEMIAQYTSALLAGTITSGWTFGAGAALQIPFAMQMAYRFNGIGVTQNVLYENQKLIANQFNSAIGKIQDSLSSTASALGKLQDVVNQNAQALNTLVKQLSSNFGAISSVLNDILSRLDKVEAEVQIDRLITGRLQSLQTYVTQQLIRAAEIRASANLAATKMSECVLGQSKRVDFCGKGYHLMSFPQSAPHGVVFLHVTYVPAQEKNFTTAPAICHDGKAHFPREGVFVSNGTHWFVTQRNFYEPQIITTDNTFVSGNCDVVIGIVNNTVYDPLQPELDSGGGGSDIIKLLNEQVNKEMQSSNLYMSMSSWCYTHSLDGAGLFLFDHAAEEYEHAKKLIIFLNENNVPVQLTSISAPEHKFEGLTQIFQKAYEHEQHISESINNIVDHAIKSKDHATFNFLQWYVAEQHEEEVLFKDILDKIELIGNENHGLYLADQYVKGIAKSRKS

SEQ ID NO: 8663 - protein, 1315 aa, Artificial Sequence
  SARS-CoV-2/Tianmen/HBCDC-HB-07/2020__EPI_ISL_412983 spike protein (1-1147) Ferritin construct
MFVFLVLLPLVSSQCVNLTTRTQLPPAYTNSFTRGVYYPDKVFRSSVLHSTQDLFLPFFSNVTWFHAIHVSGTNGTKRFDNPVLPFNDGVYFASTEKSNIIRGWIFGTTLDSKTQSLLIVNNATNVVIKVCEFQFCNDPFLGVYYHKNNKSWMESEFRVYSSANNCTFEYVSQPFLMDLEGKQGNFKNLREFVFKNIDGYFKIYSKHTPINLVRDLPQGFSALEPLVDLPIGINITRFQTLLALHRSYLTPGDSSSGWTAGAAAYYVGYLQPRTFLLKYNENGTITDAVDCALDPLSETKCTLKSFTVEKGIYQTSNFRVQPTESIVRFPNITNLCPFGEVFNATRFASVYAWNRKRISNCVADYSVLYNSASFSTFKCYGVSPTKLNDLCFTNVYADSFVIRGDEVRQIAPGQTGKIADYNYKLPDDFTGCVIAWNSNNLDSKVGGNYNYLYRLFRKSNLKPFERDISTEIYQAGSTPCNGVEGFNCYFPLQSYGFQPTNGVGYQPYRVVVLSFELLHAPATVCGPKKSTNLVKNKCVNFNFNGLTGTGVLTESNKKFLPFQQFGRDIADTTDAVRDPQTLEILDITPCSFGGVSVITPGTNTSNQVAVLYQDLNCTEVPVAIHADQLTPTWRVYSTGSNVFQTRAGCLIGAEHVNNSYECDIPIGAGICASYQTQTNSPRRARSVASQSIIAYTMSLGAENSVAYSNNSIAIPTNFTISVTTEILPVSMTKTSVDCTMYICGDSTECSNLLLQYGSFCTQLNRALTGIAVEQDKNTQEVFAQVKQIYKTPPIKDFGGFNFSQILPDPSKPSKRSFIEDLLFNKVTLADAGFIKQYGDCLGDIAARDLICAQKFNGLTVLPPLLTDEMIAQYTSALLAGTITSGWTFGAGAALQIPFAMQMAYRFNGIGVTQNVLYENQKLIANQFNSAIGKIQDSLSSTASALGKLQDVVNQNAQALNTLVKQLSSNFGAISSVLNDILSRLDKVEAEVQIDRLITGRLQSLQTYVTQQLIRAAEIRASANLAATKMSECVLGQSKRVDFCGKGYHLMSFPQSAPHGVVFLHVTYVPAQEKNFTTAPAICHDGKAHFPREGVFVSNGTHWFVTQRNFYEPQIITTDNTFVSGNCDVVIGIVNNTVYDPLQPELDSGGGGSDIIKLLNEQVNKEMQSSNLYMSMSSWCYTHSLDGAGLFLFDHAAEEYEHAKKLIIFLNENNVPVQLTSISAPEHKFEGLTQIFQKAYEHEQHISESINNIVDHAIKSKDHATFNFLQWYVAEQHEEEVLFKDILDKIELIGNENHGLYLADQYVKGIAKSRKS

SEQ ID NO: 8664 - protein, 1315 aa, Artificial Sequence
  SARS-CoV-2/Hong Kong/case42_VM20002493/2020__EPI_ISL_414527 spike protein (1-1147) Ferritin construct
MFVFLVLLPLVSSQCVNLTTRTQLPPAYTNSFTRGVYYPDKVFRSSVLHSTQDLFLPFFSNVTWFHAIHVSGTNGTKRFDNPVLPFNDGVYFASTEKSNIIRGWIFGTTLDSKTQSLLIVNNATNVVIKVCEFQFCNDPFLGVYYHKNNKSWMESEFRVYSSANNCTFEYVSQPFLMDLEGKQGNFKNLREFVFKNIDGYFKIYSKHTPINLVRDLPQGFSALEPLVDLPIGINITRFQTLLALHRSYLTPGDSSSGWTAGAAAYYVGYLQPRTFLLKYNENGTITDAVDCALDPLSETKCTLKSFTVEKGIYQTSNFRVQPTESIVRFPNITNLCPFGEVFNATRFASVYAWNRKRISNCVADYSVLYNSASFSTFKCYGVSPTKLNDLCFTNVYADSFVIRGDEVRQIAPGQTGKIADYNYKLPDDFTGCVIAWNSNNLDSKVGGNYNYLYRLFRKSNLKPFERDISTEIYQAGSTPCNGVEGFNCYFPLQSYGFQPTNGVGYQPYRVVVLSFELLHAPATVCGPKKSTNLVKNKCVNFNFNGLTGTGVLTESNKKFLPFQQFGRDIADTTDAVRDPQTLEILDITPCSFGGVSVITPGTNTSNQVAVLYQDVNCTEVPVAIHADQLTPTWRVYSTGSNVFQTRAGCLIGAEHVNNSYECDIPIGAGICASYQTQTNSPRRARSVASQSIIAYTMSLGAENSVAYSNNSIAIPTNFAISVTTEILPVSMTKTSVDCTMYICGDSTECSNLLLQYGSFCTQLNRALTGIAVEQDKNTQEVFAQVKQIYKTPPIKDFGGFNFSQILPDPSKPSKRSFIEDLLFNKVTLADAGFIKQYGDCLGDIAARDLICAQKFNGLTVLPPLLTDEMIAQYTSALLAGTITSGWTFGAGAALQIPFAMQMAYRFNGIGVTQNVLYENQKLIANQFNSAIGKIQDSLSSTASALGKLQDVVNQNAQALNTLVKQLSSNFGAISSVLNDILSRLDKVEAEVQIDRLITGRLQSLQTYVTQQLIRAAEIRASANLAATKMSECVLGQSKRVDFCGKGYHLMSFPQSAPHGVVFLHVTYVPAQEKNFTTAPAICHDGKAHFPREGVFVSNGTHWFVTQRNFYEPQIITTDNTFVSGNCDVVIGIVNNTVYDPLQPELDSGGGGSDIIKLLNEQVNKEMQSSNLYMSMSSWCYTHSLDGAGLFLFDHAAEEYEHAKKLIIFLNENNVPVQLTSISAPEHKFEGLTQIFQKAYEHEQHISESINNIVDHAIKSKDHATFNFLQWYVAEQHEEEVLFKDILDKIELIGNENHGLYLADQYVKGIAKSRKS

SEQ ID NO: 8665 - protein, 1315 aa, Artificial Sequence
  SARS-CoV-2/USA/CruiseA-23/2020__EPI_ISL_414482 spike protein (1-1147) Ferritin construct
MFVFLVLLPLVSSQCVNLTTRTQLPPAYTNSFTRGVYYPDKVFRSSVLHSTQDLFLPFFSNVTWFHAIHVSGTNGTKRFDNPVLPFNDGVYFASTEKSNIIRGWIFGTTLDSKTQSLLIVNNATNVVIKVCEFQFCNDPFLGVYYHKNNKSWMESEFRVYSSANNCTFEYVSQPFLMDLEVKQGNFKNLREFVFKNIDGYFKIYSKHTPINLVRDLPQGFSALEPLVDLPIGINITRFQTLLALHRSYLTPGDSSSGWTAGAAAYYVGYLQPRTFLLKYNENGTITDAVDCALDPLSETKCTLKSFTVEKGIYQTSNFRVQPTESIVRFPNITNLCPFGEVFNATRFASVYAWNRKRISNCVADYSVLYNSASFSTFKCYGVSPTKLNDLCFTNVYADSFVIRGDEVRQIAPGQTGKIADYNYKLPDDFTGCVIAWNSNNLDSKVGGNYNYLYRLFRKSNLKPFERDISTEIYQAGSTPCNGVEGFNCYFPLQSYGFQPTNGVGYQPYRVVVLSFELLHAPATVCGPKKSTNLVKNKCVNFNFNGLTGTGVLTESNKKFLPFQQFGRDIADTTDAVRDPQTLEILDITPCSFGGVSVITPGTNTSNQVAVLYQDVNCTEVPVAIHADQLTPTWRVYSTGSNVFQTRAGCLIGAEHVNNSYECDIPIGAGICASYQTQTNSPRRARSVASQSIIAYTMSLGAENSVAYSNNSIAIPTNFTISVTTEILPVSMTKTSVDCTMYICGDSTECSNLLLQYGSFCTQLNRALTGIAVEQDKNTQEVFAQVKQIYKTPPIKDFGGFNFSQILPDPSKPSKRSFIEDLLFNKVTLADAGFIKQYGDCLGDIAARDLICAQKFNGLTVLPPLLTDEMIAQYTSALLAGTITSGWTFGAGAALQIPFAMQMAYRFNGIGVTQNVLYENQKLIANQFNSAIGKIQDSLSSTASALGKLQDVVNQNAQALNTLVKQLSSNFGAISSVLNDILSRLDKVEAEVQIDRLITGRLQSLQTYVTQQLIRAAEIRASANLAATKMSECVLGQSKRVDFCGKGYHLMSFPQSAPHGVVFLHVTYVPAQEKNFTTAPAICHDGKAHFPREGVFVSNGTHWFVTQRNFYEPQIITTDNTFVSGNCDVVIGIVNNTVYDPLQPELDSGGGGSDIIKLLNEQVNKEMQSSNLYMSMSSWCYTHSLDGAGLFLFDHAAEEYEHAKKLIIFLNENNVPVQLTSISAPEHKFEGLTQIFQKAYEHEQHISESINNIVDHAIKSKDHATFNFLQWYVAEQHEEEVLFKDILDKIELIGNENHGLYLADQYVKGIAKSRKS

SEQ ID NO: 8666 - protein, 1315 aa, Artificial Sequence
  SARS-CoV-2/Hong Kong/case85_VM20002868/2020__EPI_ISL_414519 spike protein (1-1147) Ferritin construct
MFVFLVLVPLVSSQCVNLTTRTQLPPAYTNSFTRGVYYPDKVFRSSVLHSTQDLFLPFFSNVTWFHAIHVSGTNGTKRFDNPVLPFNDGVYFASTEKSNIIRGWIFGTTLDSKTQSLLIVNNATNVVIKVCEFQFCNDPFLGVYYHKNNKSWMESEFRVYSSANNCTFEYVSQPFLMDLEGKQGNFKNLREFVFKNIDGYFKIYSKHTPINLVRDLPQGFSALEPLVDLPIGINITRFQTLLALHRSYLTPGDSSSGWTAGAAAYYVGYLQPRTFLLKYNENGTITDAVDCALDPLSETKCTLKSFTVEKGIYQTSNFRVQPTESIVRFPNITNLCPFGEVFNATRFASVYAWNRKRISNCVADYSVLYNSASFSTFKCYGVSPTKLNDLCFTNVYADSFVIRGDEVRQIAPGQTGKIADYNYKLPDDFTGCVIAWNSNNLDSKVGGNYNYLYRLFRKSNLKPFERDISTEIYQAGSTPCNGVEGFNCYFPLQSYGFQPTNGVGYQPYRVVVLSFELLHAPATVCGPKKSTNLVKNKCVNFNFNGLTGTGVLTESNKKFLPFQQFGRDIADTTDAVRDPQTLEILDITPCSFGGVSVITPGTNTSNQVAVLYQDVNCTEVPVAIHADQLTPTWRVYSTGSNVFQTRAGCLIGAEHVNNSYECDIPIGAGICASYQTQTNSPRRARSVASQSIIAYTMSLGAENSVAYSNNSIAIPTNFTISVTTEILPVSMTKTSVDCTMYICGDSTECSNLLLQYGSFCTQLNRALTGIAVEQDKNTQEVFAQVKQIYKTPPIKDFGGFNFSQILPDPSKPSKRSFIEDLLFNKVTLADAGFIKQYGDCLGDIAARDLICAQKFNGLTVLPPLLTDEMIAQYTSALLAGTITSGWTFGAGAALQIPFAMQMAYRFNGIGVTQNVLYENQKLIANQFNSAIGKIQDSLSSTASALGKLQDVVNQNAQALNTLVKQLSSNFGAISSVLNDILSRLDKVEAEVQIDRLITGRLQSLQTYVTQQLIRAAEIRASANLAATKMSECVLGQSKRVDFCGKGYHLMSFPQSAPHGVVFLHVTYVPAQEKNFTTAPAICHDGKAHFPREGVFVSNGTHWFVTQRNFYEPQIITTDNTFVSGNCDVVIGIVNNTVYDPLQPELDSGGGGSDIIKLLNEQVNKEMQSSNLYMSMSSWCYTHSLDGAGLFLFDHAAEEYEHAKKLIIFLNENNVPVQLTSISAPEHKFEGLTQIFQKAYEHEQHISESINNIVDHAIKSKDHATFNFLQWYVAEQHEEEVLFKDILDKIELIGNENHGLYLADQYVKGIAKSRKS

SEQ ID NO: 8667 - protein, 1315 aa, Artificial Sequence; identical to SEQ ID NO: 8657
  SARS-CoV-2/England/200990660/2020__EPI_ISL_414523 spike protein (1-1147) Ferritin construct

SEQ ID NO: 8668 - protein, 1315 aa, Artificial Sequence
  SARS-CoV-2/Australia/NSW09/2020__EPI_ISL_413595 spike protein (1-1147) Ferritin construct
MFVFLVLLPLVSSQCVNLTTRTQLPPAYTNSFTRGVYYPDKVFRSSVLHSTQDLFLPFFSNVTWFHAIHVSGTNGTKRFDNPVLPFNDGVYFASTEKSNIIRGWIFGTTLDSKTQSLLIVNNATNVVIKVCEFQFCNDPFLGVYYHKNNKSWMESEFRVYSSANNCTFEYVSQPFLMDLEGKQGNFKNLREFVFKNIDGYFKIYSKHTPINLVRDLPQGFSALEPLVDLPIGINITRFQTLLALHRSYLTPGDSSSGWTAGAAAYYVGYLQPRTFLLKYNENGTITDAVDCALDPLSETKCTLKSFTVEKGIYQTSNFRVQPTESIVRFPNITNLCPFGEVFNATRFASVYAWNRKRISNCVADYSVLYNSASFSTFKCYGVSPTKLNDLCFTNVYADSFVIRGDEVRQIAPGQTGKIADYNYKLPDDFTGCVIAWNSNNLDSKVGGNYNYLYRLFRKSNLKPFERDISTEIYQAGSTPCNGVEGFNCYFPLQSYGFQPTNGVGYQPYRVVVLSFELLHAPATVCGPKKSTNLVKNKCVNFNFNGLTGTGVLTESNKKFLPFQQFGRDIADTTDAVRDPQTLEILDITPCSFGGVSVITPGTNTSNQVAVLYQDVNCTEVPVAIHADQLTPTWRVYSTGSNVFQTRAGCLIGAEHVNNSYECDIPIGAGICASYQTQTNSPRRARSVASQSIIAYTMSLGAENSVAYSNNSIAIPTNFTISVTTEILPVSMTKTSVDCTMYICGDSTECSNLLLQYGSFCTQLNRALTGIAVEQDKNTQEVFAQVKQIYKTPPIKDFGGFNFSQILPDPSKPSKRSFIEDLLFNKVTLADAGFIKQYGDCLGDIAARDLICAQKFNGLTVLPPLLTDEMIAQYTSALLAGTITSGWTFGAGAALQIPFAMQMAYRFNGIGVTQNVLYENQKLIANQFNSAIGKIQDSLSFTASALGKLQDVVNQNAQALNTLVKQLSSNFGAISSVLNDILSRLDKVEAEVQIDRLITGRLQSLQTYVTQQLIRAAEIRASANLAATKMSECVLGQSKRVDFCGKGYHLMSFPQSAPHGVVFLHVTYVPAQEKNFTTAPAICHDGKAHFPREGVFVSNGTHWFVTQRNFYEPQIITTDNTFVSGNCDVVIGIVNNTVYDPLQPELDSGGGGSDIIKLLNEQVNKEMQSSNLYMSMSSWCYTHSLDGAGLFLFDHAAEEYEHAKKLIIFLNENNVPVQLTSISAPEHKFEGLTQIFQKAYEHEQHISESINNIVDHAIKSKDHATFNFLQWYVAEQHEEEVLFKDILDKIELIGNENHGLYLADQYVKGIAKSRKS

SEQ ID NO: 8669 - protein, 1315 aa, Artificial Sequence; identical to SEQ ID NO: 8649
  SARS-CoV-2/Australia/NSW10/2020__EPI_ISL_413596 spike protein (1-1147) Ferritin construct

SEQ ID NO: 8670 - protein, 1315 aa, Artificial Sequence
  SARS-CoV-2/Switzerland/1000477797/2020__EPI_ISL_413023 spike protein (1-1147) Ferritin construct
MFVFLVLLPLVSSQCVNLTTRTQLPPAYTNSFTRGVYYPDKVFRSSVLHSTQDLFLPFFSNVTWFHAIHVSGTNGTKRFDNPVLPFNDGVYFASTEKSNIIRGWIFGTTLDSKTQSLLIVNNATNVVIKVCEFQFCNDPFLGVYYHKNNKSWMESEFRVYSSANNCTFEYVSQPFLMDLEGKQGNFKNLREFVFKNIDGYFNIYSKHTPINLVRDLPQGFSALEPLVDLPIGINITRFQTLLALHRSYLTPGDSSSGWTAGAAAYYVGYLQPRTFLLKYNENGTITDAVDCALDPLSETKCTLKSFTVEKGIYQTSNFRVQPTESIVRFPNITNLCPFGEVFNATRFASVYAWNRKRISNCVADYSVLYNSASFSTFKCYGVSPTKLNDLCFTNVYADSFVIRGDEVRQIAPGQTGKIADYNYKLPDDFTGCVIAWNSNNLDSKVGGNYNYLYRLFRKSNLKPFERDISTEIYQAGSTPCNGVEGFNCYFPLQSYGFQPTNGVGYQPYRVVVLSFELLHAPATVCGPKKSTNLVKNKCVNFNFNGLTGTGVLTESNKKFLPFQQFGRDIADTTDAVRDPQTLEILDITPCSFGGVSVITPGTNTSNQVAVLYQGVNCTEVPVAIHADQLTPTWRVYSTGSNVFQTRAGCLIGAEHVNNSYECDIPIGAGICASYQTQTNSPRRARSVASQSIIAYTMSLGAENSVAYSNNSIAIPTNFTISVTTEILPVSMTKTSVDCTMYICGDSTECSNLLLQYGSFCTQLNRALTGIAVEQDKNTQEVFAQVKQIYKTPPIKDFGGFNFSQILPDPSKPSKRSFIEDLLFNKVTLADAGFIKQYGDCLGDIAARDLICAQKFNGLTVLPPLLTDEMIAQYTSALLAGTITSGWTFGAGAALQIPFAMQMAYRFNGIGVTQNVLYENQKLIANQFNSAIGKIQDSLSSTASALGKLQDVVNQNAQALNTLVKQLSSNFGAISSVLNDILSRLDKVEAEVQIDRLITGRLQSLQTYVTQQLIRAAEIRASANLAATKMSECVLGQSKRVDFCGKGYHLMSFPQSAPHGVVFLHVTYVPAQEKNFTTAPAICHDGKAHFPREGVFVSNGTHWFVTQRNFYEPQIITTDNTFVSGNCDVVIGIVNNTVYDPLQPELDSGGGGSDIIKLLNEQVNKEMQSSNLYMSMSSWCYTHSLDGAGLFLFDHAAEEYEHAKKLIIFLNENNVPVQLTSISAPEHKFEGLTQIFQKAYEHEQHISESINNIVDHAIKSKDHATFNFLQWYVAEQHEEEVLFKDILDKIELIGNENHGLYLADQYVKGIAKSRKS

SEQ ID NO: 8671 - protein, 1315 aa, Artificial Sequence
  SARS-CoV-2/Belgium/BA-02291/2020__EPI_ISL_415159 spike protein (1-1147) Ferritin construct
MFVFLVLLPLVSSQCVNLTTRTQLPPAYTNSFTRGVYYPDKVFRSSVLHSTQDLFLPFFSNVTWFHAIHVSGTNGTKRFDNPVLPFNDGVYFASTEKSNIIRGWIFGTTLDSKTQSLLIVNNATNVVIKVCEFQFCNDPFLGVYYHKNNKSWMESEFRVYSSANNCTFEYVSQPFLMDLEGKQGNFKNLREFVFKNIDGYFKIYSKHTPINLVRDLPQGFSALEPLVDLPIGINITRFQTLLALHRSYLTPGDSSSGWTAGAAAYYVGYLQPRTFLLKYNENGTITDAVDCALDPLSETKCTLKSFTVEKGIYQTSNFRVQPTESIVRFPNITNLCPFGEVFNATRFASVYAWNRKRISNCVADYSVLYNSASFSTFKCYGVSPTKLNDLCFTNVYADSFVIRGDEVRQIAPGQTGKIADYNYKLPDDFTGCVIAWNSNNLDSKVGGNYNYLYRLFRRSNLKPFERDISTEIYQAGSTPCNGVEGFNCYFPLQSYGFQPTNGVGYQPYRVVVLSFELLPAPATVCGPKKSTNLVKNKCVNFNFNGLTGTGVLTESNKKFLPFQQFGRDIADTTDAVRDPQTLEILDITPCSFGGVSVITPGTNTSNQVAVLYQGVNCTEVPVAIHADQLTPTWRVYSTGSNVFQTRAGCLIGAEHVNNSYECDIPIGAGICASYQTQTNSPRRARSVASQSIIAYTMSLGAENSVAYSNNSIAIPTNFTISVTTEILPVSMTKTSVDCTMYICGDSTECSNLLLQYGSFCTQLNRALTGIAVEQDKNTQEVFAQVKQIYKTPPIKDFGGFNFSQILPDPSKPSKRSFIEDLLFNKVTLADAGFIKQYGDCLGDIAARDLICAQKFNGLTVLPPLLTDEMIAQYTSALLAGTITSGWTFGAGAALQIPFAMQMAYRFNGIGVTQNVLYENQKLIANQFNSAIGKIQDSLSSAAPALGKLQDVVNQNAQALNTLVKQLSSNFGAISSVLNDILSRLDKVEAEVQIDRLITGRLQSLQTYVTQQLIRAAEIRASANLAATKMSECVLGQSKRVDFCGKGYHLMSFPQSAPHGVVFLHVTYVPAQEKNFTTAPAICHDGKAHFPREGVFVSNGTHWFVTQRNFYEPQIITTDNTFVSGNCDVVIGIVNNTVYDPLQPELDSGGGGSDIIKLLNEQVNKEMQSSNLYMSMSSWCYTHSLDGAGLFLFDHAAEEYEHAKKLIIFLNENNVPVQLTSISAPEHKFEGLTQIFQKAYEHEQHISESINNIVDHAIKSKDHATFNFLQWYVAEQHEEEVLFKDILDKIELIGNENHGLYLADQYVKGIAKSRKS

SEQ ID NO: 8672 - protein, 1315 aa, Artificial Sequence
  SARS-CoV-2/USA/WA8-UW5/2020__EPI_ISL_413486 spike protein (1-1147) Ferritin construct
MFVFLVLLPLVSSQCVNLTTRTQLPPAYTNSFTRGVYYPDKVFRSSVLHSTQDLFLPFFSNVTWFHAIHVSGTNGTKRFDNPVLPFNDGVYFASTEKSNIIRGWIFGTTLDSKTQSLLIVNNATNVVIKVCEFQFCNDPFLGVYYHKNNKSWMESEFRVYSSANNCTFEYVSQPFLMDLEGKQGNFKNLREFVFKNIDGYFKIYSKHTPINLVRDLPQGFSALEPLVDLPIGINITRFQTLLALHRSYLTPGDSSSGWTAGAAAYYVGYLQPRTFLLKYNENGTITDAVDCALDPLSETKCTLKSFTVEKGIYQTSNFRVQPTESIVRFPNITNLCPFGEVFNATRFASVYAWNRKRISNCVADYSVLYNSASFSTFKCYGVSPTKLNDLCFTNVYADSFVIRGDEVRQIAPGQTGKIADYNYKLPDDFTGCVIAWNSNNLDSKVGGNYNYLYRLFRKSNLKPFERDISTEIYQAGSTPCNGVEGFNCYFPLQSYGFQPTNGVGYQPYRVVVLSFELLHAPATVCGPKKSTNLVKNKCVNFNFNGLTGTGVLTESNKKFLPFQQFGRDIADTTDAVRDPQTLEILDITPCSFGGVSVITPGTNTSNQVAVLYQDVNCTEVPVAIHADQLTPTWRVYSTGSNVFQTRAGCLIGAEYVNNSYECDIPIGAGICASYQTQTNSPRRARSVASQSIIAYTMSLGAENSVAYSNNSIAIPTNFTISVTTEILPVSMTKTSVDCTMYICGDSTECSNLLLQYGSFCTQLNRALTGIAVEQDKNTQEVFAQVKQIYKTPPIKDFGGFNFSQILPDPSKPSKRSFIEDLLFNKVTLADAGFIKQYGDCLGDIAARDLICAQKFNGLTVLPPLLTDEMIAQYTSALLAGTITSGWTFGAGAALQIPFAMQMAYRFNGIGVTQNVLYENQKLIANQFNSAIGKIQDSLSSTASALGKLQDVVNQNAQALNTLVKQLSSNFGAISSVLNDILSRLDKVEAEVQIDRLITGRLQSLQTYVTQQLIRAAEIRASANLAATKMSECVLGQSKRVDFCGKGYHLMSFPQSAPHGVVFLHVTYVPAQEKNFTTAPAICHDGKAHFPREGVFVSNGTHWFVTQRNFYEPQIITTDNTFVSGNCDVVIGIVNNTVYDPLQPELDSGGGGSDIIKLLNEQVNKEMQSSNLYMSMSSWCYTHSLDGAGLFLFDHAAEEYEHAKKLIIFLNENNVPVQLTSISAPEHKFEGLTQIFQKAYEHEQHISESINNIVDHAIKSKDHATFNFLQWYVAEQHEEEVLFKDILDKIELIGNENHGLYLADQYVKGIAKSRKS

SEQ ID NO: 8673 - protein, 1315 aa, Artificial Sequence
  SARS-CoV-2/England/20102000506/2020__EPI_ISL_415147 spike protein (1-1147) Ferritin construct
MFVFLVLLPLVSSQCVNLTTRTQLPPAYTNSFTRGVYYPDKVFRSSVLHSTQDLFLPFFSNVTWFHAIHVSGTNGTKRFDNPVLPFNDGVYFASTEKSNIIRGWIFGTTLDSKTQSLLIVNNATNVVIKVCEFQFCNDPFLGVYYHKNNKSWMESEFRVYSSANNCTFEYVSQPFLMDLEGKQGNFKNLREFVFKNIDGYFKIYSKHTPINLVRDLPQGFSALEPLVDLPIGINITRFQTLLALHRSYLTPGDSSSGWTAGAAAYYVGYLQPRTFLLKYNENGTITDAVDCALDPLSETKCTLKSFTVEKGIYQTSNFRVQPTESIVRFPNITNLCPFGEVFNATRFASVYAWNRKRISNCVADYSVLYNSASFSTFKCYGVSPTKLNDLCFTNVYADSFVIRGDEVRQIAPGQTGKIADYNYKLPDDFTGCVIAWNSNNLDSKVGGNYNYLYRLFRKSNLKPFERDISTEIYQAGSTPCNGVEGFNCYFPLQSYGFQPTNGVGYQPYRVVVLSFELLHAPATVCGPKKSTNLVKNKCVNFNFNGLTGTGVLTESNKKFLPFQQFGRDIADTTDAVRDPQTLEILDITPCSFGGVSVITPGTNTSNQVAVLYQGVNCTEVPVAIHADQLTPTWRVYSTGSNVFQTRAGCLIGAEHVNNSYECDIPIGAGICASYQTQTNSPRRARSVASQSIIAYTMSLGAENSVAYSNNSIAIPTNFTISVTTEILPVSMTKTSVDCTMYICGDSTECSNLLLQYGSFCTQLNRALTGIAVEQDKNTQEVFAQVKQIYKTPPIKDFGGFNFSQILPDPSKPSKRSFIEDLLFNKVTLADAGFIKQYGYCLGDIAARDLICAQKFNGLTVLPPLLTDEMIAQYTSALLAGTITSGWTFGAGAALQIPFAMQMAYRFNGIGVTQNVLYENQKLIANQFNSAIGKIQDSLSSTASALGKLQDVVNQNAQALNTLVKQLSSNFGAISSVLNDILSRLDKVEAEVQIDRLITGRLQSLQTYVTQQLIRAAEIRASANLAATKMSECVLGQSKRVDFCGKGYHLMSFPQSAPHGVVFLHVTYVPAQEKNFTTAPAICHDGKAHFPREGVFVSNGTHWFVTQRNFYEPQIITTDNTFVSGNCDVVIGIVNNTVYDPLQPELDSGGGGSDIIKLLNEQVNKEMQSSNLYMSMSSWCYTHSLDGAGLFLFDHAAEEYEHAKKLIIFLNENNVPVQLTSISAPEHKFEGLTQIFQKAYEHEQHISESINNIVDHAIKSKDHATFNFLQWYVAEQHEEEVLFKDILDKIELIGNENHGLYLADQYVKGIAKSRKS

SEQ ID NO: 8674 - protein, 1315 aa, Artificial Sequence
  SARS-CoV-2/Belgium/VAG-03013/2020__EPI_ISL_415155 spike protein (1-1147) Ferritin construct
MFVFLVLLPLVSSQCVNLTTRTQLPPAYTNSFTRGVYYPDKVFRSSVLHSTQDLFLPFFSNVTWFHAIHVSGTNGTKRFDNPVLPFNDGVYFASTEKSNIIRGWIFGTTLDSKTQSLLIVNNATNVVIKVCEFQFCNDPFLGVYYHKNNKSWMESEFRVYSSANNCTFEYVSQPFLMDLEGKQGNFKNLREFVFKNIDGYFKIYSKHTPINLVRDLPQGFSALEPLVDLPIGINITRFQTLLALHRSYLTPGDSSSGWTAGAAAYYVGYLQPRTFLLKYNENGTITDAVDCALDPLSETKCTLKSFTVEKGIYQTSNFRVQPTESIVRFPNITNLCPFGEVFNATRFASVYAWNRKRISNCVADYSVLYNSASFSTFKCYGVSPTKLNDLCFTNVYADSFVIRGDEVRQIAPGQTGKIADYNYKLPDDFTGCVIAWNSNNLDSKVGGNYNYLYRLFRKSNLKPFERDISTEIYQAGSTPCNGVEGFNCYFPLQSYGFQPTNGVGYQPYRVVVLSFELLHAPATVCGPKKSTNLVKNKCVNFNFNGLTGTGVLTESNKKFLPFQQFGRDIADTTDAVRDPQTLEILDITPCSFGGVSVITPGTNTSNQVAVLYQGVNCTEVPVAIHADQLTPTWRVYSTGSNVFQTRAGCLIGAEHVNNSYECDIPIGAGICASYQTQTNSPRRARSVASQSIIAYTMSLGAENSVAYSNNSIAIPTNFTISVTTEILPVSMTKTSVDCTMYICGDSTECSNLLLQYGSFCTQLNRALTGIAVEQDKNTQEVFAQVKQIYKTPPIKDFGGFNFSQILPDPSKPSKRSFIEDLLFNKVTLADAGFIKQYGDCLGDIAARDLICAQKFNGLTVLPPLLTDEMIAQYTSALLAGTITSGWTFGAGAALQIPFAMQMAYRFNGIGVTQNVLYENQKLIANQFNSAIGKIQDSLSSTATALGKLQDVVNQNAQALNTLVKQLSSNFGAISSVLNDILSRLDKVEAEVQIDRLITGRLQSLQTYVTQQLIRAAEIRASANLAATKMSECVLGQSKRVDFCGKGYHLMSFPQSAPHGVVFLHVTYVPAQEKNFTTAPAICHDGKAHFPREGVFVSNGTHWFVTQRNFYEPQIITTDNTFVSGNCDVVIGIVNNTVYDPLQPELDSGGGGSDIIKLLNEQVNKEMQSSNLYMSMSSWCYTHSLDGAGLFLFDHAAEEYEHAKKLIIFLNENNVPVQLTSISAPEHKFEGLTQIFQKAYEHEQHISESINNIVDHAIKSKDHATFNFLQWYVAEQHEEEVLFKDILDKIELIGNENHGLYLADQYVKGIAKSRKS

SEQ ID NO: 8675 - protein, 1315 aa, Artificial Sequence
  SARS-CoV-2/Belgium/BC-03016/2020__EPI_ISL_415157 spike protein (1-1147) Ferritin construct
MFVFLVLLPLVSSQCVNLTTRTQLPPAYTNSFTRGVYYPDKVFRSSVLHSTQDLFLPFFSNVTWFHAIHVSGTNGTKRFDNPVLPFNDGVYFASTEKSNIIRGWIFGTTLDSKTQSLLIVNNATNVVIKVCEFQFCNDPFLGVYYHKNNKSWMESEFRVYSSANNCTFEYVSQPFLMDLEGKQGNFKNLREFVFKNIDGYFKIYSKHTPINLVRDLPQGFSALEPLVDLPIGINITRFQTLLALHRSYLTPGDSSSGWTAGAAAYYVGYLQPRTFLLKYNENGTITDAVDCALDPLSETKCTLKSFTVEKGIYQTSNFRVQPTESIVRFPNITNLCPFGEVFNATRFASVYAWNRKRISNCVADYSVLYNSASFSTFKCYGVSPTKLNDLCFTNVYADSFVIRGDEVRQIAPGQTGKIADYNYKLPDDFTGCVIAWNSNNLDSKVGGNYNYLYRLFRKSNLKPFERDISTEIYQAGSTPCNGVEGFNCYFPLQSYGFQPTNGVGYQPYRVVVLSFELLHAPATVCGPKKSTNLVKNKCVNFNFNGLTGTGVLTESNKKFLPFQQFGRDIADTTDAVRDPQTLEILDITPCSFGGVSVITPGTNTSNQVAVLYQGVNCTEVPVAIHADQLTPTWRVYSTGSNVFQTRAGCLIGAEHVNNSYECDIPIGAGICASYQTQTNSPRRARSVASQSIIAYTMSLGAENSVAYSNNSIAIPTNFTISVTTEILPVSMTKTSVDCTMYICGDSTECSNLLLQYGSFCTQLNRALTGIAVEQDKNTQEVFAQVKQIYKTPPIKDFGGFNFSQILPDPSKPSKRSFIEDLLFNKVTLADAGFIKQYGDCLGDIAARDLICAQKFNGLTVLPPLLTDEMIAQYTSALLAGTITSGWTFGAGAALQIPFAMQMAYRFNGIGVTQNVLYENQKLIANQFNSAIGKIQDSLSSTAPALGKLQDVVNQNAQALNTLVKQLSSNFGAISSVLNDILSRLDKVEAEVQIDRLITGRLQSLQTYVTQQLIRAAEIRASANLAATKMSECVLGQSKRVDFCGKGYHLMSFPQSAPHGVVFLHVTYVPAQEKNFTTAPAICHDGKAHFPREGVFVSNGTHWFVTQRNFYEPQIITTDNTFVSGNCDVVIGIVNNTVYDPLQPELDSGGGGSDIIKLLNEQVNKEMQSSNLYMSMSSWCYTHSLDGAGLFLFDHAAEEYEHAKKLIIFLNENNVPVQLTSISAPEHKFEGLTQIFQKAYEHEQHISESINNIVDHAIKSKDHATFNFLQWYVAEQHEEEVLFKDILDKIELIGNENHGLYLADQYVKGIAKSRKS

SEQ ID NO: 8676 - protein, 1315 aa, Artificial Sequence
  SARS-CoV-2/Germany/BavPat3/2020__EPI_ISL_414521 spike protein (1-1147) Ferritin construct
MFVFLVLLPLVSSQCVNLTTRTQLPPAYTNSFTRGVYYPDKVFRSSVLHSTQDLFLPFFSNVTWFHAIHVSGTNGTKRFDNPVLPFNDGVYFASTEKSNIIRGWIFGTTLDSKTQSLLIVNNATNVVIKVCEFQFCNDPFLGVYYHKNNKSWMESEFRVYSSANNCTFEYVSQPFLMDLEGKQGNFKNLREFVFKNIDGYFKIYSKHTPINLVRDLPQGFSALEPLVDLPIGINITRFQTLLALHRSYLTPGDSSSGWTAGAAAYYVGYLQPRTFLLKYNENGTITDAVDCALDPLSETKCTLKSFTVEKGIYQTSNFRVQPTESIVRFPNITNLCPFGEVFNATRFASVYAWNRKRISNCVADYSVLYNSASFSTFKCYGVSPTKLNDLCFTNVYADSFVIRGDEVRQIAPGQTGKIADYNYKLPDDFTGCVIAWNSNNLDSKVGGNYNYLYRLFRKSNLKPFERDISTEIYQAGSTPCNGVEGFNCYFPLQSYGFQPTNGVGYQPYRVVVLSFELLHAPATVCGPKKSTNLVKNKCVNFNFNGLTGTGVLTESNKKFLPFQQFGRDIADTTDAVRDPQTLEILDITPCSFGGVSVITPGTNTSNQVAVLYQDVNCTEVPVAIHADQLTPTWRVYSTGSNVFQTRAGCLIGAEHVNNSYECDIPIGAGICASYQTQTNSPRRARSVASQSIIAYTMSLGAENSVAYSNNSIAIPTNFTISVTTEILPVSMTKTSVDCTMYICGDSTECSNLLLQYGSFCTQLNRALTGIAVEQDKNTQQVFAQVKQIYKTPPIKDFGGFNFSQILPDPSKPSKRSFIEDLLFNKVTLADAGFIKQYGDCLGDIAARDLICAQKFNGLTVLPPLLTDEMIAQYTSALLAGTITSGWTFGAGAALQIPFAMQMAYRFNGIGVTQNVLYENQKLIANQFNSAIGKIQDSLSSTASALGKLQDVVNQNAQALNTLVKQLSSNFGAISSVLNDILSRLDKVEAEVQIDRLITGRLQSLQTYVTQQLIRAAEIRASANLAATKMSECVLGQSKRVDFCGKGYHLMSFPQSAPHGVVFLHVTYVPAQEKNFTTAPAICHDGKAHFPREGVFVSNGTHWFVTQRNFYEPQIITTDNTFVSGNCDVVIGIVNNTVYDPLQPELDSGGGGSDIIKLLNEQVNKEMQSSNLYMSMSSWCYTHSLDGAGLFLFDHAAEEYEHAKKLIIFLNENNVPVQLTSISAPEHKFEGLTQIFQKAYEHEQHISESINNIVDHAIKSKDHATFNFLQWYVAEQHEEEVLFKDILDKIELIGNENHGLYLADQYVKGIAKSRKS

SEQ ID NO: 8677 - protein, 1315 aa, Artificial Sequence
  SARS-CoV-2/France/HF1805/2020__EPI_ISL_414628 spike protein (1-1147) Ferritin construct
MFVFLVLLPLVSSQCVNLTTRTQLPPAYTNSFTRGVYYPDKVFRSSVLHSTQDLFLPFFSNVTWFHAIHVSGTNGTKRFDNPVLPFNDGVYFASTEKSNIIRGWIFGTTLDSKTQSLLIVNNATNVVIKVCEFQFCNDPFLGVYYHKNNKSWMESEFRVYSSANNCTFEYVSQPFLMDLEGKQGNFKNLREFVFKNIDGYFKIYSKHTPINLVRDLPQGFSALEPLVDLPIGINITRFQTLLALHRSYLTPGDSSSGWTAGAAAYYVGYLQPRTFLLKYNENGTITDAVDCALDPLSETKCTLKSFTVEKGIYQTSNFRVQPTESIVRFPNITNLCPFGEVFNATRFASVYAWNRKRISNCVADYSVLYNSASFSTFKCYGVSPTKLNDLCFTNVYADSFVIRGDEVRQIAPGQTGKIADYNYKLPDDFTGCVIAWNSNNLDSKVGGNYNYLYRLFRKSNLKPFERDISTEIYQAGSTPCNGVEGFNCYFPLQSYGFQPTNGVGYQPYRVVVLSFELLHAPATVCGPKKSTNLVKNKCVNFNFNGLTGTGVLTESNKKFLPFQQFGRDIADTTDAVRDPQTLEILDITPCSFGGVSVITPGTNTSNQVAVLYQGVNCTEVPVAIHADQLTPTWRVYSTGSNVFQTRAGCLIGAEHVNNSYECDIPIGAGICASYQTQTNSPRRARSVASQSIIAYTMSLGAENSVAYSNNSIAIPTNFTISVTTEILPVSMTKTSVDCTMYICGDSTECSNLLLQYGSFCTQLNRALTGIAVEQDKNTQEVFAQVKQIYKTPPIKDFGGFNFSQILPDPSKPSKRSFIEDLLFNKVTLADAGFIKQYGDCLGDIAARDLICAQKFNGLTVLPPLLTDEMIAQYTSALLAGTITSGWTFGAGAALQIPFAMQMAYRFNGIGVTQNVLYENQKLIANQFNSAIGKIQDSLSSTASALGKLQDVVNQNAQALNTLVKQLSSNFGAISSVLNDILSRLDKVEAEVQIDRLITGRLQSLQTYVTQQLIRAAEIRASANLAATKMSECVLGQSKRVDFCGKGYHLMSFPQSAPHGVVFLHVTYVPAQEKNFTTAPAICHDGKAHFPREGVFVSNGTHWFVTQRNFYEPQIITTDNTFVSGNCDVVIGVVNNTVYDPLQPELDSGGGGSDIIKLLNEQVNKEMQSSNLYMSMSSWCYTHSLDGAGLFLFDHAAEEYEHAKKLIIFLNENNVPVQLTSISAPEHKFEGLTQIFQKAYEHEQHISESINNIVDHAIKSKDHATFNFLQWYVAEQHEEEVLFKDILDKIELIGNENHGLYLADQYVKGIAKSRKS

SEQ ID NO: 8678 - protein, 1315 aa, Artificial Sequence
  SARS-CoV-2/Netherlands/ZuidHolland_9/2020__EPI_ISL_414445 spike protein (1-1147) Ferritin construct
MFVFLVLLPLVSSQCVNLTTRTQLPPAYTNSFTRGVYYPDKVFRSSVLHSTQDLFLPFFSNVTWFHAIHVSGTNGTKRFDNPVLPFNDGVYFASTEKSNIIRGWIFGTTLDSKTQSLLIVNNATNVVIKVCEFQFCNDPFLGVYYHKNNKSWMESEFRVYSSANNCTFEYVSQPFLMDLEGKQGNFKNLREFVFKNIDGYFKIYSKHTPINLVRDLPQGFSALEPLVDLPIGINITRFQTLLALHRSYLTPGDSSSGWTAGAAAYYVGYLQPRTFLLKYNENGTITDAVDCALDPLSETKCTLKSFTVEKGIYQTSNFRVQPTESIVRFPNITNLCPFGEVFNATRFASVYAWNRKRISNCVADYSVLYNSASFSTFKCYGVSPTKLNDLCFTNVYADSFVIRGDEVRQIAPGQTGKIADYNYKLPDDFTGCVIAWNSNNLDSKVGGNYNYLYRLFRKSNLKPFERDISTEIYQAGSTPCNGVEGFNCYFPLQSYGFQPTNGVGYQPYRVVVLSFELLHAPATVCGPKKSTNLVKNKCVNFNFNGLTGTGVLTESNKKFLPFQQFGRDIADTTDAVRDPQTLEILDITPCSFGGVSVITPGTNTSNQVAVLYQGVNCTEVPVAIHADQLTPTWRVYSTGSNVFQTRAGCLIGAEHVNNSYECDIPIGAGICASYQTQTNSPRRARSVASQSIIAYTMSLGAENSVAYSNNSIAIPTNFTISVTTEILPVSMTKTSVDCTMYICGDSTECSNLLLQYGSFCTQLNRALTGIAVEQDKNTQEVFAQVKQIYKTPPIKDFGGFNFSQILPDPSKPSKRSFIEDLLFNKVTLADAGFIKQYGDCLGDIAARDLICVQKFNGLTVLPPLLTDEMIAQYTSALLAGTITSGWTFGAGAALQIPFAMQMAYRFNGIGVTQNVLYENQKLIANQFNSAIGKIQDSLSSTASALGKLQDVVNQNAQALNTLVKQLSSNFGAISSVLNDILSRLDKVEAEVQIDRLITGRLQSLQTYVTQQLIRAAEIRASANLAATKMSECVLGQSKRVDFCGKGYHLMSFPQSAPHGVVFLHVTYVPAQEKNFTTAPAICHDGKAHFPREGVFVSNGTHWFVTQRNFYEPQIITTDNTFVSGNCDVVIGIVNNTVYDPLQPELDSGGGGSDIIKLLNEQVNKEMQSSNLYMSMSSWCYTHSLDGAGLFLFDHAAEEYEHAKKLIIFLNENNVPVQLTSISAPEHKFEGLTQIFQKAYEHEQHISESINNIVDHAIKSKDHATFNFLQWYVAEQHEEEVLFKDILDKIELIGNENHGLYLADQYVKGIAKSRKS

SEQ ID NO: 8679 - protein, 1315 aa, Artificial Sequence
  SARS-CoV-2/Finland/FIN03032020A/2020__EPI_ISL_413602 spike protein (1-1147) Ferritin construct
MFVFLVLLPLVSSQCVNLTTRTQLPPAYTNSFTRGVYYPDKVFRSSVLHSTQDLFLPFFSNVTWFHAIHVSGTNGTKRFDNPVLPFNDGVYFASTEKSNIIRGWIFGTTLDSKTQSLLIVNNATNVVIKVCEFQFCNDPFLGVYYHKNNKSWMESEFRVYSSANNCTFEYVSQPFLMDLEGKQGNFKNLREFVFKNIDGYFKIYSKHTPINLVRDLPQGFSALEPLVDLPIGINITRFQTLLALHRSYLTPGDSSSGWTAGAAAYYVGYLQPRTFLLKYNENGTITDAVDCALDPLSETKCTLKSFTVEKGIYQTSNFRVQPTESIVRFPNITNLCPFGEVFNATRFASVYAWNRKRISNCVADYSVLYNSASFSTFKCYGVSPTKLNDLCFTNVYADSFVIRGDEVRQIAPGQTGKIADYNYKLPDDFTGCVISWNSNNLDSKVGGNYNYLYRLFRKSNLKPFERDISTEIYQAGSTPCNGVEGFNCYFPLQSYGFQPTNGVGYQPYRVVVLSFELLHAPATVCGPKKSTNLVKNKCVNFNFNGLTGTGVLTESNKKFLPFQQFGRDIADTTDAVRDPQTLEILDITPCSFGGVSVITPGTNTSNQVAVLYQGVNCTEVPVAIHADQLTPTWRVYSTGSNVFQTRAGCLIGAEHVNNSYECDIPIGAGICASYQTQTNSPRRARSVASQSIIAYTMSLGAENSVAYSNNSIAIPTNFTISVTTEILPVSMTKTSVDCTMYICGDSTECSNLLLQYGSFCTQLNRALTGIAVEQDKNTQEVFAQVKQIYKTPPIKDFGGFNFSQILPDPSKPSKRSFIEDLLFNKVTLADAGFIKQYGDCLGDIAARDLICAQKFNGLTVLPPLLTDEMIAQYTSALLAGTITSGWTFGAGAALQIPFAMQMAYRFNGIGVTQNVLYENQKLIANQFNSAIGKIQDSLSSTASALGKLQDVVNQNAQALNTLVKQLSSNFGAISSVLNDILSRLDKVEAEVQIDRLITGRLQSLQTYVTQQLIRAAEIRASANLAATKMSECVLGQSKRVDFCGKGYHLMSFPQSAPHGVVFLHVTYVPAQEKNFTTAPAICHDGKAHFPREGVFVSNGTHWFVTQRNFYEPQIITTDNTFVSGNCDVVIGIVNNTVYDPLQPELDSGGGGSDIIKLLNEQVNKEMQSSNLYMSMSSWCYTHSLDGAGLFLFDHAAEEYEHAKKLIIFLNENNVPVQLTSISAPEHKFEGLTQIFQKAYEHEQHISESINNIVDHAIKSKDHATFNFLQWYVAEQHEEEVLFKDILDKIELIGNENHGLYLADQYVKGIAKSRKS

SEQ ID NO: 8680 - protein, 1315 aa, Artificial Sequence
  SARS-CoV-2/France/GE1977/2020__EPI_ISL_414632 spike protein (1-1147) Ferritin construct
MFVFLVLLPLVSSQCVNLTTRTQLPPAYTNSFTRGVYYPDKVFRSSVLHSTQDLFLPFFSNVTWFHAIHVSGTNGTKRFDNPVLPFNDGVYFASTEKSNIIRGWIFGTTLDSKTQSLLIVNNATNVVIKVCEFQFCNDPFLGVYYHKNNKSWMESEFRVYSSANNCTFEYVSQPFLMDLEGKQGNFKNLREFVFKNIDGYFKIYSKHTPINLVRDLPQGFSALEPLVDLPIGINITRFQTLLALHRSYLTPGDSSSGWTAGAAAYYVGYLQPRTFLLKYNENGTITDAVDCALDPLSETKCTLKSFTVEKGIYQTSNFRVQPTESIVRFPNITNLCPFGEVFNATRFASVYAWNRKRISNCVADYSVLYNSASFSTFKCYGVSPTKLNDLCFTNVYADSFVIRGDEVRQIAPGQTGKIADYNYKLPDDFTGCVIAWNSNNLDSKVGGNYNYLYRLFRKSNLKPFERDISTEIYQAGSTPCNGVEGFNCYFPLQSYGFQPTNGVGYQPYRVVVLSFELLHAPATVCGPKKSTNLVKNKCVNFNFNGLTGTGVLTESNKKFLPFQQFGRDIADTTDAVRDPQTLEILDITPCSFGGVSVITPGTNTSNQVAVLYQGVNCTEVPVAIHADQLTPTWRVYSTGSNVFQTRAGCLIGAEHVNNSYECDIPIGAGICASYQTQTNSPRRARSVASQSIIAYTMSLGAENSVAYSNNSIAIPTNFTISVTTEILPVSMTKTSVDCTMYICGDSTECSNLLLQYGSFCTQLNRALTGIAVEQDKNTQEVFAQVKQIYKTPPIKDFGGFNFSQILPDPSKPSKRSFIEDLLFNKVTLADAGFIKQYGDCLGDIAARDLICAQKFNGLTVLPPLLTDEMIAQYTSALLAGTITSGWTFGAGAALQIPFAMQMAYRFNGIGVTQNVLYENQKLIANQFNSAIGKIQDSLFSTASALGKLQDVVNQNAQALNTLVKQLSSNFGAISSVLNDILSRLDKVEAEVQIDRLITGRLQSLQTYVTQQLIRAAEIRASANLAATKMSECVLGQSKRVDFCGKGYHLMSFPQSAPHGVVFLHVTYVPAQEKNFTTAPAICHDGKAHFPREGVFVSNGTHWFVTQRNFYEPQIITTDNTFVSGNCDVVIGIVNNTVYDPLQPELDSGGGGSDIIKLLNEQVNKEMQSSNLYMSMSSWCYTHSLDGAGLFLFDHAAEEYEHAKKLIIFLNENNVPVQLTSISAPEHKFEGLTQIFQKAYEHEQHISESINNIVDHAIKSKDHATFNFLQWYVAEQHEEEVLFKDILDKIELIGNENHGLYLADQYVKGIAKSRKS

SEQ ID NO: 8681 - protein, 1315 aa, Artificial Sequence
  SARS-CoV-2/Finland/FIN-313/2020__EPI_ISL_414641 spike protein (1-1147) Ferritin construct
MFVFLVLLPLVSSQCVNLTTRTQLPPAYTNSFTRGVYYPDKVFRSSVLHSTQDLFLPFFSNVTWFHAIHVSGTNGTKRFDNPVLPFNDGVYFASTEKSNIIRGWIFGTTLDSKTQSLLIVNNATNVVIKVCEFQFCNDPFLGVYYHKNNKSWMESEFRVYSSANNCTFEYVSQPFLMDLEGKQGNFKNLREFVFKNIDGYFKIYSKHTPINLVRDLPQGFSALEPLVDLPIGINITRFKTLLALHRSYLTPGDSSSGWTAGAAAYYVGYLQPRTFLLKYNENGTITDAVDCALDPLSETKCTLKSFTVEKGIYQTSNFRVQPTESIVRFPNITNLCPFGEVFNATRFASVYAWNRKRISNCVADYSVLYNSASFSTFKCYGVSPTKLNDLCFTNVYADSFVIRGDEVRQIAPGQTGKIADYNYKLPDDFTGCVIAWNSNNLDSKVGGNYNYLYRLFRKSNLKPFERDISTEIYQAGSTPCNGVEGFNCYFPLQSYGFQPTNGVGYQPYRVVVLSFELLHAPATVCGPKKSTNLVKNKCVNFNFNGLTGTGVLTESNKKFLPFQQFGRDIADTTDAVRDPQTLEILDITPCSFGGVSVITPGTNTSNQVAVLYQGVNCTEVPVAIHADQLTPTWRVYSTGSNVFQTRAGCLIGAEHVNNSYECDIPIGAGICASYQTQTNSPRRARSVASQSIIAYTMSLGAENSVAYSNNSIAIPTNFTISVTTEILPVSMTKTSVDCTMYICGDSTECSNLLLQYGSFCTQLNRALTGIAVEQDKNTQEVFAQVKQIYKTPPIKDFGGFNFSQILPDPSKPSKRSFIEDLLFNKVTLADAGFIKQYGDCLGDIAARDLICAQKFNGLTVLPPLLTDEMIAQYTSALLAGTITSGWTFGAGAALQIPFAMQMAYRFNGIGVTQNVLYENQKLIANQFNSAIGKIQDSLSSTASALGKLQDVVNQNAQALNTLVKQLSSNFGAISSVLNDILSRLDKVEAEVQIDRLITGRLQSLQTYVTQQLIRAAEIRASANLAATKMSECVLGQSKRVDFCGKGYHLMSFPQSAPHGVVFLHVTYVPAQEKNFTTAPAICHDGKAHFPREGVFVSNGTHWFVTQRNFYEPQIITTDNTFVSGNCDVVIGIVNNTVYDPLQPELDSGGGGSDIIKLLNEQVNKEMQSSNLYMSMSSWCYTHSLDGAGLFLFDHAAEEYEHAKKLIIFLNENNVPVQLTSISAPEHKFEGLTQIFQKAYEHEQHISESINNIVDHAIKSKDHATFNFLQWYVAEQHEEEVLFKDILDKIELIGNENHGLYLADQYVKGIAKSRKS

SEQ ID NO: 8682 - protein, 1315 aa, Artificial Sequence
  SARS-CoV-2/Netherlands/ZuidHolland_2/2020__EPI_ISL_414556 spike protein (1-1147) Ferritin construct
MFVFLVLLPLVSSQCVNLTTRTQLPPAYTNSFTRGVYYPDKVFRSSVLHSTQDLFLPFFSNVTWFHAIHVSGTNGTKRFDNPVLPFNDGVYFASTEKSNIIRGWIFGTTLDSKTQSLLIVNNATNVVIKVCEFQFCNDPFLGVYYHKNNKSWMESEFRVYSSANNCTFEYVSQPFLMDLEGKQGNFKNLREFVFKNIDGYFKIYSKHTPINLVRDLPQGFSALEPLVDLPIGINITRFQTLLALHRSYLTPGDSSSGWTAGAAAYYVGYLQPRTFLLKYNENGTITDAVDCALDPLSETKCTLKSFTVEKGIYQTSNFRVQPTESIVRFPNITNLCPFGEVFNATRFASVYAWNRKRISNCVADYSVLYNSASFSTFKCYGVSPTKLNDLCFTNVYADSFVIRGDEVRQIAPGQTGKIADYNYKLPDDFTGCVIAWNSNNLDSKVGGNYNYLYRLFRKSNLKPFERDISTEIYQAGSTPCNGVEGFNCYFPLQSYGFQPTNGVGYQPYRVVVLSFELLHAPATVCGPKKSTNLVKNKCVNFNFNGLTGTGVLTESNKKFLPFQQFGRDIADTTDAVRDPQTLEILDITPCSFGGVSVITPGTNTSNQVAVLYQGVNCTEVPVAIHADQLTPTWRVYSTGSNVFQTRAGCLIGAEHVNNSYECDIPIGAGICASYQTQTNSPRRARSVASQSIIAYTMSLGAENSVAYSNNSIAIPTNFTISVTTEILPVSMTKTSVDCTMYICGDSTECSNLLLQYGSFCTQLNRALTGIALEQDKNTQEVFAQVKQIYKTPPIKDFGGFNFSQILPDPSKPSKRSFIEDLLFNKVTLADAGFIKQYGDCLGDIAARDLICAQKFNGLTVLPPLLTDEMIAQYTSALLAGTITSGWTFGAGAALQIPFAMQMAYRFNGIGVTQNVLYENQKLIANQFNSAIGKIQDSLSSTASALGKLQDVVNQNAQALNTLVKQLSSNFGAISSVLNDILSRLDKVEAEVQIDRLITGRLQSLQTYVTQQLIRAAEIRASANLAATKMSECVLGQSKRVDFCGKGYHLMSFPQSAPHGVVFLHVTYVPAQEKNFTTAPAICHDGKAHFPREGVFVSNGTHWFVTQRNFYEPQIITTDNTFVSGNCDVVIGIVNNTVYDPLQPELDSGGGGSDIIKLLNEQVNKEMQSSNLYMSMSSWCYTHSLDGAGLFLFDHAAEEYEHAKKLIIFLNENNVPVQLTSISAPEHKFEGLTQIFQKAYEHEQHISESINNIVDHAIKSKDHATFNFLQWYVAEQHEEEVLFKDILDKIELIGNENHGLYLADQYVKGIAKSRKS

SEQ ID NO: 8683 - protein, 1315 aa, Artificial Sequence
  SARS-CoV-2/USA/WA-UW31/2020__EPI_ISL_414618 spike protein (1-1147) Ferritin construct
MFVFLVLLPLVSSQCVNLTTRTQLPPAYTNSFTRGVYYPDKVFRSSVLHSTQDLFLPFFSNVTWFHAIHVSGTNGTKRFDNPVLPFNDGVYFASTEKSNIIRGWIFGTTLDSKTQSLLIVNNATNVVIKVCEFQFCNDPFLGVYYHKNNKSWMESEFRVYSSANNCTFEYVSQPFLMDLEGKQGNFKNLREFVFKNIDGYFKIYSKHTPINLVRDLPQGFSALEPLVDLPIGINITRFQTLLALHRSYLTPGDSSSGWTAGAAAYYVGYLQPRTFLLKYNENGTITDAVDCALDPLSETKCTLKSFTVEKGIYQTSNFRVQPTESIVRFPNITNLCPFGEVFNATRFASVYAWNRKRISNCVADYSVLYNSASFSTFKCYGVSPTKLNDLCFTNVYADSFVIRGDEVRQIAPGQTGKIADYNYKLPDDFTGCVIAWNSNNLDSKVGGNYNYLYRLFRKSNLKPFERDISTEIYQAGSTPCNGAEGFNCYFPLQSYGFQPTNGVGYQPYRVVVLSFELLHAPATVCGPKKSTNLVKNKCVNFNFNGLTGTGVLTESNKKFLPFQQFGRDIADTTDAVRDPQTLEILDITPCSFGGVSVITPGTNTSNQVAVLYQDVNCTEVPVAIHADQLTPTWRVYSTGSNVFQTRAGCLIGAEHVNNSYECDIPIGAGICASYQTQTNSPRRARSVASQSIIAYTMSLGAENSVAYSNNSIAIPTNFTISVTTEILPVSMTKTSVDCTMYICGDSTECSNLLLQYGSFCTQLNRALTGIAVEQDKNTQEVFAQVKQIYKTPPIKDFGGFNFSQILPDPSKPSKRSFIEDLLFNKVTLADAGFIKQYGDCLGDIAARDLICAQKFNGLTVLPPLLTDEMIAQYTSALLAGTITSGWTFGAGAALQIPFAMQMAYRFNGIGVTQNVLYENQKLIANQFNSAIGKIQDSLSSTASALGKLQDVVNQNAQALNTLVKQLSSNFGAISSVLNDILSRLDKVEAEVQIDRLITGRLQSLQTYVTQQLIRAAEIRASANLAATKMSECVLGQSKRVDFCGKGYHLMSFPQSAPHGVVFLHVTYVPAQEKNFTTAPAICHDGKAHFPREGVFVSNGTHWFVTQRNFYEPQIITTDNTFVSGNCDVVIGIVNNTVYDPLQPELDSGGGGSDIIKLLNEQVNKEMQSSNLYMSMSSWCYTHSLDGAGLFLFDHAAEEYEHAKKLIIFLNENNVPVQLTSISAPEHKFEGLTQIFQKAYEHEQHISESINNIVDHAIKSKDHATFNFLQWYVAEQHEEEVLFKDILDKIELIGNENHGLYLADQYVKGIAKSRKS

SEQ ID NO: 8684 - protein, 1315 aa, Artificial Sequence
  SARS-CoV-2/South Korea/SNU01/2020__EPI_ISL_411929 spike protein (1-1147) Ferritin construct
MFVFLVLLPLVSSQCVNLTTRTQLPPAYTNSFTRGVYYPDKVFRSSVLHSTQDLFLPFFSNVTWFHAIHVSGTNGTKRFDNPVLPFNDGVYFASTEKSNIIRGWIFGTTLDSKTQSLLIVNNATNVVIKVCEFQFCNDPFLGVYYHKNNKSWMESEFRVYSSANNCTFEYVSQPFLMDLEGKQGNFKNLREFVFKNIDGYFKIYSKHTPINLVRDLPQGFWALEPLVDLPIGINITRFQTLLALHRSYLTPGDSSSGWTAGAAAYYVGYLQPRTFLLKYNENGTITDAVDCALDPLSETKCTLKSFTVEKGIYQTSNFRVQPTESIVRFPNITNLCPFGEVFNATRFASVYAWNRKRISNCVADYSVLYNSASFSTFKCYGVSPTKLNDLCFTNVYADSFVIRGDEVRQIAPGQTGKIADYNYKLPDDFTGCVIAWNSNNLDSKVGGNYNYLYRLFRKSNLKPFERDISTEIYQAGSTPCNGVEGFNCYFPLQSYGFQPTNGVGYQPYRVVVLSFELLHAPATVCGPKKSTNLVKNKCVNFNFNGLTGTGVLTESNKKFLPFQQFGRDIADTTDAVRDPQTLEILDITPCSFGGVSVITPGTNTSNQVAVLYQDVNCTEVPVAIHADQLTPTWRVYSTGSNVFQTRAGCLIGAEHVNNSYECDIPIGAGICASYQTQTNSPRRARSVASQSIIAYTMSLGAENSVAYSNNSIAIPTNFTISVTTEILPVSMTKTSVDCTMYICGDSTECSNLLLQYGSFCTQLNRALTGIAVEQDKNTQEVFAQVKQIYKTPPIKDFGGFNFSQILPDPSKPSKRSFIEDLLFNKVTLADAGFIKQYGDCLGDIAARDLICAQKFNGLTVLPPLLTDEMIAQYTSALLAGTITSGWTFGAGAALQIPFAMQMAYRFNGIGVTQNVLYENQKLIANQFNSAIGKIQDSLSSTASALGKLQDVVNQNAQALNTLVKQLSSNFGAISSVLNDILSRLDKVEAEVQIDRLITGRLQSLQTYVTQQLIRAAEIRASANLAATKMSECVLGQSKRVDFCGKGYHLMSFPQSAPHGVVFLHVTYVPAQEKNFTTAPAICHDGKAHFPREGVFVSNGTHWFVTQRNFYEPQIITTDNTFVSGNCDVVIGIVNNTVYDPLQPELDSGGGGSDIIKLLNEQVNKEMQSSNLYMSMSSWCYTHSLDGAGLFLFDHAAEEYEHAKKLIIFLNENNVPVQLTSISAPEHKFEGLTQIFQKAYEHEQHISESINNIVDHAIKSKDHATFNFLQWYVAEQHEEEVLFKDILDKIELIGNENHGLYLADQYVKGIAKSRKS

SEQ ID NO: 8685 - protein, 1315 aa, Artificial Sequence
  SARS-CoV-2/China/WF0004/2020__EPI_ISL_413694 spike protein (1-1147) Ferritin construct
MFVFLVLLPLVSSQCVNLTTRTQLPPAYTNSFTRGVYYPDKVFRSSVLHSTQDLFLPFFSNVTWFHAIHVSGTNGTKRFDNPVLPFNDGVYFASTEKSNIIRGWIFGTTLDSKTQSLLIVNNATNVVIKVCEFQFCNDPFLGVYYHKNNKSWTESEFRVYSSANNCTFEYVSQPFLMDLEGKQGNFKNLREFVFKNIDGYFKIYSKHTPINLVRDLPQGFSALEPLVDLPIGINITRFQTLLALHRSYLTPGDSSSGWTAGAAAYYVGYLQPRTFLLKYNENGTITDAVDCALDPLSETKCTLKSFTVEKGIYQTSNFRVQPTESIVRFPNITNLCPFGEVFNATRFASVYAWNRKRISNCVADYSVLYNSASFSTFKCYGVSPTKLNDLCFTNVYADSFVIRGDEVRQIAPGQTGKIADYNYKLPDDFTGCVIAWNSNNLDSKVGGNYNYLYRLFRKSNLKPFERDISTEIYQAGSTPCNGVEGFNCYFPLQSYGFQPTNGVGYQPYRVVVLSFELLHAPATVCGPKKSTNLVKNKCVNFNFNGLTGTGVLTESNKKFLPFQQFGRDIADTTDAVRDPQTLEILDITPCSFGGVSVITPGTNTSNQVAVLYQDVNCTEVPVAIHADQLTPTWRVYSTGSNVFQTRAGCLIGAEHVNNSYECDIPIGAGICASYQTQTNSPRRARSVASQSIIAYTMSLGAENSVAYSNNSIAIPTNFTISVTTEILPVSMTKTSVDCTMYICGDSTECSNLLLQYGSFCTQLNRALTGIAVEQDKNTQEVFAQVKQIYKTPPIKDFGGFNFSQILPDPSKPSKRSFIEDLLFNKVTLADAGFIKQYGDCLGDIAARDLICAQKFNGLTVLPPLLTDEMIAQYTSALLAGTITSGWTFGAGAALQIPFAMQMAYRFNGIGVTQNVLYENQKLIANQFNSAIGKIQDSLSSTASALGKLQDVVNQNAQALNTLVKQLSSNFGAISSVLNDILSRLDKVEAEVQIDRLITGRLQSLQTYVTQQLIRAAEIRASANLAATKMSECVLGQSKRFDFCGKGYHLMSFPQSAPHGVVFLHVTYVPAQEKNFTTAPAICHDGKAHFPREGVFVSNGTHWFVTQRNFYEPQIITTDNTFVSGNCDVVIGIVNNTVYDPLQPELDSGGGGSDIIKLLNEQVNKEMQSSNLYMSMSSWCYTHSLDGAGLFLFDHAAEEYEHAKKLIIFLNENNVPVQLTSISAPEHKFEGLTQIFQKAYEHEQHISESINNIVDHAIKSKDHATFNFLQWYVAEQHEEEVLFKDILDKIELIGNENHGLYLADQYVKGIAKSRKS

SEQ ID NO: 8686 - protein, 1315 aa, Artificial Sequence
  SARS-CoV-2/China/WF0028/2020__EPI_ISL_413791 spike protein (1-1147) Ferritin construct
MFVFLVLLPLVSSQCVNLTTRTQLPPAYTNSFTRGVYYPDKVFRSSVLHSTQDLFLPFFSNVTWFHAIHVSGTNGTKRFDNPVLPFNDGVYFASTEKSNIIRGWIFGTTLDSKTQSLLIVNNATNVVIKVCEFQFCNDPFLGVYYHKNNKSWMESEFRVYSSANNCTFEYVSQPFLMDLEGKQGNFKNLREFVFKNIDGYFKIYSKHTPINLVRDLPQGFSALEPLVDLPIGINITRFQTLLALHRSYLTPGDSSSGWTAGAAAYYVGYLQPRTFLLKYNENGTITDAVDCALDPLSETKCTLKSFTVEKGIYQTSNFRVQPTESIVRFPNITNLCPFGEVFNATRFASVYAWNRKRISNCVADYSVLYNSASFSTFKCYGVSPTKLNDLCFTNVYADSFVIRGDEVRQIAPGQTGKIADYNYKLPDDFTGCVIAWNSNNLDSKVGGNYNYLYRLFRKSNLKPFERDISTEIYQAGSTPCNGVEGFNCYFPLQSYGFQPTNGVGYQPYRVVVLSFELLHAPATVCGPKKSTNLVKNKCVNFNFNGLTGTGVLTESNKKFLPFQQFGRDIADTTDAVRDPQTLEILDITPCSFGGVSVITPGTNTSNQVAVLYQDVNCTEVPVAIHADQLTPTWRVYSTGSNVFQTRAGCLIGAEHVNNSYECDIPIGAGICASYQTQTNSPRRARSVASQSIIAYTMSLGAENSVAYSNNSIAIPTNFTISVTTEILPVSMTKTSVDCTMYICGDSTECSNLLLQYGSFCTQLNRALTGIAVEQDKNTQEVFAQVKQIYKTPPIKDFGGFNFSQILPDPSKPSKRSFIEDLLFNKVTLADAGFIKQYGDCLGDIAARDLICAQKFNGLTVLPPLLTDEMIAQYTSALLAGTITSGWTFGAGAALQIPFAMQMAYRFNGIGVTQNVLYENQKLIANQFNSAIGKIQDSLSSTASALGKLQDVVNQNAQALNTLVKQLSSNFGAISSVLNDILSRLDKVEAEVQIDRLITGRLQSLQTYVTQQLIRAAEIRASANLAATKMSECVLGQSKRVDFCGKGYHLMSFPQSAPHGVVFLHVTYVPAQEKNFTTAPAICHDGKAHFPREGVFVSNGTHWFVTQRNFYEPQIITTDNTFVSGNCDVVIGIVNNTVYDPLQPELESGGGGSDIIKLLNEQVNKEMQSSNLYMSMSSWCYTHSLDGAGLFLFDHAAEEYEHAKKLIIFLNENNVPVQLTSISAPEHKFEGLTQIFQKAYEHEQHISESINNIVDHAIKSKDHATFNFLQWYVAEQHEEEVLFKDILDKIELIGNENHGLYLADQYVKGIAKSRKS

SEQ ID NO: 8687 - protein, 1315 aa, Artificial Sequence
  SARS-CoV-2/2019-nCoV/USA-CruiseA-18/2020__MT159716.1 spike protein (1-1147) Ferritin construct
MFVFLVLLPLVSSQCVNLTTRTQLPPAYTNSFTRGVYYPDKVFRSSVLHSTQDLFLPFFSNVTWFHAIHVSGTNGTKRFDNPVLPFNDGVYFASTEKSNIIRGWIFGTTLDSKTQSLLIVNNATNVVIKVCEFQFCNDPFLGVYYHKNNKSWMESELRVYSSANNCTFEYVSQPFLMDLEGKQGNFKNLREFVFKNIDGYFKIYSKHTPINLVRDLPQGFSALEPLVDLPIGINITRFQTLLALHRSYLTPGDSSSGWTAGAAAYYVGYLQPRTFLLKYNENGTITDAVDCALDPLSETKCTLKSFTVEKGIYQTSNFRVQPTESIVRFPNITNLCPFGEVFNATRFASVYAWNRKRISNCVADYSVLYNSASFSTFKCYGVSPTKLNDLCFTNVYADSFVIRGDEVRQIAPGQTGKIADYNYKLPDDFTGCVIAWNSNNLDSKVGGNYNYLYRLFRKSNLKPFERDISTEIYQAGSTPCNGVEGFNCYFPLQSYGFQPTNGVGYQPYRVVVLSFELLHAPATVCGPKKSTNLVKNKCVNFNFNGLTGTGVLTESNKKFLPFQQFGRDIADTTDAVRDPQTLEILDITPCSFGGVSVITPGTNTSNQVAVLYQDVNCTEVPVAIHADQLTPTWRVYSTGSNVFQTRAGCLIGAEHVNNSYECDIPIGAGICASYQTQTNSPRRARSVASQSIIAYTMSLGAENSVAYSNNSIAIPTNFTISVTTEILPVSMTKTSVDCTMYICGDSTECSNLLLQYGSFCTQLNRALTGIAVEQDKNTQEVFAQVKQIYKTPPIKDFGGFNFSQILPDPSKPSKRSFIEDLLFNKVTLADAGFIKQYGDCLGDIAARDLICAQKFNGLTVLPPLLTDEMIAQYTSALLAGTITSGWTFGAGAALQIPFAMQMAYRFNGIGVTQNVLYENQKLIANQFNSAIGKIQDSLSSTASALGKLQDVVNQNAQALNTLVKQLSSNFGAISSVLNDILSRLDKVEAEVQIDRLITGRLQSLQTYVTQQLIRAAEIRASANLAATKMSECVLGQSKRVDFCGKGYHLMSFPQSAPHGVVFLHVTYVPAQEKNFTTAPAICHDGKAHFPREGVFVSNGTHWFVTQRNFYEPQIITTDNTFVSGNCDVVIGIVNNTVYDPLQPELDSGGGGSDIIKLLNEQVNKEMQSSNLYMSMSSWCYTHSLDGAGLFLFDHAAEEYEHAKKLIIFLNENNVPVQLTSISAPEHKFEGLTQIFQKAYEHEQHISESINNIVDHAIKSKDHATFNFLQWYVAEQHEEEVLFKDILDKIELIGNENHGLYLADQYVKGIAKSRKS

SEQ ID NO: 8688 - protein, 1315 aa, Artificial Sequence
  SARS-CoV-2/SARS-CoV-2/Yunnan-01/human/2020/CHN__MT049951.1 spike protein (1-1147) Ferritin construct
MFVFLVLLPLVSSQCVNLTTRTQLPPANTNSFTRGVYYPDKVFRSSVLHSTQDLFLPFFSNVTWFHAIHVSGTNGTKRFDNPVLPFNDGVYFASTEKSNIIRGWIFGTTLDSKTQSLLIVNNATNVVIKVCEFQFCNDPFLGVYYHKNNKSWMESEFRVYSSANNCTFEYVSQPFLMDLEGKQGNFKNLREFVFKNIDGYFKIYSKHTPINLVRDLPQGFSALEPLVDLPIGINITRFQTLLALHRSYLTPGDSSSGWTAGAAAYYVGYLQPRTFLLKYNENGTITDAVDCALDPLSETKCTLKSFTVEKGIYQTSNFRVQPTESIVRFPNITNLCPFGEVFNATRFASVYAWNRKRISNCVADYSVLYNSASFSTFKCYGVSPTKLNDLCFTNVYADSFVIRGDEVRQIAPGQTGKIADYNYKLPDDFTGCVIAWNSNNLDSKVGGNYNYLYRLFRKSNLKPFERDISTEIYQAGSTPCNGVEGFNCYFPLQSYGFQPTNGVGYQPYRVVVLSFELLHAPATVCGPKKSTNLVKNKCVNFNFNGLTGTGVLTESNKKFLPFQQFGRDIADTTDAVRDPQTLEILDITPCSFGGVSVITPGTNTSNQVAVLYQDVNCTEVPVAIHADQLTPTWRVYSTGSNVFQTRAGCLIGAEHVNNSYECDIPIGAGICASYQTQTNSPRRARSVASQSIIAYTMSLGAENSVAYSNNSIAIPTNFTISVTTEILPVSMTKTSVDCTMYICGDSTECSNLLLQYGSFCTQLNRALTGIAVEQDKNTQEVFAQVKQIYKTPPIKDFGGFNFSQILPDPSKPSKRSFIEDLLFNKVTLADAGFIKQYGDCLGDIAARDLICAQKFNGLTVLPPLLTDEMIAQYTSALLAGTITSGWTFGAGAALQIPFAMQMAYRFNGIGVTQNVLYENQKLIANQFNSAIGKIQDSLSSTASALGKLQDVVNQNAQALNTLVKQLSSNFGAISSVLNDILSRLDKVEAEVQIDRLITGRLQSLQTYVTQQLIRAAEIRASANLAATKMSECVLGQSKRVDFCGKGYHLMSFPQSAPHGVVFLHVTYVPAQEKNFTTAPAICHDGKAHFPREGVFVSNGTHWFVTQRNFYEPQIITTDNTFVSGNCDVVIGIVNNTVYDPLQPELDSGGGGSDIIKLLNEQVNKEMQSSNLYMSMSSWCYTHSLDGAGLFLFDHAAEEYEHAKKLIIFLNENNVPVQLTSISAPEHKFEGLTQIFQKAYEHEQHISESINNIVDHAIKSKDHATFNFLQWYVAEQHEEEVLFKDILDKIELIGNENHGLYLADQYVKGIAKSRKS

SEQ ID NO: 8689 - protein, 1315 aa, Artificial Sequence
  SARS-CoV-2/USA/WA-UW292/2020__EPI_ISL_418077 spike protein (1-1147) Ferritin construct
MFVFLVLLPLVSSQCVNLTTRTQLPPAYTNSFTRGVYYPDKVFRSSVLHSTQDLFLPFFSNVTWFHAIHVSGTNGTKRFDNPVLPFNDGVYFASTEKSNIIRGWIFGTTLDSKTQSLLIVNNATNVVIKVCEFQFCNDPFLGVYYHKNNKSWMESEFRVYSSANNCTFEYVSQPFLMDLEGKQGNFKNLREFVFKNIDGYFKIYSKHTPINLVRDLPQGFSALEPLVDLPIGINITRFQTLLALHRSYLTPGDSSSGWTAGAAAYYVGYLQPRTFLLKYNENGTITDAVDCALDPLSETKCTLKSFTVEKGIYQTSNFRVQPTESIVRFPNITNLCPFGEVFNATRFASVYAWNRKRISNCVADYSVLYNSASFSTFKCYGVSPTKLNDLCFTNVYADSFVIRGDEVRQIAPGQTGKIADYNYKLPDDFTGCVIAWNSNNLDSKVGGNYNYLYRLFRKSNLKPFERDISTEIYQASSTPCNGVEGFNCYFPLQSYGFQPTNGVGYQPYRVVVLSFELLHAPATVCGPKKSTNLVKNKCVNFNFNGLTGTGVLTESNKKFLPFQQFGRDIADTTDAVRDPQTLEILDITPCSFGGVSVITPGTNTSNQVAVLYQDVNCTEVPVAIHADQLTPTWRVYSTGSNVFQTRAGCLIGAEHVNNSYECDIPIGAGICASYQTQTNSPRRARSVASQSIIAYTMSLGAENSVAYSNNSIAIPTNFTISVTTEILPVSMTKTSVDCTMYICGDSTECSNLLLQYGSFCTQLNRALTGIAVEQDKNTQEVFAQVKQIYKTPPIKDFGGFNFSQILPDPSKPSKRSFIEDLLFNKVTLADAGFIKQYGDCLGDIAARDLICAQKFNGLTVLPPLLTDEMIAQYTSALLAGTITSGWTFGAGAALQIPFAMQMAYRFNGIGVTQNVLYENQKLIANQFNSAIGKIQDSLSSTASALGKLQDVVNQNAQALNTLVKQLSSNFGAISSVLNDILSRLDKVEAEVQIDRLITGRLQSLQTYVTQQLIRAAEIRASANLAATKMSECVLGQSKRVDFCGKGYHLMSFPQSAPHGVVFLHVTYVPAQEKNFTTAPAICHDGKAHFPREGVFVSNGTHWFVTQRNFYEPQIITTDNTFVSGNCDVVIGIVNNTVYDPLQPELDSGGGGSDIIKLLNEQVNKEMQSSNLYMSMSSWCYTHSLDGAGLFLFDHAAEEYEHAKKLIIFLNENNVPVQLTSISAPEHKFEGLTQIFQKAYEHEQHISESINNIVDHAIKSKDHATFNFLQWYVAEQHEEEVLFKDILDKIELIGNENHGLYLADQYVKGIAKSRKS

SEQ ID NO: 8690 - protein, 1315 aa, Artificial Sequence
  SARS-CoV-2/Iceland/192/2020__EPI_ISL_417819 spike protein (1-1147) Ferritin construct
MFVFFVLLPLVSSQCVNLTTRTQLPPAYTNSFTRGVYYPDKVFRSSVLHSTQDLFLPFFSNVTWFHAIHVSGTNGTKRFDNPVLPFNDGVYFASTEKSNIIRGWIFGTTLDSKTQSLLIVNNATNVVIKVCEFQFCNDPFLGVYYHKNNKSWMESEFRVYSSANNCTFEYVSQPFLMDLEGKQGNFKNLREFVFKNIDGYFKIYSKHTPINLVRDLPQGFSALEPLVDLPIGINITRFQTLLALHRSYLTPGDSSSGWTAGAAAYYVGYLQPRTFLLKYNENGTITDAVDCALDPLSETKCTLKSFTVEKGIYQTSNFRVQPTESIVRFPNITNLCPFGEVFNATRFASVYAWNRKRISNCVADYSVLYNSASFSTFKCYGVSPTKLNDLCFTNVYADSFVIRGDEVRQIAPGQTGKIADYNYKLPDDFTGCVIAWNSNNLDSKVGGNYNYLYRLFRKSNLKPFERDISTEIYQAGSTPCNGVEGFNCYFPLQSYGFQPTNGVGYQPYRVVVLSFELLHAPATVCGPKKSTNLVKNKCVNFNFNGLTGTGVLTESNKKFLPFQQFGRDIADTTDAVRDPQTLEILDITPCSFGGVSVITPGTNTSNQVAVLYQGVNCTEVPVAIHADQLTPTWRVYSTGSNVFQTRAGCLIGAEHVNNSYECDIPIGAGICASYQTQTNSPRRARSVASQSIIAYTMSLGAENSVAYSNNSIAIPTNFTISVTTEILPVSMTKTSVDCTMYICGDSTECSNLLLQYGSFCTQLNRALTGIAVEQDKNTQEVFAQVKQIYKTPPIKDFGGFNFSQILPDPSKPSKRSFIEDLLFNKVTLADAGFIKQYGDCLGDIAARDLICAQKFNGLTVLPPLLTDEMIAQYTSALLAGTITSGWTFGAGAALQIPFAMQMAYRFNGIGVTQNVLYENQKLIANQFNSAIGKIQDSLSSTASALGKLQDVVNQNAQALNTLVKQLSSNFGAISSVLNDILSRLDKVEAEVQIDRLITGRLQSLQTYVTQQLIRAAEIRASANLAATKMSECVLGQSKRVDFCGKGYHLMSFPQSAPHGVVFLHVTYVPAQEKNFTTAPAICHDGKAHFPREGVFVSNGTHWFVTQRNFYEPQIITTDNTFVSGNCDVVIGIVNNTVYDPLQPELDSGGGGSDIIKLLNEQVNKEMQSSNLYMSMSSWCYTHSLDGAGLFLFDHAAEEYEHAKKLIIFLNENNVPVQLTSISAPEHKFEGLTQIFQKAYEHEQHISESINNIVDHAIKSKDHATFNFLQWYVAEQHEEEVLFKDILDKIELIGNENHGLYLADQYVKGIAKSRKS

SEQ ID NO: 8691 - protein, 1315 aa, Artificial Sequence
  SARS-CoV-2/Belgium/ULG-6939/2020__EPI_ISL_417020 spike protein (1-1147) Ferritin construct
MFVFLVLLPLVSSQCVNLTTRTQLPPAYTNSFTRGVYYPDKVFRSSVLHSTQDLFLPFFSNVTWFHAIHVSGTNGTKRFDNPVLPFNDGVYFASTEKSNIIRGWIFGTTLDSKTQSLLIVNNATNVVIKVCEFQFCNDPFLGVYYHKNNKSWMESEFRVYSSANNCTFEYVSQPFLMDLEGKQGNFKNLREFVFKNIDGYFKIYSKHTPINLVRDLPQGFSALEPLVDLPIGINITRFQTLLALHRSYLTPGDSSSGWTAGAAAYYVGYLQPRTFLLKYNENGTITDAVDCALDPLSETKCTLKSFTVEKGIYQTSNFRVQPTESIVRFPNITNLCPFGEVFNATRFASVYAWNRKRISNCVADYSVLYNSASFSTFKCYGVSPTKLNDLCFTNVYADSFVIRGDEVRQIAPGQTGKIADYNYKLPDDFTGCVIAWNSNNLDSKVGGNYNYLYRLFRKSNLKPFERDISTEIYQAGSTPCNGVEGFNCYFPLQSYGFQPTNGVGYQPYRVVVLSFELLHAPATVCGPKKSTNLVKNKCVNFNFNGLTGTGVLTESNKKFLPFQQFGRDIADTTDAVRDPQTLEILDITPCSFGGVSVITPGTNTSNQVAVLYQGVNCTEVPVAIHADQLTPTWRVYSTGSNVFQTRAGCLIGAEHVNNSYECDIPIGAGICASYQTQTNSPRRARSVASQSIIAYTMSLGAENSVVYSNNSIAIPTNFTISVTTEILPVSMTKTSVDCTMYICGDSTECSNLLLQYGSFCTQLNRALTGIAVEQDKNTQEVFAQVKQIYKTPPIKDFGGFNFSQILPDPSKPSKRSFIEDLLFNKVTLADAGFIKQYGDCLGDIAARDLICAQKFNGLTVLPPLLTDEMIAQYTSALLAGTITSGWTFGAGAALQIPFAMQMAYRFNGIGVTQNVLYENQKLIANQFNSAIGKIQDSLSSTASALGKLQDVVNQNAQALNTLVKQLSSNFGAISSVLNDILSRLDKVEAEVQIDRLITGRLQSLQTYVTQQLIRAAEIRASANLAATKMSECVLGQSKRVDFCGKGYHLMSFPQSAPHGVVFLHVTYVPAQEKNFTTAPAICHDGKAHFPREGVFVSNGTHWFVTQRNFYEPQIITTDNTFVSGNCDVVIGIVNNTVYDPLQPELDSGGGGSDIIKLLNEQVNKEMQSSNLYMSMSSWCYTHSLDGAGLFLFDHAAEEYEHAKKLIIFLNENNVPVQLTSISAPEHKFEGLTQIFQKAYEHEQHISESINNIVDHAIKSKDHATFNFLQWYVAEQHEEEVLFKDILDKIELIGNENHGLYLADQYVKGIAKSRKS

SEQ ID NO: 8692 - protein, 1315 aa, Artificial Sequence
  SARS-CoV-2/France/HF2496/2020__EPI_ISL_418231 spike protein (1-1147) Ferritin construct
MFVFLVLLPLVSSQCVNLTTRTQLPPAYTNSFTRGVYYPDKVFRSSVLHSTQDLFLPFFSNVTWFHAIHVSGTNGTKRFDNPVLPFNDGVYFASTEKSNIIRGWIFGTTLDSKTQSLLIVNNATNVVIKVCEFQFCNDPFLGVYYHKNNKSWMESEFRVYSSANNCTFEYVSQPFLMDLEGKQGNFKNLREFVFKNIDGYFKIYSKHTPINLVRDLPQGFSALEPLVDLPIGINITRFQTLLALHRSYLTPGDSSSGWTAGAAAYYVGYLQPRTFLLKYNENGTITDAVDCALDPLSETKCTLKSFTVEKGIYQTSNFRVQPTESIVRFPNITNLCPFGEVFNATRFASVYAWNRKRISNCVADYSVLYNSASFSTFKCYGVSPTKLNDLCFTNVYADSFVIRGDEVRQIAPGQTGKIADYNYKLPDDFTGCVIAWNSNNLDSKVGGNYNYLYRLFRKSNLKPFERDISTEIYQAGSTPCNGVEGFNCYFPLQSYGFQPTNGVGYQPYRVVVLSFELLHAPATVCGPKKSTNLVKNKCVNFNFNGLTGTGVLTESNKKFLPFQQFGRDIADTTDAVRDPQTLEILDITPCSFGGVSVITPGTNTSNQVAVLYQGVNCTEVPVAIHADQLTPTWRVYSTGSNVFQTRAGCLIGAEHVNNSYECDIPIGAGICASYQTQTNSPRRARSVASQSIIAYTMSLGAENSVAYSNNSIAIPTNFTISVTTEILPVSMTKTSVDCTMYICGDSTECSNLLLQYGSFCTQLNRALTGIAVEQDKNTQEVFAQVKQIYKTPPIKDFGGFNFSQILPDPSKPSKRSFIEDLLFNKVTLADAGFIKQYGDCLGDIVARDLICAQKFNGLTVLPPLLTDEMIAQYTSALLAGTITSGWTFGAGAALQIPFAMQMAYRFNGIGVTQNVLYENQKLIANQFNSAIGKIQDSLSSTASALGKLQDVVNQNAQALNTLVKQLSSNFGAISSVLNDILSRLDKVEAEVQIDRLITGRLQSLQTYVTQQLIRAAEIRASANLAATKMSECVLGQSKRVDFCGKGYHLMSFPQSAPHGVVFLHVTYVPAQEKNFTTAPAICHDGKAHFPREGVFVSNGTHWFVTQRNFYEPQIITTDNTFVSGNCDVVIGIVNNTVYDPLQPELDSGGGGSDIIKLLNEQVNKEMQSSNLYMSMSSWCYTHSLDGAGLFLFDHAAEEYEHAKKLIIFLNENNVPVQLTSISAPEHKFEGLTQIFQKAYEHEQHISESINNIVDHAIKSKDHATFNFLQWYVAEQHEEEVLFKDILDKIELIGNENHGLYLADQYVKGIAKSRKS

SEQ ID NO: 8693 - protein, 1315 aa, Artificial Sequence
  SARS-CoV-2/USA/WA-UW291/2020__EPI_ISL_418076 spike protein (1-1147) Ferritin construct
MFVFLVLLPLVSSQCVNLTTRTQLPPAYTNSFTRGVYYPDKVFRSSVLHSTQDLFLPFFSNVTWFHAIHVSGTNGTKRFDNPVLPFNDGVYFASTEKSNIIRGWIFGTTLDSKTQSLLIVNNATNVVIKVCEFQFCNDPFLGVYYHKNNKSWMESEFRVYSSANNCTFEYVSQPFLMDLEGKQGNFKNLREFVFKNIDGYFKIYSKHTPINLVRDLPQGFSALEPLVDLPIGINITRFQTLLALHRSYLTPGDSSSGWTAGAAAYYVGYLQPRTFLLKYNENGTITDAVDCALDPLSETKCTLKSFTVEKGIYQTSNFRVQPTESIVRFPNITNLCPFGEVFNATRFASVYAWNRKRISNCVADYSVLYNSASFSTFKCYGVSPTKLNDLCFTNVYADSFVIRGDEVRQIAPGQTGKIADYNYKLPDDFTGCVIAWNSNNLDSKVGGNYNYLYRLFRKSNLKPFERDISTEIYQAGSTPCNGVEGFNCYFPLQSYGFQPTNGVGYQPYRVVVLSFELLHAPATVCGPKKSTNLVKNKCVNFNFNGLTGTGVLTESNKKFLPFQQFGRDIADTTDAVRDPQTLEILDITPCSFGGVSVITPGTNTSNQVAVLYQGVNCTEVPVAIHADQLTPTWRVYSTGSNVFQTRAGCLIGAEHVNNSYECDIPIGAGICASYQTQTNSPRRARSVASQSIIAYTMSLGAENSVAYSNNSIAIPTNFTISVTTEILPVSMTKTSVDCTMYICGDSTECSNLLLQYGSFCTQLNRALTGIAVEQDKNTQEVFAQVKQIYKTPPIKDFGGFNFSQILPDPSKPSKRSFIEDLLFNKVTLADAGFIKQYGDCLGDIAARDLICAQKFNGLTVLPPLLTDEMIAQYTSALLAGTITSGWTFGAGAALQIPFAMQMAYRFNGIGVTQNVLYENQKLIANQFNSAIGKIQYSLSSTASALGKLQDVVNQNAQALNTLVKQLSSNFGAISSVLNDILSRLDKVEAEVQIDRLITGRLQSLQTYVTQQLIRAAEIRASANLAATKMSECVLGQSKRVDFCGKGYHLMSFPQSAPHGVVFLHVTYVPAQEKNFTTAPAICHDGKAHFPREGVFVSNGTHWFVTQRNFYEPQIITTDNTFVSGNCDVVIGIVNNTVYDPLQPELDSGGGGSDIIKLLNEQVNKEMQSSNLYMSMSSWCYTHSLDGAGLFLFDHAAEEYEHAKKLIIFLNENNVPVQLTSISAPEHKFEGLTQIFQKAYEHEQHISESINNIVDHAIKSKDHATFNFLQWYVAEQHEEEVLFKDILDKIELIGNENHGLYLADQYVKGIAKSRKS

SEQ ID NO: 8694 - protein, 1315 aa, Artificial Sequence; identical to SEQ ID NO: 8657
  SARS-CoV-2/Portugal/PT0034/2020__EPI_ISL_418019 spike protein (1-1147) Ferritin construct

SEQ ID NO: 8695 - protein, 1315 aa, Artificial Sequence; identical to SEQ ID NO: 8649
  SARS-CoV-2/Iceland/202/2020__EPI_ISL_417750 spike protein (1-1147) Ferritin construct

SEQ ID NO: 8696 - protein, 1315 aa, Artificial Sequence
  SARS-CoV-2/USA/WA-UW261/2020__EPI_ISL_418046 spike protein (1-1147) Ferritin construct
MFVFLVLLPLVSSQCVNLTTRTQLPPAYTNSFTRGVYYPDKVFRSSVLHSTQDLFLPFFSNVTWFHAIHVSGTNGTKRFDNPVLPFNDGVYFASTEKSNIIRGWIFGTTLDSKTQSLLIVNNATNVVIKVCEFQFCNDPFLGVYYHKNNKSWMESEFRVYSSANNCTFEYVSQPFLMDLEGKQGNFKNLREFVFKNIDGYFKIYSKHTPINLVRDLPQGFSALEPLVDLPIGINITRFQTLLALHRSYLTPGDSSSGWTAGAAAYYVGYLQPRTFLLKYNENGTITDAVDCALDPLSETKCTLKSFTVEKGIYQTSNFRVQPTESIVRFPNITNLCPFGEVFNATRFTSVYAWNRKRISNCVADYSVLYNSASFSTFKCYGVSPTKLNDLCFTNVYADSFVIRGDEVRQIAPGQTGKIADYNYKLPDDFTGCVIAWNSNNLDSKVGGNYNYLYRLFRKSNLKPFERDISTEIYQAGSTPCNGVEGFNCYFPLQSYGFQPTNGVGYQPYRVVVLSFELLHAPATVCGPKKSTNLVKNKCVNFNFNGLTGTGVLTESNKKFLPFQQFGRDIADTTDAVRDPQTLEILDITPCSFGGVSVITPGTNTSNQVAVLYQDVNCTEVPVAIHADQLTPTWRVYSTGSNVFQTRAGCLIGAEHVNNSYECDIPIGAGICASYQTQTNSPRRARSVASQSIIAYTMSLGAENSVAYSNNSIAIPTNFTISVTTEILPVSMTKTSVDCTMYICGDSTECSNLLLQYGSFCTQLNRALTGIAVEQDKNTQEVFAQVKQIYKTPPIKDFGGFNFSQILPDPSKPSKRSFIEDLLFNKVTLADAGFIKQYGDCLGDIAARDLICAQKFNGLTVLPPLLTDEMIAQYTSALLAGTITSGWTFGAGAALQIPFAMQMAYRFNGIGVTQNVLYENQKLIANQFNSAIGKIQDSLSSTASALGKLQDVVNQNAQALNTLVKQLSSNFGAISSVLNDILSRLDKVEAEVQIDRLITGRLQSLQTYVTQQLIRAAEIRASANLAATKMSECVLGQSKRVDFCGKGYHLMSFPQSAPHGVVFLHVTYVPAQEKNFTTAPAICHDGKAHFPREGVFVSNGTHWFVTQRNFYEPQIITTDNTFVSGNCDVVIGIVNNTVYDPLQPELDSGGGGSDIIKLLNEQVNKEMQSSNLYMSMSSWCYTHSLDGAGLFLFDHAAEEYEHAKKLIIFLNENNVPVQLTSISAPEHKFEGLTQIFQKAYEHEQHISESINNIVDHAIKSKDHATFNFLQWYVAEQHEEEVLFKDILDKIELIGNENHGLYLADQYVKGIAKSRKS

SEQ ID NO: 8697 - protein, 1315 aa, Artificial Sequence
  SARS-CoV-2/Portugal/PT0035/2020__EPI_ISL_418020 spike protein (1-1147) Ferritin construct
MFVFLVLLPLVSSQCVNLTTRTQLPPAYTNSFTRGVYYPDKVFRSSVLHSTQDLFLPFFSNVTWFHAIHVSGTNGTKRFDNPVLPFNDGVYFASTEKSNIIRGWIFGTTLDSKTQSLLIVNNATNVVIKVCEFQFCNDPFLGVYYHKNNKSWMESEFRVYSSANNCTFEYVSQPFLMDLEGKQGNFKNLREFVFKNIDGYFKIYSKHTPINLVRDLPQGFSALEPLVDLPIGINITRFQTLLALHRSYLTPGDSSSGWTAGAAAYYVGYLQPRTFLLKYNENGTITDAVDCALDPLSETKCTLKSFTVEKGIYQTSNFRVQPTESIVRFPNITNLCPFGEVFNATRFASVYAWNRKRISNCVADYSVLYNSASFSTFKCYGVSPTKLNDLCFTNVYADSFVIRGDEVRQIAPGQTGKIADYNYKLPDDFTGCVIAWNSNNLDSKVGGNYNYLYRLFRKSNLKPFERDISTEIYQAGSTPCNGVEGFNCYFPLQSYGFQPTNGVGYQPYRVVVLSFELLHAPATVCGPKKSTNLVKNKCVNFNFNGLTGTGVLTESNKKFLPFQQFGRDIADTTDAVRDPQTLEILDITPCSFGGVSVITPGTNTSNQVAVLYQDVNCTEVPVAIHADQLTPTWRVYSTGSNVFQTRAGCLIGAEHVNNSYECDIPIGAGICASYQTQTNSPRRARSVASQSIIAYTMSLGAENSVAYSNNSIAIPTNFTISVTTEILPVSMTKTSVDCTMYICGDSTECSNLLLQYGSFCTQLNRALTGIAVEQDKNTQEVFAQVKQIYKTPPIKDFGGFNFSQILPDPSKPSKRSFIEDLLFNKVTLADAGFIKQYGDCLGDISARDLICAQKFNGLTVLPPLLTDEMIAQYTSALLAGTITSGWTFGAGAALQIPFAMQMAYRFNGIGVTQNVLYENQKLIANQFNSAIGKIQDSLSSTASALGKLQDVVNQNAQALNTLVKQLSSNFGAISSVLNDILSRLDKVEAEVQIDRLITGRLQSLQTYVTQQLIRAAEIRASANLAATKMSECVLGQSKRVDFCGKGYHLMSFPQSAPHGVVFLHVTYVPAQEKNFTTAPAICHDGKAHFPREGVFVSNGTHWFVTQRNFYEPQIITTDNTFVSGNCDVVIGIVNNTVYDPLQPELDSGGGGSDIIKLLNEQVNKEMQSSNLYMSMSSWCYTHSLDGAGLFLFDHAAEEYEHAKKLIIFLNENNVPVQLTSISAPEHKFEGLTQIFQKAYEHEQHISESINNIVDHAIKSKDHATFNFLQWYVAEQHEEEVLFKDILDKIELIGNENHGLYLADQYVKGIAKSRKS

SEQ ID NO: 8698 - protein, 1315 aa, Artificial Sequence
  SARS-CoV-2/USA/NY-NYUMC7/2020__EPI_ISL_418192 spike protein (1-1147) Ferritin construct
MFVFLVLLPLVSSQCVNLTTRTQLPPAYTNSFTRGVYYPDKVFRSSVLHSTQDLFLPFFSNVTWFHAIHVSGTNGTKRFDNPVLPFNDGVYFASTEKSNIIRGWIFGTTLDSKTQSLLIVNNATNVVIKVCEFQFCNDPFLGVYHHKNNKSWMESEFRVYSSANNCTFEYVSQPFLMDLEGKQGNFKNLREFVFKNIDGYFKIYSKHTPINLVRDLPQGFSALEPLVDLPIGINITRFQTLLALHRSYLTPGDSSSGWTAGAAAYYVGYLQPRTFLLKYNENGTITDAVDCALDPLSETKCTLKSFTVEKGIYQTSNFRVQPTESIVRFPNITNLCPFGEVFNATRFASVYAWNRKRISNCVADYSVLYNSASFSTFKCYGVSPTKLNDLCFTNVYADSFVIRGDEVRQIAPGQTGKIADYNYKLPDDFTGCVIAWNSNNLDSKVGGNYNYLYRLFRKSNLKPFERDISTEIYQAGSTPCNGVEGFNCYFPLQSYGFQPTNGVGYQPYRVVVLSFELLHAPATVCGPKKSTNLVKNKCVNFNFNGLTGTGVLTESNKKFLPFQQFGRDIADTTDAVRDPQTLEILDITPCSFGGVSVITPGTNTSNQVAVLYQGVNCTEVPVAIHADQLTPTWRVYSTGSNVFQTRAGCLIGAEHVNNSYECDIPIGAGICASYQTQTNSPRRARSVASQSIIAYTMSLGAENSVAYSNNSIAIPTNFTISVTTEILPVSMTKTSVDCTMYICGDSTECSNLLLQYGSFCTQLNRALTGIAVEQDKNTQEVFAQVKQIYKTPPIKDFGGFNFSQILPDPSKPSKRSFIEDLLFNKVTLADAGFIKQYGDCLGDIAARDLICAQKFNGLTVLPPLLTDEMIAQYTSALLAGTITSGWTFGAGAALQIPFAMQMAYRFNGIGVTQNVLYENQKLIANQFNSAIGKIQDSLSSTASALGKLQDVVNQNAQALNTLVKQLSSNFGAISSVLNDILSRLDKVEAEVQIDRLITGRLQSLQTYVTQQLIRAAEIRASANLAATKMSECVLGQSKRVDFCGKGYHLMSFPQSAPHGVVFLHVTYVPAQEKNFTTAPAICHDGKAHFPREGVFVSNGTHWFVTQRNFYEPQIITTDNTFVSGNCDVVIGIVNNTVYDPLQPELDSGGGGSDIIKLLNEQVNKEMQSSNLYMSMSSWCYTHSLDGAGLFLFDHAAEEYEHAKKLIIFLNENNVPVQLTSISAPEHKFEGLTQIFQKAYEHEQHISESINNIVDHAIKSKDHATFNFLQWYVAEQHEEEVLFKDILDKIELIGNENHGLYLADQYVKGIAKSRKS

SEQ ID NO: 8699 - protein, 1315 aa, Artificial Sequence
  SARS-CoV-2/Iceland/189/2020__EPI_ISL_417709 spike protein (1-1147) Ferritin construct
MFVFLVLLPLVSSQCVNLTTRTQLPPAYTNSFTRGVYYPDKVFRSSVLHSTQDLFLPFFSNVTWFHAIHVSGTNGTKRFDNPVLPFNDGVYFASTEKSNIIRGWIFGTTLDSKTQSLLIVNNATNVVIKVCEFQFCNDPFLGVYYHKNNKSWMESEFRVYSSANNCTFEYVSQPFLMDLEGKQGNFKNLREFVFKNIDGYFKIYSKHTPINLVRDLPQGFSALEPLVDLPIGINITRFQTLLALHRSYLTPGDSSSGWTAGAAAYYVGYLQPRTFLLKYNENGTITDAVDCALDPLSETKCTLKSFTVEKGIYQTSNFRVQPTESIVRFPNITNLCPFGEVFNATRFASVYAWNRKRISNCVADYSVLYNSASFSTFKCYGVSPTKLNDLCFTNVYADSFVIRGDEVRQIAPGQTGKIADYNYKLPDDFTGCVIAWNSNNLDSKVGGNYNYLYRLFRKSNLKPFERDISTEIYQAGSTPCNGVEGFNCYFPLQSYGFQPTNGVGYQPYRVVVLSFELLHAPATVCGPKKSTNLVKNKCVNFNFNGLTGTGVLTESNKKFLPFQQFGRDIADTTDAVRDPQTLEILDITPCSFGGVSVITPGTNTSNQVAVLYQGVNCTEVPVAIHADQLTPTWRVYSTGSNVFQTRAGCLIGAEHVNNSYECDIPIGAGICASYQTQTNSPRRARSVASQSIIAYTMSLGAENSVAYSNNSIAIPTNFTISVTTEILPVSMTKTSVDCTMYICGDSTECSNLLLQYGSFCTQLNRALTGIAVEQDKNTQEVFAQVKQIYKTPPIKDFGGFNFSQILPDPSKPSKRSFIEDLLFNKVTLADAGFTKQYGDCLGDIAARDLICAQKFNGLTVLPPLLTDEMIAQYTSALLAGTITSGWTFGAGAALQIPFAMQMAYRFNGIGVTQNVLYENQKLIANQFNSAIGKIQDSLSSTASALGKLQDVVNQNAQALNTLVKQLSSNFGAISSVLNDILSRLDKVEAEVQIDRLITGRLQSLQTYVTQQLIRAAEIRASANLAATKMSECVLGQSKRVDFCGKGYHLMSFPQSAPHGVVFLHVTYVPAQEKNFTTAPAICHDGKAHFPREGVFVSNGTHWFVTQRNFYEPQIITTDNTFVSGNCDVVIGIVNNTVYDPLQPELDSGGGGSDIIKLLNEQVNKEMQSSNLYMSMSSWCYTHSLDGAGLFLFDHAAEEYEHAKKLIIFLNENNVPVQLTSISAPEHKFEGLTQIFQKAYEHEQHISESINNIVDHAIKSKDHATFNFLQWYVAEQHEEEVLFKDILDKIELIGNENHGLYLADQYVKGIAKSRKS

SEQ ID NO: 8700 - protein, 1315 aa, Artificial Sequence
  SARS-CoV-2/Australia/NSW56/2020__EPI_ISL_417408 spike protein (1-1147) Ferritin construct
MFVFLVLLPLVSSQCVNLTTRTQLPPAYTNSFTRGVYYPDKVFRSSVLHSTQDLFLPFFSNVTWFHAIHVSGTNGTKRFDNPVLPFNDGVYFASTEKSNIIRGWIFGTTLDSKTQSLLIVNNATNVVIKVCEFQFCNDPFLGVYYHKNNKSWMESEFRVYSSANNCTFEYVSQPFLMDLEGKQGNFKNLREFVFKNIDGYFKIYSKHTPINLVRDLPQGFSALEPLVDLPIGINITRFQTLLALHRSYLTPGDSSSGWTAGAAAYYVGYLQPRTFLLKYNENGTITDAVDCALDPLSETKCTLKSFTVEKGIYQTSNFRVQPTESIVRFPNITNLCPFGEVFNATRFASVYAWNRKRISNCVADYSVLYNSASFSTFKCYGVSPTKLNDLCFTNVYADSFVIRGDEVRQIAPGQTGKIADYNYKLPDDFTGCVIAWNSNNLDSKVGGNYNYLYRLFRKSNLKPFERDISTEIYQAGSTPCNGVEGFNCYFPLQSYGFQPTNGVGYQPYRVVVLSFELLHAPATVCGPKKSTNLVKNKCVNFNFNGLTGTGVLTESNKKFLPFQQFGRDIADTTDAVRDPQTLEILDITPCSFGGVSVITPGTNTSNQVAVLYQDVNCTEVPVAIHADQLTPTWRVYSTGSNVFQTRAGCLIGAEHVNNSYECDIPIGAGICASYQTQTNSPRRARSVASQSIIAYTMSLGAENSVAYSNNSIAIPTNFTISVTTEILPVSMTKTSVDCTMYICGDSTECSNLLLQYGSFCTQLNRALTGIAVEQDKNTQEVFAQVKQIYKTPPIKDFGGFNFSQILPDSSKPSKRSFIEDLLFNKVTLADAGFIKQYGDCLGDIAARDLICAQKFNGLTVLPPLLTDEMIAQYTSALLAGTITSGWTFGAGAALQIPFAMQMAYRFNGIGVTQNVLYENQKLIANQFNSAIGKIQDSLSSTASALGKLQDVVNQNAQALNTLVKQLSSNFGAISSVLNDILSRLDKVEAEVQIDRLITGRLQSLQTYVTQQLIRAAEIRASANLAATKMSECVLGQSKRVDFCGKGYHLMSFPQSAPHGVVFLHVTYVPAQEKNFTTAPAICHDGKAHFPREGVFVSNGTHWFVTQRNFYEPQIITTDNTFVSGNCDVVIGIVNNTVYDPLQPELDSGGGGSDIIKLLNEQVNKEMQSSNLYMSMSSWCYTHSLDGAGLFLFDHAAEEYEHAKKLIIFLNENNVPVQLTSISAPEHKFEGLTQIFQKAYEHEQHISESINNIVDHAIKSKDHATFNFLQWYVAEQHEEEVLFKDILDKIELIGNENHGLYLADQYVKGIAKSRKS

SEQ ID NO: 8701 - protein, 1315 aa, Artificial Sequence
  SARS-CoV-2/Iceland/280/2020__EPI_ISL_417608 spike protein (1-1147) Ferritin construct
MFVFLVLLPLVSSQCVNLTTRTQLPPAYTNSFTRGVYYPDKVFRSSVLHSTQDLFLPFFSNVTWFHAIHVSGTNGTKRFDNPVLPFNDGVYFASTEKSNIIRGWIFGTTLDSKTQSLLIVNNATNVVIKVCEFQFCNDPFLGVYYHKNNKSWMESEFRVYSSANNCTFEYVSQPFLMDLEGKQGNFKNLREFVFKNIDGYFKIYSKHTPINLVRDLPQGFSALEPLVDLPIGINITRFQTLLALHRSYLTPGDSSSGWTAGAAAYYVGYLQPRTFLLKYNENGTITDAVDCALDPLSETKCTLKSFTVEKGIYQTSNFRVQPTESIVRFPNITNLCPFGEVFNATRFASVYAWNRKRISNCVADYSVLYNSASFSTFKCYGVSPTKLNDLCFTNVYADSFVIRGDEVRQIAPGQTGKIADYNYKLPDDFTGCVIAWNSNNLDSKVGGNYNYLYRLFRKSNLKPFERDISTEIYQAGSTPCNGVEGFNCYFPLQSYGFQPTNGVGYQPYRVVVLSFELLHAPATVCGPKKSTNLVKNKCVNFNFNGLTGTGVLTESNKKFLPFQQFGRDIADTTDAVRDPQTLEILDITPCSFGGVSVITPGTNTSNQVAVLYQGVNCTEVPVAIHADQLTPTWRVYSTGSNVFQTRAGCLIGAEHVNNSYECDIPIGAGICASYHTQTNSPRRARSVASQSIIAYTMSLGAENSVAYSNNSIAIPTNFTISVTTEILPVSMTKTSVDCTMYICGDSTECSNLLLQYGSFCTQLNRALTGIAVEQDKNTQEVFAQVKQIYKTPPIKDFGGFNFSQILPDPSKPSKRSFIEDLLFNKVTLADAGFIKQYGDCLGDIAARDLICAQKFNGLTVLPPLLTDEMIAQYTSALLAGTITSGWTFGAGAALQIPFAMQMAYRFNGIGVTQNVLYENQKLIANQFNSAIGKIQDSLSSTASALGKLQDVVNQNAQALNTLVKQLSSNFGAISSVLNDILSRLDKVEAEVQIDRLITGRLQSLQTYVTQQLIRAAEIRASANLAATKMSECVLGQSKRVDFCGKGYHLMSFPQSAPHGVVFLHVTYVPAQEKNFTTAPAICHDGKAHFPREGVFVSNGTHWFVTQRNFYEPQIITTDNTFVSGNCDVVIGIVNNTVYDPLQPELDSGGGGSDIIKLLNEQVNKEMQSSNLYMSMSSWCYTHSLDGAGLFLFDHAAEEYEHAKKLIIFLNENNVPVQLTSISAPEHKFEGLTQIFQKAYEHEQHISESINNIVDHAIKSKDHATFNFLQWYVAEQHEEEVLFKDILDKIELIGNENHGLYLADQYVKGIAKSRKS

SEQ ID NO: 8702 - protein, 1315 aa, Artificial Sequence; identical to SEQ ID NO: 8657
  SARS-CoV-2/Iceland/247/2020__EPI_ISL_417575 spike protein (1-1147) Ferritin construct

SEQ ID NO: 8703 - protein, 1315 aa, Artificial Sequence
  SARS-CoV-2/Iceland/238/2020__EPI_ISL_417566 spike protein (1-1147) Ferritin construct
MFVFLVLLPLVSSQCVNLTTRTQLPPAYTNSFTRGVYYPDKVFRSSVLHSTQDLFLPFFSNVTWFHAIHVSGTNGTKRFDNPVLPFNDGVYFASTEKSNIIRGWIFGTTLDSKTQSLLIVNNATNVVIKVCEFQFCNDPFLGVYYHKNNKSWMESEFRVYSSANNCTFEYVSQPFLMDLEGKQGNFKNLREFVFKNIDGYFKIYSKHTPINLVRDLPQGFSALEPLVDLPIGINITRFQTLLALHRSYLTPGDSSSGWTAGAAAYYVGYLQPRTFLLKYNENGTITDAVDCALDPLSETKCTLKSFTVEKGIYQTSNFRVQPTESIVRFPNITNLCPFGEVFNATRFASVYAWNRKRISNCVADYSVLYNSASFSTFKCYGVSPTKLNDLCFTNVYADSFVIRGDEVRQIAPGQTGKIADYNYKLPDDFTGCVIAWNSNNLDSKVGGNYNYLYRLFRKSNLKPFERDISTEIYQAGSTPCNGVEGFNCYFPLQSYGFQPTNGVGYQPYRVVVLSFELLHAPATVCGPKKSTNLVKNKCVNFNFNGLTGTGVLTESNKKFLPFQQFGRDIADTTDAVRDPQTLEILDITPCSFGGVSVITPGTNTSNQVAVLYQGVNCTEVPVAIHADQLTPTWRVYSTGSNVFQTRAGCLIGAEHVNNSYECDIPIGAGICASYQTQTNSPRRARSVASQSIIAYTMSLGAENSVAYSNNSIAIPTNFTISVTTEILPVSMTKTSVDCTMYICGDSTECSNLLLQYGSFCTQLNRALTGIAVEQDKNTQEVFAQVKQIYKTPPIKDFGGFNFSQILPDPSKPSKRSFIEDLLFNKVTLADVGFIKQYGDCLGDIAARDLICAQKFNGLTVLPPLLTDEMIAQYTSALLAGTITSGWTFGAGAALQIPFAMQMAYRFNGIGVTQNVLYENQKLIANQFNSAIGKIQDSLSSTASALGKLQDVVNQNAQALNTLVKQLSSNFGAISSVLNDILSRLDKVEAEVQIDRLITGRLQSLQTYVTQQLIRAAEIRASANLAATKMSECVLGQSKRVDFCGKGYHLMSFPQSAPHGVVFLHVTYVPAQEKNFTTAPAICHDGKAHFPREGVFVSNGTHWFVTQRNFYEPQIITTDNTFVSGNCDVVIGIVNNTVYDPLQPELDSGGGGSDIIKLLNEQVNKEMQSSNLYMSMSSWCYTHSLDGAGLFLFDHAAEEYEHAKKLIIFLNENNVPVQLTSISAPEHKFEGLTQIFQKAYEHEQHISESINNIVDHAIKSKDHATFNFLQWYVAEQHEEEVLFKDILDKIELIGNENHGLYLADQYVKGIAKSRKS

SEQ ID NO: 8704 - protein, 1315 aa, Artificial Sequence
  SARS-CoV-2/Greece/16/2020__EPI_ISL_418265 spike protein (1-1147) Ferritin construct
MFVFLVLLPLVSSQCVNLTTRTQLPPAYTNSFTRGVYYPDKVFRSSVLHSTQDLFLPFFSNVTWFHAIHVSGTNGTKRFDNPVLPFNDGVYFASTEKSNIIRGWIFGTTLDSKTQSLLIVNNATNVVIKVCEFQFCNDPFLGVYYHKNNKSWMESEFRVYSSANNCTFEYVSQPFLMDLEGKQGNFKNLREFVFKNVDGYFKIYSKHTPINLVRDLPQGFSALEPLVDLPIGINITRFQTLLALHRSYLTPGDSSSGWTAGAAAYYVGYLQPRTFLLKYNENGTITDAVDCALDPLSETKCTLKSFTVEKGIYQTSNFRVQPTESIVRFPNITNLCPFGEVFNATRFASVYAWNRKRISNCVADYSVLYNSASFSTFKCYGVSPTKLNDLCFTNVYADSFVIRGDEVRQIAPGQTGKIADYNYKLPDDFTGCVIAWNSNNLDSKVGGNYNYLYRLFRKSNLKPFERDISTEIYQAGSTPCNGVEGFNCYFPLQSYGFQPTNGVGYQPYRVVVLSFELLHAPATVCGPKKSTNLVKNKCVNFNFNGLTGTGVLTESNKKFLPFQQFGRDIADTTDAVRDPQTLEILDITPCSFGGVSVITPGTNTSNQVAVLYQDVNCTEVPVAIHADQLTPTWRVYSTGSNVFQTRAGCLIGAEHVNNSYECDIPIGAGICASYQTQTNSPRRARSVASQSIIAYTMSLGAENSVAYSNNSIAIPTNFTISVTTEILPVSMTKTSVDCTMYICGDSTECSNLLLQYGSFCTQLNRALTGIAVEQDKNTQEVFAQVKQIYKTPPIKDFGGFNFSQILPDPSKPSKRSFIEDLLFNKVTLADAGFIKQYGDCLGDIAARDLICAQKFNGLTVLPPLLTDEMIAQYTSALLAGTITSGWTFGAGAALQIPFAMQMAYRFNGIGVTQNVLYENQKLIANQFNSAIGKIQDSLSSTASALGKLQDVVNQNAQALNTLVKQLSSNFGAISSVLNDILSRLDKVEAEVQIDRLITGRLQSLQTYVTQQLIRAAEIRASANLAATKMSECVLGQSKRVDFCGKGYHLMSFPQSAPHGVVFLHVTYVPAQEKNFTTAPAICHDGKAHFPREGVFVSNGTHWFVTQRNFYEPQIITTDNTFVSGNCDVVIGIVNNTVYDPLQPELDSGGGGSDIIKLLNEQVNKEMQSSNLYMSMSSWCYTHSLDGAGLFLFDHAAEEYEHAKKLIIFLNENNVPVQLTSISAPEHKFEGLTQIFQKAYEHEQHISESINNIVDHAIKSKDHATFNFLQWYVAEQHEEEVLFKDILDKIELIGNENHGLYLADQYVKGIAKSRKS

SEQ ID NO: 8705 - protein, 1315 aa, Artificial Sequence
  SARS-CoV-2/Iceland/319/2020__EPI_ISL_417648 spike protein (1-1147) Ferritin construct
MFVFLVLLPLVSSQCVNLTTRTQLPPAYTNSFTRGVYYPDKVFRSSVLHSTQDLFLPFFSNVTWFHAIHVSGTNGTKRFDNPVLPFNDGVYFASTEKSNIIRGWIFGTTLDSKTQSLLIVNNATNVVIKVCEFQFCNDPFLGVYYHKNNKSWMESEFRVYSSANNCTFEYVSQPFLIDLEGKQGNFKNLREFVFKNIDGYFKIYSKHTPINLVRDLPQGFSALEPLVDLPIGINITRFQTLLALHRSYLTPGDSSSGWTAGAAAYYVGYLQPRTFLLKYNENGTITDAVDCALDPLSETKCTLKSFTVEKGIYQTSNFRVQPTESIVRFPNITNLCPFGEVFNATRFASVYAWNRKRISNCVADYSVLYNSASFSTFKCYGVSPTKLNDLCFTNVYADSFVIRGDEVRQIAPGQTGKIADYNYKLPDDFTGCVIAWNSNNLDSKVGGNYNYLYRLFRKSNLKPFERDISTEIYQAGSTPCNGVEGFNCYFPLQSYGFQPTNGVGYQPYRVVVLSFELLHAPATVCGPKKSTNLVKNKCVNFNFNGLTGTGVLTESNKKFLPFQQFGRDIADTTDAVRDPQTLEILDITPCSFGGVSVITPGTNTSNQVAVLYQGVNCTEVPVAIHADQLTPTWRVYSTGSNVFQTRAGCLIGAEHVNNSYECDIPIGAGICASYQTQTNSPRRARSVASQSIIAYTMSLGAENSVAYSNNSIAIPTNFTISVTTEILPVSMTKTSVDCTMYICGDSTECSNLLLQYGSFCTQLNRALTGIAVEQDKNTQEVFAQVKQIYKTPPIKDFGGFNFSQILPDPSKPSKRSFIEDLLFNKVTLADAGFIKQYGDCLGDIAARDLICAQKFNGLTVLPPLLTDEMIAQYTSALLAGTITSGWTFGAGAALQIPFAMQMAYRFNGIGVTQNVLYENQKLIANQFNSAIGKIQDSLSSTASALGKLQDVVNQNAQALNTLVKQLSSNFGAISSVLNDILSRLDKVEAEVQIDRLITGRLQSLQTYVTQQLIRAAEIRASANLAATKMSECVLGQSKRVDFCGKGYHLMSFPQSAPHGVVFLHVTYVPAQEKNFTTAPAICHDGKAHFPREGVFVSNGTHWFVTQRNFYEPQIITTDNTFVSGNCDVVIGIVNNTVYDPLQPELDSGGGGSDIIKLLNEQVNKEMQSSNLYMSMSSWCYTHSLDGAGLFLFDHAAEEYEHAKKLIIFLNENNVPVQLTSISAPEHKFEGLTQIFQKAYEHEQHISESINNIVDHAIKSKDHATFNFLQWYVAEQHEEEVLFKDILDKIELIGNENHGLYLADQYVKGIAKSRKS

SEQ ID NO: 8706 - protein, 1315 aa, Artificial Sequence
  SARS-CoV-2/Congo/94/2020__EPI_ISL_417947 spike protein (1-1147) Ferritin construct
MFVFLVLLPLVSSQCVNLTTRTQLPPAYTNSFTRGVYYPDKVFRSSVLHSTQDLFLPFFSNVTWFHAIHVSGTNGTKRFDNPVLPFNDGVYFASTEKSNIIRGWIFGTTLDSKTQSLLIVNNATNVVIKVCEFQFCNDPFLGVYYHKNNKSWMESEFRVYSSANNCTFEYVSQPFLMDLEGKQGNFKNLREFVFKNIDGYFKIYSKHTPINLVRDLPQGFSALEPLVDLPIGINITRFQTLLALHRSYLTPGDSSSGWTAGAAAYYVGYLQPRTFLLKYNENGTITDAVDCALDPLSETKCTLKSFTVEKGIYQTSNFRVQPTESIVRFPNITNLCPFGEVFNATRFASVYAWNRKRISNCVADYSVLYNSASFSTFKCYGVSPTKLNDLCFTNVYADSFVIRGDEVRQIAPGQTGKIADYNYKLPDDFTGCVIAWNSNNLDSKVGGNYNYLYRLFRKSNLKPFERDISTEIYQAGSTPCNGVEGFNCYFPLQSYGFQPTNGVGYQPYRVVVLSFELLHAPATVCGPKKSTNLVKNKCVNFNFNGLTGTGVLTESNKKFLPFQQFGRDIADTTDAVRDPQTLEILDITPCSFGGVSVITPGTNTSNQVAVLYQGVNCTEVPVAIHADQLTPTWRVYSTGSNVFQTRAGCLIGAEHVNNSYECDIPIGAGICASYQTQTNSPRRARSVASQSIIAYTMSLGAENSVAYSNNSIAIPTNFTISVTTEILPVSMTKTSVDCTMYICGDSTECSNLLLQYGSFCTQLNRALTGIAVEQDKNTQEVFAQVKQIYKTPPIKDFGGFNFSQILPDPSKPSKRSFIEDILFNKVTLADAGFIKQYGDCLGDIAARDLICAQKFNGLTVLPPLLTDEMIAQYTSALLAGTITSGWTFGAGAALQIPFAMQMAYRFNGIGVTQNVLYENQKLIANQFNSAIGKIQDSLSSTASALGKLQDVVNQNAQALNTLVKQLSSNFGAISSVLNDILSRLDKVEAEVQIDRLITGRLQSLQTYVTQQLIRAAEIRASANLAATKMSECVLGQSKRVDFCGKGYHLMSFPQSAPHGVVFLHVTYVPAQEKNFTTAPAICHDGKAHFPREGVFVSNGTHWFVTQRNFYEPQIITTDNTFVSGNCDVVIGIVNNTVYDPLQPELDSGGGGSDIIKLLNEQVNKEMQSSNLYMSMSSWCYTHSLDGAGLFLFDHAAEEYEHAKKLIIFLNENNVPVQLTSISAPEHKFEGLTQIFQKAYEHEQHISESINNIVDHAIKSKDHATFNFLQWYVAEQHEEEVLFKDILDKIELIGNENHGLYLADQYVKGIAKSRKS

SEQ ID NO: 8707 - protein, 1315 aa, Artificial Sequence
  SARS-CoV-2/Congo/158/2020__EPI_ISL_417950 spike protein (1-1147) Ferritin construct
MFVFLVLLPLVSSQCVNLTTRTQLPPAYTNSFTRGVYYPDKVFRSSVLHSTQDLFLPFFSNVTWFHAIHVSGTNGTKRFDNPVLPFNDGVYFASTEKSNIIRGWIFGTTLDSKTQSLLIVNNATNVVIKVCEFQFCNDPFLGVYYHKNNKSWMESEFRVYSSANNCTFEYVSQPFLMDLEGKQGNFKNLREFVFKNIDGYFKIYSKHTPINLVRDLPQGFSALEPLVDLPIGINITRFQTLLALHRSYLTPGDSSSGWTAGAAAYYVGYLQPRTFLLKYNENGTITDAVDCALDPLSETKCTLKSFTVEKGIYQTSNFRVQPTESIVRFPNITNLCPFGEVFNATRFASVYAWNRKRISNCVADYSVLYNSASFSTFKCYGVSPTKLNDLCFTNVYADSFVIRGDEVRQIAPGQTGKIADYNYKLPDDFTGCVIAWNSNNLDSKVGGNYNYLYRLFRKSNLKPFERDISTEIYQAGSTPCNGVEGFNCYFPLQSYGFQPTNGVGYQPYRVVVLSFELLHAPATVCGPKKSTNLVKNKCVNFNFNGLTGTGVLTESNKKFLPFQQFGRDIADTTDAVRDPQTLEILDITPCSFGGVSVITPGTNTSNQVAVLYQDVNCTEVPVAIHADQLTPTWRVYSTGSNVFQTRAGCLIGAEHVNNSYECDIPIGAGICASYQTQTNSPRRARSVASQSIIAYTMSLGAENSVAYSNNSIAIPTNFTISVTTEILPVSMTKTSVDCTMYICGDSTECSNLLLQYGSFCTQLNRALTGIAVEQDKNTQEVFAQVKQIYKTPPIKDFGGFNFSQILPDPSKPSKRSFIEDLLFNKVTLADAGFIKQYGDCLGDIAARDLICAQKFNGLTVLPPLLTDEMIAQYTSALLAGTITSGWTFGAGAALQIPFAMQMAYRFNGIGVTQNVLYENQKLIANQFNSAIGKIQDSLSSTASALGKLQDVVNQNAQALNTLVKQLSSNFGAISSVLNDILSRLDKVEAEVQIDRLITGRLQSLQTYVTQQLIRAAEIRASANLAATKMSECVLGQSKRVDFCGKGYHLMSFPQSAPHGVVFLHVTYVPAQEKNFTTAPAICHDGKAHFPREGVFVSNGTHWFVTQRNFYEPQIITTDNTFLSGNCDVVIGIVNNTVYDPLQPELDSGGGGSDIIKLLNEQVNKEMQSSNLYMSMSSWCYTHSLDGAGLFLFDHAAEEYEHAKKLIIFLNENNVPVQLTSISAPEHKFEGLTQIFQKAYEHEQHISESINNIVDHAIKSKDHATFNFLQWYVAEQHEEEVLFKDILDKIELIGNENHGLYLADQYVKGIAKSRKS

SEQ ID NO: 8708 - protein, 1315 aa, Artificial Sequence
  SARS-CoV-2/USA/UT-00034/2020__EPI_ISL_417977 spike protein (1-1147) Ferritin construct
MFVFLVLLPLVSSQCVNLTTRTQLPPAYTNSFTRGVYYPDKVFRSSVLHSTQDLFLPFFSNVTWFHAIHVSGTNGTKRFDNPVLPFNDGVYFASTEKSNIIRGWIFGTTLDSKTQSLLIVNNATNVVIKVCEFQFCNDPFLGVYYYKNNKSWMESEFRVYSSANNCTFEYVSQPFLMDLEGKQGNFKNLREFVFKNIDGYFKIYSKHTPINLVRDLPQGFSALEPLVDLPIGINITRFQTLLALHRSYLTPGDSSSGWTAGAAAYYVGYLQPRTFLLKYNENGTITDAVDCALDPLSETKCTLKSFTVEKGIYQTSNFRVQPTESIVRFPNITNLCPFGEVFNATRFASVYAWNRKRISNCVADYSVLYNSASFSTFKCYGVSPTKLNDLCFTNVYADSFVIRGDEVRQIAPGQTGKIADYNYKLPDDFTGCVIAWNSNNLDSKVGGNYNYLYRLFRKSNLKPFERDISTEIYQAGSTPCNGVEGFNCYFPLQSYGFQPTNGVGYQPYRVVVLSFELLHAPATVCGPKKSTNLVKNKCVNFNFNGLTGTGVLTESNKKFLPFQQFGRDIADTTDAVRDPQTLEILDITPCSFGGVSVITPGTNTSNQVAVLYQGVNCTEVPVAIHADQLTPTWRVYSTGSNVFQTRAGCLIGAEHVNNSYECDIPIGAGICASYQTQTNSPRRARSVASQSIIAYTMSLGAENSVAYSNNSIAIPTNFTISVTTEILPVSMTKTSVDCTMYICGDSTECSNLLLQYGSFCTQLNRALTGIAVEQDKNTQEVFAQVKQIYKTPPIKDFGGFNFSQILPDPSKPSKRSFIEDLLFNKVTLADAGFIKQYGDCLGDIAARDLICAQKFNGLTVLPPLLTDEMIAQYTSALLAGTITSGWTFGAGAALQIPFAMQMAYRFNGIGVTQNVLYENQKLIANQFNSAIGKIQDSLSSTASALGKLQDVVNQNAQALNTLVKQLSSNFGAISSVLNDILSRLDKVEAEVQIDRLITGRLQSLQTYVTQQLIRAAEIRASANLAATKMSECVLGQSKRVDFCGKGYHLMSFPQSAPHGVVFLHVTYVPAQEKNFTTAPAICHDGKAHFPREGVFVSNGTHWFVTQRNFYEPQIITTDNTFVSGNCDVVIGIVNNTVYDPLQPELDSGGGGSDIIKLLNEQVNKEMQSSNLYMSMSSWCYTHSLDGAGLFLFDHAAEEYEHAKKLIIFLNENNVPVQLTSISAPEHKFEGLTQIFQKAYEHEQHISESINNIVDHAIKSKDHATFNFLQWYVAEQHEEEVLFKDILDKIELIGNENHGLYLADQYVKGIAKSRKS

SEQ ID NO: 8709 - protein, 1315 aa, Artificial Sequence
  SARS-CoV-2/USA/UT-00033/2020__EPI_ISL_417976 spike protein (1-1147) Ferritin construct
MFVFLVLLPLVSSQCVNLTTRTQLPPAYTNSFTRGVYYPDKVFRSSVLHSTQDLFLPFFSNVTWFHAIHVSGTNGTKRFDNPVLPFNDGVYFASTEKSNIIRGWIFGTTLDSKTQSLLIVNNATNVVIKVCEFQFCNDPFLGVYYHKNNKSWMESEFRVYSSANNCTFEYVSQPFLMDLEGKQGNFKNLREFVFKNIDGYFKIYSKHTPINLVRDLPQGFSALEPLVDLPIGINITRFQTLLALHRSYLTPGDSSSGLTAGAAAYYVGYLQPRTFLLKYNENGTITDAVDCALDPLSETKCTLKSFTVEKGIYQTSNFRVQPTESIVRFPNITNLCPFGEVFNATRFASVYAWNRKRISNCVADYSVLYNSASFSTFKCYGVSPTKLNDLCFTNVYADSFVIRGDEVRQIAPGQTGKIADYNYKLPDDFTGCVIAWNSNNLDSKVGGNYNYLYRLFRKSNLKPFERDISTEIYQAGSTPCNGVEGFNCYFPLQSYGFQPTNGVGYQPYRVVVLSFELLHAPATVCGPKKSTNLVKNKCVNFNFNGLTGTGVLTESNKKFLPFQQFGRDIADTTDAVRDPQTLEILDITPCSFGGVSVITPGTNTSNQVAVLYQGVNCTEVPVAIHADQLTPTWRVYSTGSNVFQTRAGCLIGAEHVNNSYECDIPIGAGICASYQTQTNSPRRARSVASQSIIAYTMSLGAENSVAYSNNSIAIPTNFTISVTTEILPVSMTKTSVDCTMYICGDSTECSNLLLQYGSFCTQLNRALTGIAVEQDKNTQEVFAQVKQIYKTPPIKDFGGFNFSQILPDPSKPSKRSFIEDLLFNKVTLADAGFIKQYGDCLGDIAARDLICAQKFNGLTVLPPLLTDEMIAQYTSALLAGTITSGWTFGAGAALQIPFAMQMAYRFNGIGVTQNVLYENQKLIANQFNSAIGKIQDSLSSTASALGKLQDVVNQNAQALNTLVKQLSSNFGAISSVLNDILSRLDKVEAEVQIDRLITGRLQSLQTYVTQQLIRAAEIRASANLAATKMSECVLGQSKRVDFCGKGYHLMSFPQSAPHGVVFLHVTYVPAQEKNFTTAPAICHDGKAHFPREGVFVSNGTHWFVTQRNFYEPQIITTDNTFVSGNCDVVIGIVNNTVYDPLQPELDSGGGGSDIIKLLNEQVNKEMQSSNLYMSMSSWCYTHSLDGAGLFLFDHAAEEYEHAKKLIIFLNENNVPVQLTSISAPEHKFEGLTQIFQKAYEHEQHISESINNIVDHAIKSKDHATFNFLQWYVAEQHEEEVLFKDILDKIELIGNENHGLYLADQYVKGIAKSRKS

SEQ ID NO: 8710 - protein, 1315 aa, Artificial Sequence
  SARS-CoV-2/USA/WI-13/2020__EPI_ISL_417516 spike protein (1-1147) Ferritin construct
MFVFLVLLPLVSSQCVNLTTRTQLPPAYTNSFTRGVYYPDKVFRSSVLHSTQDLFLPFFSNVTWFHAIHVSGTNGTKRFDNPVLPFNDGVYFASTEKSNIIRGWIFGTTLDSKTQSLLIVNNATNVVIKVCEFQFCNDPFLGVYYHKNNKSWMESEFRVYSSANNCTFEYVSQPFLMDLEGKQGNFKNLREFVFKNIDGYFKIYSKHTPINLVRDLPQGFSALEPLVDLPIGINITRFQTLLALHRSYLTPGDSSSGWTAGAAAYYVGYLQPRTFLLKYNENGTITDAVDCALDPLSETKCTLKSFTVEKGIYQTSNFRVLPTESIVRFPNITNLCPFGEVFNATRFASVYAWNRKRISNCVADYSVLYNSASFSTFKCYGVSPTKLNDLCFTNVYADSFVIRGDEVRQIAPGQTGKIADYNYKLPDDFTGCVIAWNSNNLDSKVGGNYNYLYRLFRKSNLKPFERDISTEIYQAGSTPCNGVEGFNCYFPLQSYGFQPTNGVGYQPYRVVVLSFELLHAPATVCGPKKSTNLVKNKCVNFNFNGLTGTGVLTESNKKFLPFQQFGRDIADTTDAVRDPQTLEILDITPCSFGGVSVITPGTNTSNQVAVLYQGVNCTEVPVAIHADQLTPTWRVYSTGSNVFQTRAGCLIGAEHVNNSYECDIPIGAGICASYQTQTNSPRRARSVASQSIIAYTMSLGAENSVAYSNNSIAIPTNFTISVTTEILPVSMTKTSVDCTMYICGDSTECSNLLLQYGSFCTQLNRALTGIAVEQDKNTQEVFAQVKQIYKTPPIKDFGGFNFSQILPDPSKPSKRSFIEDLLFNKVTLADAGFIKQYGDCLGDIAARDLICAQKFNGLTVLPPLLTDEMIAQYTSALLAGTITSGWTFGAGAALQIPFAMQMAYRFNGIGVTQNVLYENQKLIANQFNSAIGKIQDSLSSTASALGKLQDVVNQNAQALNTLVKQLSSNFGAISSVLNDILSRLDKVEAEVQIDRLITGRLQSLQTYVTQQLIRAAEIRASANLAATKMSECVLGQSKRVDFCGKGYHLMSFPQSAPHGVVFLHVTYVPAQEKNFTTAPAICHDGKAHFPREGVFVSNGTHWFVTQRNFYEPQIITTDNTFVSGNCDVVIGIVNNTVYDPLQPELDSGGGGSDIIKLLNEQVNKEMQSSNLYMSMSSWCYTHSLDGAGLFLFDHAAEEYEHAKKLIIFLNENNVPVQLTSISAPEHKFEGLTQIFQKAYEHEQHISESINNIVDHAIKSKDHATFNFLQWYVAEQHEEEVLFKDILDKIELIGNENHGLYLADQYVKGIAKSRKS

SEQ ID NO: 8711 - protein, 1314 aa, Artificial Sequence
  SARS-CoV-2/India/1-27/2020__EPI_ISL_413522 spike protein (1-1146) Ferritin construct
MFVFLVLLPLVSSQCVNLTTRTQLPPAYTNSFTRGVYYPDKVFRSSVLHSTQDLFLPFFSNVTWFHAIHVSGTNGTKRFDNPVLPFNDGVYFASTEKSNIIRGWIFGTTLDSKTQSLLIVNNATNVVIKVCEFQFCNDPFLGVYHKNNKSWMESEFRVYSSANNCTFEYVSQPFLMDLEGKQGNFKNLREFVFKNIDGYFKIYSKHTPINLVRDLPQGFSALEPLVDLPIGINITRFQTLLALHRSYLTPGDSSSGWTAGAAAYYVGYLQPRTFLLKYNENGTITDAVDCALDPLSETKCTLKSFTVEKGIYQTSNFRVQPTESIVRFPNITNLCPFGEVFNATRFASVYAWNRKRISNCVADYSVLYNSASFSTFKCYGVSPTKLNDLCFTNVYADSFVIRGDEVIQIAPGQTGKIADYNYKLPDDFTGCVIAWNSNNLDSKVGGNYNYLYRLFRKSNLKPFERDISTEIYQAGSTPCNGVEGFNCYFPLQSYGFQPTNGVGYQPYRVVVLSFELLHAPATVCGPKKSTNLVKNKCVNFNFNGLTGTGVLTESNKKFLPFQQFGRDIADTTDAVRDPQTLEILDITPCSFGGVSVITPGTNTSNQVAVLYQDVNCTEVPVAIHADQLTPTWRVYSTGSNVFQTRAGCLIGAEHVNNSYECDIPIGAGICASYQTQTNSPRRARSVASQSIIAYTMSLGAENSVAYSNNSIAIPTNFTISVTTEILPVSMTKTSVDCTMYICGDSTECSNLLLQYGSFCTQLNRALTGIAVEQDKNTQEVFAQVKQIYKTPPIKDFGGFNFSQILPDPSKPSKRSFIEDLLFNKVTLADAGFIKQYGDCLGDIAARDLICAQKFNGLTVLPPLLTDEMIAQYTSALLAGTITSGWTFGAGAALQIPFAMQMAYRFNGIGVTQNVLYENQKLIANQFNSAIGKIQDSLSSTASALGKLQDVVNQNAQALNTLVKQLSSNFGAISSVLNDILSRLDKVEAEVQIDRLITGRLQSLQTYVTQQLIRAAEIRASANLAATKMSECVLGQSKRVDFCGKGYHLMSFPQSAPHGVVFLHVTYVPAQEKNFTTAPAICHDGKAHFPREGVFVSNGTHWFVTQRNFYEPQIITTDNTFVSGNCDVVIGIVNNTVYDPLQPELDSGGGGSDIIKLLNEQVNKEMQSSNLYMSMSSWCYTHSLDGAGLFLFDHAAEEYEHAKKLIIFLNENNVPVQLTSISAPEHKFEGLTQIFQKAYEHEQHISESINNIVDHAIKSKDHATFNFLQWYVAEQHEEEVLFKDILDKIELIGNENHGLYLADQYVKGIAKSRKS

SEQ ID NO: 8712 - protein, 1309 aa, Artificial Sequence
  SARS-CoV-2/pangolin/Guangxi/P4L/2017__EPI_ISL_410538 spike protein (1-1141) Ferritin construct
MFVFLFVLPLVSSQCVNLTTRTGIPPGYTNSSTRGVYYPDKVFRSSILHLTQDLFLPFFSNVTWFNTINYQGGFKKFDNPVLPFNDGVYFASTEKSNIIRGWIFGTTLDARTQSLLIVNNATNVVIKVCEFQFCTDPFLGVYYHNNNKTWVENEFRVYSSANNCTFEYISQPFLMDLEGKQGNFKNLREFVFKNVDGYFKIYSKHTPIDLVRDLPRGFAALEPLVDLPIGINITRFQTLLALHRSYLTPGNLESGWTTGAAAYYVGYLQQRTFLLSYNQNGTITDAVDCSLDPLSETKCTLKSLTVEKGIYQTSNFRVQPTISIVRFPNITNLCPFGEVFNASKFASVYAWNRKRISNCVADYSVLYNSTSFSTFKCYGVSPTKLNDLCFTNVYADSFVVKGDEVRQIAPGQTGVIADYNYKLPDDFTGCVIAWNSVKQDALTGGNYGYLYRLFRKSKLKPFERDISTEIYQAGSTPCNGQVGLNCYYPLERYGFHPTTGVNYQPFRVVVLSFELLNGPATVCGPKLSTTLVKDKCVNFNFNGLTGTGVLTTSKKQFLPFQQFGRDISDTTDAVRDPQTLEILDITPCSFGGVSVITPGTNTSNQVAVLYQDVNCTEVPMAIHAEQLTPAWRVYSAGANVFQTRAGCLVGAEHVNNSYECDIPVGAGICASYHSMSSLRSVNQRSIIAYTMSLGAENSVAYSNNSIAIPTNFTISVTTEILPVSMTKTSVDCTMYICGDSIECSNLLLQYGSFCTQLNRALTGIAVEQDKNTQEVFAQVKQIYKTPPIKDFGGFNFSQILPDPSKPSKRSFIEDLLFNKVTLADAGFIKQYGDCLGDIAARDLICAQKFNGLTVLPPLLTDEMIAQYTSALLAGTITSGWTFGAGAALQIPFAMQMAYRFNGIGVTQNVLYENQKLIANQFNSAIGKIQDSLSSTASALGKLQDVVNQNAQALNTLVKQLSSNFGAISSVLNDILSRLDKVEAEVQIDRLITGRLQSLQTYVTQQLIRAAEIRASANLAATKMSECVLGQSKRVDFCGKGYHLMSFPQSAPHGVVFLHVTYVPAQEKNFTTAPAICHEGKAHFPREGVFVSNGTHWFITQRNFYEPQIITTDNTFVSGSCDVVIGIVNNTVYDPLQPELDSGGGGSDIIKLLNEQVNKEMQSSNLYMSMSSWCYTHSLDGAGLFLFDHAAEEYEHAKKLIIFLNENNVPVQLTSISAPEHKFEGLTQIFQKAYEHEQHISESINNIVDHAIKSKDHATFNFLQWYVAEQHEEEVLFKDILDKIELIGNENHGLYLADQYVKGIAKSRKS

SEQ ID NO: 8713 - protein, 1309 aa, Artificial Sequence
  SARS-CoV-2/pangolin/Guangxi/P5L/2017__EPI_ISL_410540 spike protein (1-1141) Ferritin construct
MFVFLFVLPLVSSQCVNLTTRTGIPPGYTNSSTRGVYYPDKVFRSSILHLTQDLFLPFFSNVTWFNTINYQGGFKKFDNPVLPFNDGVYFASTEKSNIIRGWIFGTTLDARTQSLLIVNNATNVVIKVCEFQFCTDPFLGVYYHNNNKTWVENEFRVYSSANNCTFEYISQPFLMDLEGKQGNFKNLREFVFKNVDGYFKIYSKHTPIDLVRDLPRGFAALEPLVDLPIGINITRFQTLLALHRSYLTPGKLESGWTTGAAAYYVGYLQQRTFLLSYNQNGTITDAVDCSLDPLSETKCTLKSLTVEKGIYQTSNFRVQPTISIVRFPNITNLCPFGEVFNASKFASVYAWNRKRISNCVADYSVLYNSTSFSTFKCYGVSPTKLNDLCFTNVYADSFVVKGDEVRQIAPGQTGVIADYNYKLPDDFTGCVIAWNSVKQDALTGGNYGYLYRLFRKSKLKPFERDISTEIYQAGSTPCNGQVGLNCYYPLERYGFHPTTGVNYQPFRVVVLSFELLNGPATVCGPKLSTTLVKDKCVNFNFNGLTGTGVLTTSKKQFLPFQQFGRDISDTTDAVRDPQTLEILDITPCSFGGVSVITPGTNTSNQVAVLYQDVNCTEVPMAIHAEQLTPAWRVYSAGANVFQTRAGCLVGAEHVNNSYECDIPVGAGICASYHSMSSFRSVNQRSIIAYTMSLGAENSVAYSNNSIAIPTNFTISVTTEILPVSMTKTSVDCTMYICGDSIECSNLLLQYGSFCTQLNRALTGIAVEQDKNTQEVFAQVKQIYKTPPIKDFGGFNFSQILPDPSKPSKRSFIEDLLFNKVTLADAGFIKQYGDCLGDIAARDLICAQKFNGLTVLPPLLTDEMIAQYTSALLAGTITSGWTFGAGAALQIPFAMQMAYRFNGIGVTQNVLYENQKLIANQFNSAIGKIQDSLSSTASALGKLQDVVNQNAQALNTLVKQLSSNFGAISSVLNDILSRLDKVEAEVQIDRLITGRLQSLQTYVTQQLIRAAEIRASANLAATKMSECVLGQSKRVDFCGKGYHLMSFPQSAPHGVVFLHVTYVPAQEKNFTTAPAICHEGKAHFPREGVFVSNGTHWFITQRNFYEPQIITTDNTFVSGSCDVVIGIVNNTVYDPLQPELDSGGGGSDIIKLLNEQVNKEMQSSNLYMSMSSWCYTHSLDGAGLFLFDHAAEEYEHAKKLIIFLNENNVPVQLTSISAPEHKFEGLTQIFQKAYEHEQHISESINNIVDHAIKSKDHATFNFLQWYVAEQHEEEVLFKDILDKIELIGNENHGLYLADQYVKGIAKSRKS

SEQ ID NO: 8714 - protein, 1309 aa, Artificial Sequence
  SARS-CoV-2/pangolin/Guangxi/P5E/2017__EPI_ISL_410541 spike protein (1-1141) Ferritin construct
MFVFLFVLPLVSSQCVNLTTRTGIPPGYTNSSTRGVYYPDKVFRSSILHLTQDLFLPFFSNVTWFNTITYQGGSKKFDNPVLPFNDGVYFASTEKSNIIRGWIFGTTLDARTQSLLIVNNATNVVIKVCEFQFCTDPFLGVYYHNNNKTWVENEFRVYSSANNCTFEYISQPFLMDLEGKQGNFKNLREFVFKNVDGYFKIYSKHTPIDLVRDLPRGFAALEPLVDLPIGINITRFQTLLALHRSYLTPGKLESGWTTGAAAYYVGYLQQRTFLLSYNQNGTITDAVDCSLDPLSETKCTLKSLTVEKGIYQTSNFRVQPTISIVRFPNITNLCPFGEVFNASKFASVYAWNRKRISNCVADYSVLYNSTSFSTFKCYGVSPTKLNDLCFTNVYADSFVVKGDEVRQIAPGQTGVIADYNYKLPDDFTGCVIAWNSVKQDALTGDNYGYLYRLFRKSKLKPFERDISTEIYQAGSTPCNGQVGLNCYYPLERYGFHPTTGVNYQPFRVVVLSFELLNGPATVCGPKLSTTLVKDKCVNFNFNGLTGTGVLTTSKKQFLPFQQFGRDISDTTDAVRDPQTLEILDITPCSFGGVSVITPGTNTSNQVAVLYQDVNCTEVPMAIHAEQLTPAWRVYSAGANVFQTRAGCLVGAEHVNNSYECDIPVGAGICASYHSMSSFRSVNQRSIIAYTMSLGAENSVAYSNNSIAIPTNFTISVTTEILPVSMTKTSVDCTMYICGDSIECSNLLLQYGSFCTQLNRALTGIAVEQDKNTQEVFAQVKQIYKTPPIKDFGGFNFSQILPDPSKPSKRSFIEDLLFNKVTLADAGFIKQYGDCLGDIAARDLICAQKFNGLTVLPPLLTDEMIAQYTSALLAGTITSGWTFGAGAALQIPFAMQMAYRFNGIGVTQNVLYENQKLIANQFNSAIGKIQDSLSSTASALGKLQDVVNQNAQALNTLVKQLSSNFGAISSVLNDILSRLDKVEAEVQIDRLITGRLQSLQTYVTQQLIRAAEIRASANLAATKMSECVLGQSKRVDFCGKGYHLMSFPQSAPHGVVFLHVTYVPAQEKNFTTAPAICHEGKAHFPREGVFVSNGTHWFITQRNFYEPQIITTDNTFVSGSCDVVIGIVNNTVYDPLQPELDSGGGGSDIIKLLNEQVNKEMQSSNLYMSMSSWCYTHSLDGAGLFLFDHAAEEYEHAKKLIIFLNENNVPVQLTSISAPEHKFEGLTQIFQKAYEHEQHISESINNIVDHAIKSKDHATFNFLQWYVAEQHEEEVLFKDILDKIELIGNENHGLYLADQYVKGIAKSRKS

SEQ ID NO: 8715 - protein, 1307 aa, Artificial Sequence
  SARS-CoV-2/pangolin/Guangxi/P1E/2017__EPI_ISL_410539 spike protein (1-1139) Ferritin construct
MFVFLFVLPLVSSQCVNLTTRTGIQPGYTNSSTRGVYYPDKVFRSSILHLTQDLFLPFFSNVTWFNTINYQGGFKKFDNPVLPFNDGVYFASTEKSNIIRGWIFGTTLDARTQSLLIVNNATNVVIKVCEFQFCTDPFLGVYYHNNNKTWVENEFRVYSSANNCTFEYISQPFLMDLEGKQGNFKNLREFVFKNVDGYFKIYSKHTPIDLVRDLPRGFAALEPLVDLPIGINITRFQTLLALHRSYLTPGKLESGWTTGAAAYYVGYLQQRTFLLSYNQNGTITDAVDCSLDPLSETKCTLKSLTVEKGIYQTSNFRVQPTISIVRFPNITNLCPFGEVFNASKFASVYAWNRKRISNCVADYSVLYNSTSFSTFKCYGVSPTKLNDLCFTNVYADSFVVKGDEVRQIAPGQTGVIADYNYKLPDDFTGCVIAWNSVKQDALTGGNYLYRLFRKSKLKPFERDISTEIYQAGSTPCNGQVGLNCYYPLERYGFHPTTGVNYQPFRVVVLSFELLNGPATVCGPKLSTTLVKDKCVNFNFNGLTGTGVLTTSKKQFLPFQQFGRDISDTTDAVRDPQTLEILDITPCSFGGVSVITPGTNTSNQVAVLYQDVNCTEVPMAIHAEQLTPAWRVYSAGANVFQTRAGCLVGAEHVNNSYECDIPVGAGICASYHSMSSLRSVNQRSIIAYTMSLGAENSVAYSNNSIAIPTNFTISVTTEILPVSMTKTSVDCTMYICGDSIECSNLLLQYGSFCTQLNRALTGIAVEQDKNTQEVFAQVKQIYKTPPIKDFGGFNFSQILPDPSKPSKRSFIEDLLFNKVTLADAGFIKQYGDCLGDIAARDLICAQKFNGLTVLPPLLTDEMIAQYTSALLAGTITSGWTFGAGAALQIPFAMQMAYRFNGIGVTQNVLYENQKLIANQFNSAIGKIQDSLSSTASALGKLQDVVNQNAQALNTLVKQLSSNFGAISSVLNDILSRLDKVEAEVQIDRLITGRLQSLQTYVTQQLIRAAEIRASANLAATKMSECVLGQSKRVDFCGKGYHLMSFPQSAPHGVVFLHVTYVPAQEKNFTTAPAICHEGKAHFPREGVFVSNGTHWFITQRNFYEPQIITTDNTFVSGSCDVVIGIVNNTVYDPLQPELDSGGGGSDIIKLLNEQVNKEMQSSNLYMSMSSWCYTHSLDGAGLFLFDHAAEEYEHAKKLIIFLNENNVPVQLTSISAPEHKFEGLTQIFQKAYEHEQHISESINNIVDHAIKSKDHATFNFLQWYVAEQHEEEVLFKDILDKIELIGNENHGLYLADQYVKGIAKSRKS

SEQ ID NO: 8716 - protein, 1315 aa, Artificial Sequence
  SARS-CoV-2/Wuhan/WIV05/2019__EPI_ISL_402128 spike protein (1-1147)(K986P_V987P) Ferritin construct
MFVFLVLLPLVSSQCVNLTTRTQLPPAYTNSFTRGVYYPDKVFRSSVLHSTQDLFLPFFSNVTWFHAIHVSGTNGTKRFDNPVLPFNDGVYFASTEKSNIIRGWIFGTTLDSKTQSLLIVNNATNVVIKVCEFQFCNDPFLGVYYHKNNKSWMESEFRVYSSANNCTFEYVSQPFLMDLEGKQGNFKNLREFVFKNIDGYFKIYSKHTPINLVRDLPQGFSALEPLVDLPIGINITRFQTLLALHRSYLTPGDSSSGWTAGAAAYYVGYLQPRTFLLKYNENGTITDAVDCALDPLSETKCTLKSFTVEKGIYQTSNFRVQPTESIVRFPNITNLCPFGEVFNATRFASVYAWNRKRISNCVADYSVLYNSASFSTFKCYGVSPTKLNDLCFTNVYADSFVIRGDEVRQIAPGQTGKIADYNYKLPDDFTGCVIAWNSNNLDSKVGGNYNYLYRLFRKSNLKPFERDISTEIYQAGSTPCNGVEGFNCYFPLQSYGFQPTNGVGYQPYRVVVLSFELLHAPATVCGPKKSTNLVKNKCVNFNFNGLTGTGVLTESNKKFLPFQQFGRDIADTTDAVRDPQTLEILDITPCSFGGVSVITPGTNTSNQVAVLYQDVNCTEVPVAIHADQLTPTWRVYSTGSNVFQTRAGCLIGAEHVNNSYECDIPIGAGICASYQTQTNSPRRARSVASQSIIAYTMSLGAENSVAYSNNSIAIPTNFTISVTTEILPVSMTKTSVDCTMYICGDSTECSNLLLQYGSFCTQLNRALTGIAVEQDKNTQEVFAQVKQIYKTPPIKDFGGFNFSQILPDPSKPSKRSFIEDLLFNKVTLADAGFIKQYGDCLGDIAARDLICAQKFNGLTVLPPLLTDEMIAQYTSALLAGTITSGWTFGAGAALQIPFAMQMAYRFNGIGVTQNVLYENQKLIANQFNSAIGKIQDSLSSTASALGKLQDVVNQNAQALNTLVKQLSSNFGAISSVLNDILSRLDPPEAEVQIDRLITGRLQSLQTYVTQQLIRAAEIRASANLAATKMSECVLGQSKRVDFCGKGYHLMSFPQSAPHGVVFLHVTYVPAQEKNFTTAPAICHDGKAHFPREGVFVSNGTHWFVTQRNFYEPQIITTDNTFVSGNCDVVIGIVNNTVYDPLQPELDSGGGGSDIIKLLNEQVNKEMQSSNLYMSMSSWCYTHSLDGAGLFLFDHAAEEYEHAKKLIIFLNENNVPVQLTSISAPEHKFEGLTQIFQKAYEHEQHISESINNIVDHAIKSKDHATFNFLQWYVAEQHEEEVLFKDILDKIELIGNENHGLYLADQYVKGIAKSRKS

SEQ ID NO: 8717 - protein, 1311 aa, Artificial Sequence
  SARS-CoV-2/bat/Yunnan/RaTG13/2013__EPI_ISL_402131 spike protein (1-1143)(K982P_V983P) Ferritin construct
MFVFLVLLPLVSSQCVNLTTRTQLPPAYTNSSTRGVYYPDKVFRSSVLHLTQDLFLPFFSNVTWFHAIHVSGTNGIKRFDNPVLPFNDGVYFASTEKSNIIRGWIFGTTLDSKTQSLLIVNNATNVVIKVCEFQFCNDPFLGVYYHKNNKSWMESEFRVYSSANNCTFEYVSQPFLMDLEGKQGNFKNLREFVFKNIDGYFKIYSKHTPINLVRDLPPGFSALEPLVDLPIGINITRFQTLLALHRSYLTPGDSSSGWTAGAAAYYVGYLQPRTFLLKYNENGTITDAVDCALDPLSETKCTLKSFTVEKGIYQTSNFRVQPTDSIVRFPNITNLCPFGEVFNATTFASVYAWNRKRISNCVADYSVLYNSTSFSTFKCYGVSPTKLNDLCFTNVYADSFVITGDEVRQIAPGQTGKIADYNYKLPDDFTGCVIAWNSKHIDAKEGGNFNYLYRLFRKANLKPFERDISTEIYQAGSKPCNGQTGLNCYYPLYRYGFYPTDGVGHQPYRVVVLSFELLNAPATVCGPKKSTNLVKNKCVNFNFNGLTGTGVLTESNKKFLPFQQFGRDIADTTDAVRDPQTLEILDITPCSFGGVSVITPGTNASNQVAVLYQDVNCTEVPVAIHADQLTPTWRVYSTGSNVFQTRAGCLIGAEHVNNSYECDIPIGAGICASYQTQTNSRSVASQSIIAYTMSLGAENSVAYSNNSIAIPTNFTISVTTEILPVSMTKTSVDCTMYICGDSTECSNLLLQYGSFCTQLNRALTGIAVEQDKNTQEVFAQVKQIYKTPPIKDFGGFNFSQILPDPSKPSKRSFIEDLLFNKVTLADAGFIKQYGDCLGDIAARDLICAQKFNGLTVLPPLLTDEMIAQYTSALLAGTITSGWTFGAGAALQIPFAMQMAYRFNGIGVTQNVLYENQKLIANQFNSAIGKIQDSLSSTASALGKLQDVVNQNAQALNTLVKQLSSNFGAISSVLNDILSRLDPPEAEVQIDRLITGRLQSLQTYVTQQLIRAAEIRASANLAATKMSECVLGQSKRVDFCGKGYHLMSFPQSAPHGVVFLHVTYVPAQEKNFTTAPAICHDGKAHFPREGVFVSNGTHWFVTQRNFYEPQIITTDNTFVSGSCDVVIGIVNNTVYDPLQPELDSGGGGSDIIKLLNEQVNKEMQSSNLYMSMSSWCYTHSLDGAGLFLFDHAAEEYEHAKKLIIFLNENNVPVQLTSISAPEHKFEGLTQIFQKAYEHEQHISESINNIVDHAIKSKDHATFNFLQWYVAEQHEEEVLFKDILDKIELIGNENHGLYLADQYVKGIAKSRKS

SEQ ID NO: 8718 - protein, 1315 aa, Artificial Sequence
  SARS-CoV-2/Wuhan/HBCDC-HB-01/2019__EPI_ISL_402132 spike protein (1-1147)(K986P_V987P) Ferritin construct
MFVFLVLLPLVSSQCVNLTTRTQLPPAYTNSITRGVYYPDKVFRSSVLHSTQDLFLPFFSNVTWFHAIHVSGTNGTKRFDNPVLPFNDGVYFASTEKSNIIRGWIFGTTLDSKTQSLLIVNNATNVVIKVCEFQFCNDPFLGVYYHKNNKSWMESEFRVYSSANNCTFEYVSQPFLMDLEGKQGNFKNLREFVFKNIDGYFKIYSKHTPINLVRDLPQGFSALEPLVDLPIGINITRFQTLLALHRSYLTPGDSSSGWTAGAAAYYVGYLQPRTFLLKYNENGTITDAVDCALDPLSETKCTLKSFTVEKGIYQTSNFRVQPTESIVRFPNITNLCPFGEVFNATRFASVYAWNRKRISNCVADYSVLYNSASFSTFKCYGVSPTKLNDLCFTNVYADSFVIRGDEVRQIAPGQTGKIADYNYKLPDDFTGCVIAWNSNNLDSKVGGNYNYLYRLFRKSNLKPFERDISTEIYQAGSTPCNGVEGFNCYFPLQSYGFQPTNGVGYQPYRVVVLSFELLHAPATVCGPKKSTNLVKNKCVNFNFNGLTGTGVLTESNKKFLPFQQFGRDIADTTDAVRDPQTLEILDITPCSFGGVSVITPGTNTSNQVAVLYQDVNCTEVPVAIHADQLTPTWRVYSTGSNVFQTRAGCLIGAEHVNNSYECDIPIGAGICASYQTQTNSPRRARSVASQSIIAYTMSLGAENSVAYSNNSIAIPTNFTISVTTEILPVSMTKTSVDCTMYICGDSTECSNLLLQYGSFCTQLNRALTGIAVEQDKNTQEVFAQVKQIYKTPPIKDFGGFNFSQILPDPSKPSKRSFIEDLLFNKVTLADAGFIKQYGDCLGDIAARDLICAQKFNGLTVLPPLLTDEMIAQYTSALLAGTITSGWTFGAGAALQIPFAMQMAYRFNGIGVTQNVLYENQKLIANQFNSAIGKIQDSLSSTASALGKLQDVVNQNAQALNTLVKQLSSNFGAISSVLNDILSRLDPPEAEVQIDRLITGRLQSLQTYVTQQLIRAAEIRASANLAATKMSECVLGQSKRVDFCGKGYHLMSFPQSAPHGVVFLHVTYVPAQEKNFTTAPAICHDGKAHFPREGVFVSNGTHWFVTQRNFYEPQIITTDNTFVSGNCDVVIGIVNNTVYDPLQPELDSGGGGSDIIKLLNEQVNKEMQSSNLYMSMSSWCYTHSLDGAGLFLFDHAAEEYEHAKKLIIFLNENNVPVQLTSISAPEHKFEGLTQIFQKAYEHEQHISESINNIVDHAIKSKDHATFNFLQWYVAEQHEEEVLFKDILDKIELIGNENHGLYLADQYVKGIAKSRKS

SEQ ID NO: 8719 - protein, 1315 aa, Artificial Sequence
  SARS-CoV-2/Guangdong/20SF028/2020__EPI_ISL_403936 spike protein (1-1147)(K986P_V987P) Ferritin construct
MFVFLVLLPLVSSQCVNLTTRTQLPPAYTNSFTRGVYYPDKVFRSSVLYSTQDLFLPFFSNVTWFHAIHVSGTNGTKRFDNPVLPFNDGVYFASTEKSNIIRGWIFGTTLDSKTQSLLIVNNATNVVIKVCEFQFCNDPFLGVYYHKNNKSWMESEFRVYSSANNCTFEYVSQPFLMDLEGKQGNFKNLREFVFKNIDGYFKIYSKHTPINLVRDLPQGFSALEPLVDLPIGINITRFQTLLALHRSYLTPGDSSSGWTAGAAAYYVGYLQPRTFLLKYNENGTITDAVDCALDPLSETKCTLKSFTVEKGIYQTSNFRVQPTESIVRFPNITNLCPFGEVFNATRFASVYAWNRKRISNCVADYSVLYNSASFSTFKCYGVSPTKLNDLCFTNVYADSFVIRGDEVRQIAPGQTGKIADYNYKLPDDFTGCVIAWNSNNLDSKVGGNYNYLYRLFRKSNLKPFERDISTEIYQAGSTPCNGVEGFNCYFPLQSYGFQPTNGVGYQPYRVVVLSFELLHAPATVCGPKKSTNLVKNKCVNFNFNGLTGTGVLTESNKKFLPFQQFGRDIADTTDAVRDPQTLEILDITPCSFGGVSVITPGTNTSNQVAVLYQDVNCTEVPVAIHADQLTPTWRVYSTGSNVFQTRAGCLIGAEHVNNSYECDIPIGAGICASYQTQTNSPRRARSVASQSIIAYTMSLGAENSVAYSNNSIAIPTNFTISVTTEILPVSMTKTSVDCTMYICGDSTECSNLLLQYGSFCTQLNRALTGIAVEQDKNTQEVFAQVKQIYKTPPIKDFGGFNFSQILPDPSKPSKRSFIEDLLFNKVTLADAGFIKQYGDCLGDIAARDLICAQKFNGLTVLPPLLTDEMIAQYTSALLAGTITSGWTFGAGAALQIPFAMQMAYRFNGIGVTQNVLYENQKLIANQFNSAIGKIQDSLSSTASALGKLQDVVNQNAQALNTLVKQLSSNFGAISSVLNDILSRLDPPEAEVQIDRLITGRLQSLQTYVTQQLIRAAEIRASANLAATKMSECVLGQSKRVDFCGKGYHLMSFPQSAPHGVVFLHVTYVPAQEKNFTTAPAICHDGKAHFPREGVFVSNGTHWFVTQRNFYEPQIITTDNTFVSGNCDVVIGIVNNTVYDPLQPELDSGGGGSDIIKLLNEQVNKEMQSSNLYMSMSSWCYTHSLDGAGLFLFDHAAEEYEHAKKLIIFLNENNVPVQLTSISAPEHKFEGLTQIFQKAYEHEQHISESINNIVDHAIKSKDHATFNFLQWYVAEQHEEEVLFKDILDKIELIGNENHGLYLADQYVKGIAKSRKS

SEQ ID NO: 8720 - protein, 1315 aa, Artificial Sequence
  SARS-CoV-2/Shenzhen/SZTH-001/2020__EPI_ISL_406592 spike protein (1-1147)(K986P_V987P) Ferritin construct
MFVFLVLLPLVSSQCVNLTTRTQLPPAYTNSFTRGVYYPDKVFRSSVLHSTQDLFLPFFSNVTWFHAIHVSGTNGTKRFDNPVLPFNDGVYFASTEKSNIIRGWIFGTTLDSKTQSLLIVNNATNVVIKVCEFQFCNDPFLGVYYHKNNKSWMESEFRVYSSANNCTFEYVSQPFLMDLEGKQGNFKNLREFVFKNIDGYFKIYSKHTPINLVRDLPQGFSALEPLVDLPIGINITRFQTLLALHRSYLTPGDSSSGWTAGAAAYYVGYLQPRTFLLKYNENGTITDAVDCALDPLSETKCTLKSFTVEKGIYQTSNFRVQPTESIVRFPNITNLCPFGEVFNATRFASVYAWNRKRISNCVADYSVLYNSASFSTFKCYGVSPTKLNDLCFTNVYADSFVIRGDEVRQIAPGQTGKIADYNYKLPDDFTGCVIAWNSNNLDSKVGGNYNYLYRLFRKSNLKPFERDISTEIYQAGSTPCNGVEGFNCYFPLQSYGFQPTNGVGYQPYRVVVLSFELLHAPATVCGPKKSTNLVKNKCVNFNFNGLTGTGVLTESNKKFLPFQQFGRDIADTTDAVRDPQTLEILDITPCSFGGVSVITPGTNTSNQVAVLYQDVNCTEVPVAIHADQLTPTWRVYSTGSNVFQTRAGCLIGAEHVNNSYECDIPIGAGICASYQTQTNSPRRARSVASQSIIAYTMSLGAENSVAYSNNSIAIPTNFTISVTTEILPVSMTKTSVDCTMYICGDSTECSNLLLQYGSFCTQLNRALTGIAVEQDKNTQEVFAQVKQIYKTPPIKDFGGFNFSQILPDPSKPSKRSFIEDLLFNKVTLADAGFIKQYGDCLGDIAARDLICAQKFNGLTVLPPLLTDEMIAQYTSALLAGTITSGWTFGAGAALQIPFAMQMAYRFNGIGVTQNVLYENQKLIANQFNSAIGKIQDSLSSTASALGKLQDVVNQNAQALNTLVKQLSSNFGAISSVLNDILSRLDPPEAEVQIDRLITGRLQSLQTYVTQQLIRAAEIRASANLAATKMSECVLGQSKRVDFCGKGYHLMSFPQSAPHGVVFLHVTYVPAQEKNFTTAPAICHDGKAHFPREGVFVSNGTHWFVTQRNFYEPQIITTDNTFVSGNCDVLIGIVNNTVYDPLQPELDSGGGGSDIIKLLNEQVNKEMQSSNLYMSMSSWCYTHSLDGAGLFLFDHAAEEYEHAKKLIIFLNENNVPVQLTSISAPEHKFEGLTQIFQKAYEHEQHISESINNIVDHAIKSKDHATFNFLQWYVAEQHEEEVLFKDILDKIELIGNENHGLYLADQYVKGIAKSRKS

SEQ ID NO: 8721 - protein, 1315 aa, Artificial Sequence
  SARS-CoV-2/Shenzhen/SZTH-004/2020__EPI_ISL_406595 spike protein (1-1147)(K986P_V987P) Ferritin construct
MFVFLVLLPLVSSQCVNLTTRTQLPPAYTNSFTRGVYYPDKVFRSSVLHSTQDLFLPFFSNVTWFHAIHVSGTNGTKRFDNPVLPFNDGVYFASTEKSNIIRGWIFGTTLDSKTQSLLIVNNATNVVIKVCEFQFCNDPFLGVYYHKNNKSWMESEFRVYSSANNCTFEYVSQPFLMDLEGKQGNFKNLREFVFKNIDGYFKIYSKHTPINLVRDLPQGFSALEPLVDLPIGINITRFQTLLALHRSYLTPGDSSSGWTAGAAAYYVGYLQPRTFLLKYNENGTITDAVDCALDPLSETKCTLKSFTVEKGIYQTSNFRVQPTESIVRFPNITNLCPFGEVFNATRFASVYAWDRKRISNCVAYYSVLYNSASFSTFKCYGVSPTKLNDLCFTNVYADSFVIRGDEVRQIAPGQTGKIADYNYKLPDDFTGCVIAWNSNNLDSKVGGNYNYLYRLFRKSNLKPFERDISTEIYQAGSTPCNGVEGFNCYFPLQSYGFQPTNGVGYQPYRVVVLSFELLHAPATVCGPKKSTNLVKNKCVNFNFNGLTGTGVLTESNKKFLPFQQFGRDIADTTDAVRDPQTLEILDITPCSFGGVSVITPGTNTSNQVAVLYQDVNCTEVPVAIHADQLTPTWRVYSTGSNVFQTRAGCLIGAEHVNNSYECDIPIGAGICASYQTQTNSPRRARSVASQSIIAYTMSLGAENSVAYSNNSIAIPTNFTISVTTEILPVSMTKTSVDCTMYICGDSTECSNLLLQYGSFCTQLNRALTGIAVEQDKNTQEVFAQVKQIYKTPPIKDFGGFNFSQILPDPSKPSKRSFIEDLLFNKVTLADAGFIKQYGDCLGDIAARDLICAQKFNGLTVLPPLLTDEMIAQYTSALLAGTITSGWTFGAGAALQIPFAMQMAYRFNGIGVTQNVLYENQKLIANQFNSAIGKIQDSLSSTASALGKLQDVVNQNAQALNTLVKQLSSNFGAISSVLNDILSRLDPPEAEVQIDRLITGRLQSLQTYVTQQLIRAAEIRASANLAATKMSECVLGQSKRVDFCGKGYHLMSFPQSAPHGVVFLHVTYVPAQEKNFTTAPAICHDGKAHFPREGVFVSNGTHWFVTQRNFYEPQIITTDNTFVSGNCDVVIGIVNNTVYDPLQPELDSGGGGSDIIKLLNEQVNKEMQSSNLYMSMSSWCYTHSLDGAGLFLFDHAAEEYEHAKKLIIFLNENNVPVQLTSISAPEHKFEGLTQIFQKAYEHEQHISESINNIVDHAIKSKDHATFNFLQWYVAEQHEEEVLFKDILDKIELIGNENHGLYLADQYVKGIAKSRKS

SEQ ID NO: 8722 - protein, 1315 aa, Artificial Sequence
  SARS-CoV-2/France/IDF0372/2020__EPI_ISL_406596 spike protein (1-1147)(K986P_V987P) Ferritin construct
MFVFLVLLPLVSSQCVNLTTRTQLPPAYTNSFTRGVYYPDKVFRSSVLHSTQDLFLPFFSNVTWFHAIHVSGTNGTKRFDNPVLPFNDGVYFASTEKSNIIRGWIFGTTLDSKTQSLLIVNNATNVVIKVCEFQFCNDPFLGVYYHKNNKSWMESEFRVYSSANNCTFEYVSQPFLMDLEGKQGNFKNLREFVFKNIDGYFKIYSKHTPINLVRDLPQGFSALEPLVDLPIGINITRFQTLLALHRSYLTPGDSSSGWTAGAAAYYVGYLQPRTFLLKYNENGTITDAVDCALDPLSETKCTLKSFTVEKGIYQTSNFRVQPTESIVRFPNITNLCPFGEVFNATRFASVYAWNRKRISNCVADYSFLYNSASFSTFKCYGVSPTKLNDLCFTNVYADSFVIRGDEVRQIAPGQTGKIADYNYKLPDDFTGCVIAWNSNNLDSKVGGNYNYLYRLFRKSNLKPFERDISTEIYQAGSTPCNGVEGFNCYFPLQSYGFQPTNGVGYQPYRVVVLSFELLHAPATVCGPKKSTNLVKNKCVNFNFNGLTGTGVLTESNKKFLPFQQFGRDIADTTDAVRDPQTLEILDITPCSFGGVSVITPGTNTSNQVAVLYQDVNCTEVPVAIHADQLTPTWRVYSTGSNVFQTRAGCLIGAEHVNNSYECDIPIGAGICASYQTQTNSPRRARSVASQSIIAYTMSLGAENSVAYSNNSIAIPTNFTISVTTEILPVSMTKTSVDCTMYICGDSTECSNLLLQYGSFCTQLNRALTGIAVEQDKNTQEVFAQVKQIYKTPPIKDFGGFNFSQILPDPSKPSKRSFIEDLLFNKVTLADAGFIKQYGDCLGDIAARDLICAQKFNGLTVLPPLLTDEMIAQYTSALLAGTITSGWTFGAGAALQIPFAMQMAYRFNGIGVTQNVLYENQKLIANQFNSAIGKIQDSLSSTASALGKLQDVVNQNAQALNTLVKQLSSNFGAISSVLNDILSRLDPPEAEVQIDRLITGRLQSLQTYVTQQLIRAAEIRASANLAATKMSECVLGQSKRVDFCGKGYHLMSFPQSAPHGVVFLHVTYVPAQEKNFTTAPAICHDGKAHFPREGVFVSNGTHWFVTQRNFYEPQIITTDNTFVSGNCDVVIGIVNNTVYDPLQPELDSGGGGSDIIKLLNEQVNKEMQSSNLYMSMSSWCYTHSLDGAGLFLFDHAAEEYEHAKKLIIFLNENNVPVQLTSISAPEHKFEGLTQIFQKAYEHEQHISESINNIVDHAIKSKDHATFNFLQWYVAEQHEEEVLFKDILDKIELIGNENHGLYLADQYVKGIAKSRKS

SEQ ID NO: 8723 - protein, 1315 aa, Artificial Sequence
  SARS-CoV-2/Australia/VIC01/2020__EPI_ISL_406844 spike protein (1-1147)(K986P_V987P) Ferritin construct
MFVFLVLLPLVSSQCVNLTTRTQLPPAYTNSFTRGVYYPDKVFRSSVLHSTQDLFLPFFSNVTWFHAIHVSGTNGTKRFDNPVLPFNDGVYFASTEKSNIIRGWIFGTTLDSKTQSLLIVNNATNVVIKVCEFQFCNDPFLGVYYHKNNKSWMESEFRVYSSANNCTFEYVSQPFLMDLEGKQGNFKNLREFVFKNIDGYFKIYSKHTPINLVRDLPQGFSALEPLVDLPIGINITRFQTLLALHRRYLTPGDSSSGWTAGAAAYYVGYLQPRTFLLKYNENGTITDAVDCALDPLSETKCTLKSFTVEKGIYQTSNFRVQPTESIVRFPNITNLCPFGEVFNATRFASVYAWNRKRISNCVADYSVLYNSASFSTFKCYGVSPTKLNDLCFTNVYADSFVIRGDEVRQIAPGQTGKIADYNYKLPDDFTGCVIAWNSNNLDSKVGGNYNYLYRLFRKSNLKPFERDISTEIYQAGSTPCNGVEGFNCYFPLQSYGFQPTNGVGYQPYRVVVLSFELLHAPATVCGPKKSTNLVKNKCVNFNFNGLTGTGVLTESNKKFLPFQQFGRDIADTTDAVRDPQTLEILDITPCSFGGVSVITPGTNTSNQVAVLYQDVNCTEVPVAIHADQLTPTWRVYSTGSNVFQTRAGCLIGAEHVNNSYECDIPIGAGICASYQTQTNSPRRARSVASQSIIAYTMSLGAENSVAYSNNSIAIPTNFTISVTTEILPVSMTKTSVDCTMYICGDSTECSNLLLQYGSFCTQLNRALTGIAVEQDKNTQEVFAQVKQIYKTPPIKDFGGFNFSQILPDPSKPSKRSFIEDLLFNKVTLADAGFIKQYGDCLGDIAARDLICAQKFNGLTVLPPLLTDEMIAQYTSALLAGTITSGWTFGAGAALQIPFAMQMAYRFNGIGVTQNVLYENQKLIANQFNSAIGKIQDSLSSTASALGKLQDVVNQNAQALNTLVKQLSSNFGAISSVLNDILSRLDPPEAEVQIDRLITGRLQSLQTYVTQQLIRAAEIRASANLAATKMSECVLGQSKRVDFCGKGYHLMSFPQSAPHGVVFLHVTYVPAQEKNFTTAPAICHDGKAHFPREGVFVSNGTHWFVTQRNFYEPQIITTDNTFVSGNCDVVIGIVNNTVYDPLQPELDSGGGGSDIIKLLNEQVNKEMQSSNLYMSMSSWCYTHSLDGAGLFLFDHAAEEYEHAKKLIIFLNENNVPVQLTSISAPEHKFEGLTQIFQKAYEHEQHISESINNIVDHAIKSKDHATFNFLQWYVAEQHEEEVLFKDILDKIELIGNENHGLYLADQYVKGIAKSRKS

SEQ ID NO: 8724 - protein, 1315 aa, Artificial Sequence
  SARS-CoV-2/Germany/BavPat1/2020__EPI_ISL_406862 spike protein (1-1147)(K986P_V987P) Ferritin construct
MFVFLVLLPLVSSQCVNLTTRTQLPPAYTNSFTRGVYYPDKVFRSSVLHSTQDLFLPFFSNVTWFHAIHVSGTNGTKRFDNPVLPFNDGVYFASTEKSNIIRGWIFGTTLDSKTQSLLIVNNATNVVIKVCEFQFCNDPFLGVYYHKNNKSWMESEFRVYSSANNCTFEYVSQPFLMDLEGKQGNFKNLREFVFKNIDGYFKIYSKHTPINLVRDLPQGFSALEPLVDLPIGINITRFQTLLALHRSYLTPGDSSSGWTAGAAAYYVGYLQPRTFLLKYNENGTITDAVDCALDPLSETKCTLKSFTVEKGIYQTSNFRVQPTESIVRFPNITNLCPFGEVFNATRFASVYAWNRKRISNCVADYSVLYNSASFSTFKCYGVSPTKLNDLCFTNVYADSFVIRGDEVRQIAPGQTGKIADYNYKLPDDFTGCVIAWNSNNLDSKVGGNYNYLYRLFRKSNLKPFERDISTEIYQAGSTPCNGVEGFNCYFPLQSYGFQPTNGVGYQPYRVVVLSFELLHAPATVCGPKKSTNLVKNKCVNFNFNGLTGTGVLTESNKKFLPFQQFGRDIADTTDAVRDPQTLEILDITPCSFGGVSVITPGTNTSNQVAVLYQGVNCTEVPVAIHADQLTPTWRVYSTGSNVFQTRAGCLIGAEHVNNSYECDIPIGAGICASYQTQTNSPRRARSVASQSIIAYTMSLGAENSVAYSNNSIAIPTNFTISVTTEILPVSMTKTSVDCTMYICGDSTECSNLLLQYGSFCTQLNRALTGIAVEQDKNTQEVFAQVKQIYKTPPIKDFGGFNFSQILPDPSKPSKRSFIEDLLFNKVTLADAGFIKQYGDCLGDIAARDLICAQKFNGLTVLPPLLTDEMIAQYTSALLAGTITSGWTFGAGAALQIPFAMQMAYRFNGIGVTQNVLYENQKLIANQFNSAIGKIQDSLSSTASALGKLQDVVNQNAQALNTLVKQLSSNFGAISSVLNDILSRLDPPEAEVQIDRLITGRLQSLQTYVTQQLIRAAEIRASANLAATKMSECVLGQSKRVDFCGKGYHLMSFPQSAPHGVVFLHVTYVPAQEKNFTTAPAICHDGKAHFPREGVFVSNGTHWFVTQRNFYEPQIITTDNTFVSGNCDVVIGIVNNTVYDPLQPELDSGGGGSDIIKLLNEQVNKEMQSSNLYMSMSSWCYTHSLDGAGLFLFDHAAEEYEHAKKLIIFLNENNVPVQLTSISAPEHKFEGLTQIFQKAYEHEQHISESINNIVDHAIKSKDHATFNFLQWYVAEQHEEEVLFKDILDKIELIGNENHGLYLADQYVKGIAKSRKS

SEQ ID NO: 8725 - protein, 1315 aa, Artificial Sequence
  SARS-CoV-2/Wuhan/HBCDC-HB-02/2020__EPI_ISL_412978 spike protein (1-1147)(K986P_V987P) Ferritin construct
MFVFLVLLPLVSSQCVNLTTRTQLPPAYTNSFTRGVYYPDKVFRSSVLHSTQDLFLPFFSNVTWFHAIHVSGTNGTKRFDNPVLPFNDGVYFASTEKSNIIRGWIFGTTLDSKTQSLLIVNNATNVVIKVCEFQFCNDPFLGVYYHKNNKSWMESEFRVYSSANNCTFEYVSQPFLMDLEGKQGNFKNLREFVFKNIDGYFKIYSKHTPINLVRDLPQGFSALEPLVDLPIGINITRFQTLLALHRSYLTPGDSSSGWTAGAAAYYVGYLQPRTFLLKYNENGTITDAVDCALDPLSETKCTLKSFTVEKGIYQTSNFRVQPTESIVRFPNITNLCPFGEVFNATRFASVYAWNRKRISNCVADYSVLYNSASFSTFKCYGVSPTKLNDLCFTNVYADSFVIRGDEVRQIAPGQTGKIADYNYKLPDDFTGCVIAWNSNNLDSKVGGNYNYLYRLFRKSNLKPFERDISTEIYQAGSTPCNGVEGFNCYFPLQSYGFQPTNGVGYQPYRVVVLSFELLHAPATVCGPKKSTNLVKNKCVNFNFNGLTGTGVLTESNKKFLPFQQFGRDIADTTDAVRDPQTLEILDITPCSFGGVSVITPGTNTSNQVAVLYQDVNCTEVPVAIHADQLTPTWRVYSTGSNVFQTRAGCLIGAEHVNNSYECDIPIGAGICASYQTQTNSPRRARSVASQSIIAYTMSLGAENSVAYSNNSIAIPTNFTISVTTEILPVSMTKTSVDCTMYICGDSTECSNFLLQYGSFCTQLNRALTGIAVEQDKNTQEVFAQVKQIYKTPPIKDFGGFNFSQILPDPSKPSKRSFIEDLLFNKVTLADAGFIKQYGDCLGDIAARDLICAQKFNGLTVLPPLLTDEMIAQYTSALLAGTITSGWTFGAGAALQIPFAMQMAYRFNGIGVTQNVLYENQKLIANQFNSAIGKIQDSLSSTASALGKLQDVVNQNAQALNTLVKQLSSNFGAISSVLNDILSRLDPPEAEVQIDRLITGRLQSLQTYVTQQLIRAAEIRASANLAATKMSECVLGQSKRVDFCGKGYHLMSFPQSAPHGVVFLHVTYVPAQEKNFTTAPAICHDGKAHFPREGVFVSNGTHWFVTQRNFYEPQIITTDNTFVSGNCDVVIGIVNNTVYDPLQPELDSGGGGSDIIKLLNEQVNKEMQSSNLYMSMSSWCYTHSLDGAGLFLFDHAAEEYEHAKKLIIFLNENNVPVQLTSISAPEHKFEGLTQIFQKAYEHEQHISESINNIVDHAIKSKDHATFNFLQWYVAEQHEEEVLFKDILDKIELIGNENHGLYLADQYVKGIAKSRKS

SEQ ID NO: 8726 - protein, 1315 aa, Artificial Sequence
  SARS-CoV-2/Australia/QLD02/2020__EPI_ISL_407896 spike protein (1-1147)(K986P_V987P) Ferritin construct
MFVFLVLLPLVSSQCVNLTTRTQLPPAYTNSFTRGVYYPDKVFRSSVLHSTQDLFLPFFSNVTWFHAIHVSGTNGTKRFDNPVLPFNDGVYFASTEKSNIIRGWIFGTTLDSKTQSLLIVNNATNVVIKVCEFQFCNDPFLGVYYHKNNKSWMESEFRVYSSANNCTFEYVSQPFLMDLEGKQGNFKNLREFVFKNIDGYFKIYSKHTPINLVRDLPQGFSALEPLVDLPIGINITRFQTLLALHRSYLTPGDSSSGWTAGAAAYYVGYLQPRTFLLKYNENGTITDAVDCALDPLSETKCTLKSFTVEKGIYQTSNFRVQPTESIVRFPNITNLCPFGEVFNATRFASVYAWNRKRISNCVADYSVLYNSASFSTFKCYGVSPTKLNDLCFTNVYADSFVIRGDEVRQIAPGQTGKIADYNYKLPDDFTGCVIAWNSNNLDSKVGGNYNYLYRLFRKSNLKPFERDISTEIYQAGSTPCNGVEGFNCYFPLQSYGFQPTNGVGYQPYRVVVLSFELLHAPATVCGPKKSTNLVKNKCVNFNFNGLTGTGVLTESNKKFLPFQQFGRDIADTTDAVRDPQTLEILDITPCSFGGVSVITPGTNTSNQVAVLYQDVNCTEVPVAIHADQLTPTWRVYSTGSNVFQTRAGCLIGAEHVNNSYECDIPIGAGICASYQTQTNSPRRARSVASQSIIAYTMSLGAENSVAYSNNSIAIPTNFTISVTTEILPVSMTKTSVDCTMYICGDSTECSNLLLQYGSFCTQLNRALTGIAVEQDKNTQEVFAQVKQIYKTPPIKDFGGFNFSQILPDPSKPSKRSFIEDLLFNKVTLADAGFIKQYGDCLGDIAARDLICAQKFNGLTVLPPLLTDEMIAQYTSALLAGTITSGWTFGAGAALQIPFAMQMAYRFNGIGVTQNVLYENQKLIANQFNSAIGKIQDSLSSTASALGKLQDVVNQNAQALNTLVKQLSSNFGAISSVLNDILSRLDPPEAEVQIDRLITGRLQSLQTYVTQQLIRAAEIRASANLAATKMSECVLGQSKRVDFCGKGYHLMSFPQSAPHGVVFLHVTYVPAQEKNFTTAPAICHDGKAHFPREGVFVSNGTHWFVTQRNFYEPQIITTDNTFVSGNCDVVIGIVNNTVYDPLQLELDSGGGGSDIIKLLNEQVNKEMQSSNLYMSMSSWCYTHSLDGAGLFLFDHAAEEYEHAKKLIIFLNENNVPVQLTSISAPEHKFEGLTQIFQKAYEHEQHISESINNIVDHAIKSKDHATFNFLQWYVAEQHEEEVLFKDILDKIELIGNENHGLYLADQYVKGIAKSRKS

SEQ ID NO: 8727 - protein, 1315 aa, Artificial Sequence
  SARS-CoV-2/India/1-31/2020__EPI_ISL_413523 spike protein (1-1147)(K986P_V987P) Ferritin construct
MFVFLVLLPLVSSQCVNLTTRTQLPPAYTNSFTRGVYYPDKVFRSSVLHSTQDLFLPFFSNVTWFHAIHVSGTNGTKRFDNPVLPFNDGVYFASTEKSNIIRGWIFGTTLDSKTQSLLIVNNATNVVIKVCEFQFCNDPFLGVYYHKNNKSWMESEFRVYSSANNCTFEYVSQPFLMDLEGKQGNFKNLREFVFKNIDGYFKIYSKHTPINLVRDLPQGFSALEPLVDLPIGINITRFQTLLALHRSYLTPGDSSSGWTAGAAAYYVGYLQPRTFLLKYNENGTITDAVDCALDPLSETKCTLKSFTVEKGIYQTSNFRVQPTESIVRFPNITNLCPFGEVFNATRFASVYAWNRKRISNCVADYSVLYNSASFSTFKCYGVSPTKLNDLCFTNVYADSFVIRGDEVRQIAPGQTGKIADYNYKLPDDFTGCVIAWNSNNLDSKVGGNYNYLYRLFRKSNLKPFERDISTEIYQAGSTPCNGVEGFNCYFPLQSYGFQPTNGVGYQPYRVVVLSFELLHAPATVCGPKKSTNLVKNKCVNFNFNGLTGTGVLTESNKKFLPFQQFGRDIADTTDAVRDPQTLEILDITPCSFGGVSVITPGTNTSNQVAVLYQDVNCTEVPVAIHADQLTPTWRVYSTGSNVFQTRAGCLIGAEHVNNSYECDIPIGAGICASYQTQTNSPRRARSVASQSIIAYTMSLGAENSVAYSNNSIAIPTNFTISVTTEILPVSMTKTSVDCTMYICGDSTECSNLLLQYGSFCTQLNRALTGIAVEQDKNTQEVFAQVKQIYKTPPIKDFGGFNFSQILPDPSKPSKRSFIEDLLFNKVTLADAGFIKQYGDCLGDIAARDLICAQKFNGLTVLPPLLTDEMIAQYTSALLAGTITSGWTFGAGAALQIPFAMQMAYRFNGIGVTQNVLYENQKLIANQFNSVIGKIQDSLSSTASALGKLQDVVNQNAQALNTLVKQLSSNFGAISSVLNDILSRLDPPEAEVQIDRLITGRLQSLQTYVTQQLIRAAEIRASANLAATKMSECVLGQSKRVDFCGKGYHLMSFPQSAPHGVVFLHVTYVPAQEKNFTTAPAICHDGKAHFPREGVFVSNGTHWFVTQRNFYEPQIITTDNTFVSGNCDVVIGIVNNTVYDPLQPELDSGGGGSDIIKLLNEQVNKEMQSSNLYMSMSSWCYTHSLDGAGLFLFDHAAEEYEHAKKLIIFLNENNVPVQLTSISAPEHKFEGLTQIFQKAYEHEQHISESINNIVDHAIKSKDHATFNFLQWYVAEQHEEEVLFKDILDKIELIGNENHGLYLADQYVKGIAKSRKS

SEQ ID NO: 8728 - protein, 1315 aa, Artificial Sequence
  SARS-CoV-2/Guangdong/GD2020087-P0008/2020__EPI_ISL_413863 spike protein (1-1147)(K986P_V987P) Ferritin construct
MFVFLVLLPLVSSQCVNLTTRTQLPPAYTNSFTRGVYYPDKVFRSSVLHSTQDLFLPFFSNVTWFHAIHVSGTNGTKRFDNPVLPFNDGVYFASTEKSNIIRGWIFGTTLDSKTQSLLIVNNATNVVIKVCEFQFCNDPFLGVYYHKNNKSWMESEFRVYSSANNCTFEYVSQPFLMDLEGKQGNFKNLREFVFKNIDGYFKIYSKHTPINLVRDLPQGFSALEPLVDLPIGINITRFQTLLALHRSYLTPGDSSSGWTAGAAAYYVGYLQPRTFLLKYNENGTITDAVDCALDPLSETKCTLKSFTVEKGIYQTSNFRVQPTESIVRFPNITNLCPFGEVFNATRFASVYAWNRKRISNCVADYSVLYNSASFSTFKCYGVSPTKLNDLCFTNVYADSFVIRGDEVREIAPGQTGKIADYNYKLPDDFTGCVIAWNSNNLDSKVGGNYNYLYRLFRKSNLKPFERDISTEIYQAGSTPCNGVEGFNCYFPLQSYGFQPTNGVGYQPYRVVVLSFELLHAPATVCGPKKSTNLVKNKCVNFNFNGLTGTGVLTESNKKFLPFQQFGRDIADTTDAVRDPQTLEILDITPCSFGGVSVITPGTNTSNQVAVLYQDVNCTEVPVAIHADQLTPTWRVYSTGSNVFQTRAGCLIGAEHVNNSYECDIPIGAGICASYQTQTNSPRRARSVASQSIIAYTMSLGAENSVAYSNNSIAIPTNFTISVTTEILPVSMTKTSVDCTMYICGDSTECSNLLLQYGSFCTQLNRALTGIAVEQDKNTQEVFAQVKQIYKTPPIKDFGGFNFSQILPDPSKPSKRSFIEDLLFNKVTLADAGFIKQYGDCLGDIAARDLICAQKFNGLTVLPPLLTDEMIAQYTSALLAGTITSGWTFGAGAALQIPFAMQMAYRFNGIGVTQNVLYENQKLIANQFNSAIGKIQDSLSSTASALGKLQDVVNQNAQALNTLVKQLSSNFGAISSVLNDILSRLDPPEAEVQIDRLITGRLQSLQTYVTQQLIRAAEIRASANLAATKMSECVLGQSKRVDFCGKGYHLMSFPQSAPHGVVFLHVTYVPAQEKNFTTAPAICHDGKAHFPREGVFVSNGTHWFVTQRNFYEPQIITTDNTFVSGNCDVVIGIVNNTVYDPLQPELDSGGGGSDIIKLLNEQVNKEMQSSNLYMSMSSWCYTHSLDGAGLFLFDHAAEEYEHAKKLIIFLNENNVPVQLTSISAPEHKFEGLTQIFQKAYEHEQHISESINNIVDHAIKSKDHATFNFLQWYVAEQHEEEVLFKDILDKIELIGNENHGLYLADQYVKGIAKSRKS

SEQ ID NO: 8729 - protein, 1315 aa, Artificial Sequence
  SARS-CoV-2/Sweden/01/2020__EPI_ISL_411951 spike protein (1-1147)(K986P_V987P) Ferritin construct
MFVFLVLLPLVSSQCVNLTTRTQLPPAYTNSFTRGVYYPDKVFRSSVLHSTQDLFLPFFSNVTWFHAIHVSGTNGTKRFDNPVLPFNDGVYFASTEKSNIIRGWIFGTTLDSKTQSLLIVNNATNVVIKVCEFQFCNDPFLGVYYHKNNKSWMESEFRVYSSANNCTFEYVSQPFLMDLEGKQGNFKNLREFVFKNIDGYFKIYSKHTPINLVRDLPQGFSALEPLVDLPIGINITRFQTLLALHRSYLTPGDSSSGWTAGAAAYYVGYLQPRTFLLKYNENGTITDAVDCALDPLSETKCTLKSFTVEKGIYQTSNFRVQPTESIVRFPNITNLCPFGEVFNATRFASVYAWNRKRISNCVADYSVLYNSASFSTFKCYGVSPTKLNDLCFTNVYADSFVIRGDEVRQIAPGQTGKIADYNYKLPDDFTGCVIAWNSNNLDSKVGGNYNYLYRLFRKSNLKPFERDISTEIYQAGSTPCNGVEGFNCYFPLQSYGFQPTNGVGYQPYRVVVLSFELLHAPATVCGPKKSTNLVKNKCVNFNFNGLTGTGVLTESNKKFLPFQQFGRDIADTTDAVRDPQTLEILDITPCSFGGVSVITPGTNTSNQVAVLYQDVNCTEVPVAIHADQLTPTWRVYSTGSNVFQTRAGCLIGAEHVNNSYECDIPIGAGICASYQTQTNSPRRARSVASQSIIAYTMSLGAENSVAYSNNSIAIPTNFTISVTTEILPVSMTKTSVDCTMYICGDSTECSNLLLQYGSFCTQLNRALTGIAVEQDKNTQEVFAQVKQIYKTPPIKDCGGFNFSQILPDPSKPSKRSFIEDLLFNKVTLADAGFIKQYGDCLGDIAARDLICAQKFNGLTVLPPLLTDEMIAQYTSALLAGTITSGWTFGAGAALQIPFAMQMAYRFNGIGVTQNVLYENQKLIANQFNSAIGKIQDSLSSTASALGKLQDVVNQNAQALNTLVKQLSSNFGAISSVLNDILSRLDPPEAEVQIDRLITGRLQSLQTYVTQQLIRAAEIRASANLAATKMSECVLGQSKRVDFCGKGYHLMSFPQSAPHGVVFLHVTYVPAQEKNFTTAPAICHDGKAHFPREGVFVSNGTHWFVTQRNFYEPQIITTDNTFVSGNCDVVIGIVNNTVYDPLQPELDSGGGGSDIIKLLNEQVNKEMQSSNLYMSMSSWCYTHSLDGAGLFLFDHAAEEYEHAKKLIIFLNENNVPVQLTSISAPEHKFEGLTQIFQKAYEHEQHISESINNIVDHAIKSKDHATFNFLQWYVAEQHEEEVLFKDILDKIELIGNENHGLYLADQYVKGIAKSRKS

SEQ ID NO: 8730 - protein, 1315 aa, Artificial Sequence
  SARS-CoV-2/Tianmen/HBCDC-HB-07/2020__EPI_ISL_412983 spike protein (1-1147)(K986P_V987P) Ferritin construct
MFVFLVLLPLVSSQCVNLTTRTQLPPAYTNSFTRGVYYPDKVFRSSVLHSTQDLFLPFFSNVTWFHAIHVSGTNGTKRFDNPVLPFNDGVYFASTEKSNIIRGWIFGTTLDSKTQSLLIVNNATNVVIKVCEFQFCNDPFLGVYYHKNNKSWMESEFRVYSSANNCTFEYVSQPFLMDLEGKQGNFKNLREFVFKNIDGYFKIYSKHTPINLVRDLPQGFSALEPLVDLPIGINITRFQTLLALHRSYLTPGDSSSGWTAGAAAYYVGYLQPRTFLLKYNENGTITDAVDCALDPLSETKCTLKSFTVEKGIYQTSNFRVQPTESIVRFPNITNLCPFGEVFNATRFASVYAWNRKRISNCVADYSVLYNSASFSTFKCYGVSPTKLNDLCFTNVYADSFVIRGDEVRQIAPGQTGKIADYNYKLPDDFTGCVIAWNSNNLDSKVGGNYNYLYRLFRKSNLKPFERDISTEIYQAGSTPCNGVEGFNCYFPLQSYGFQPTNGVGYQPYRVVVLSFELLHAPATVCGPKKSTNLVKNKCVNFNFNGLTGTGVLTESNKKFLPFQQFGRDIADTTDAVRDPQTLEILDITPCSFGGVSVITPGTNTSNQVAVLYQDLNCTEVPVAIHADQLTPTWRVYSTGSNVFQTRAGCLIGAEHVNNSYECDIPIGAGICASYQTQTNSPRRARSVASQSIIAYTMSLGAENSVAYSNNSIAIPTNFTISVTTEILPVSMTKTSVDCTMYICGDSTECSNLLLQYGSFCTQLNRALTGIAVEQDKNTQEVFAQVKQIYKTPPIKDFGGFNFSQILPDPSKPSKRSFIEDLLFNKVTLADAGFIKQYGDCLGDIAARDLICAQKFNGLTVLPPLLTDEMIAQYTSALLAGTITSGWTFGAGAALQIPFAMQMAYRFNGIGVTQNVLYENQKLIANQFNSAIGKIQDSLSSTASALGKLQDVVNQNAQALNTLVKQLSSNFGAISSVLNDILSRLDPPEAEVQIDRLITGRLQSLQTYVTQQLIRAAEIRASANLAATKMSECVLGQSKRVDFCGKGYHLMSFPQSAPHGVVFLHVTYVPAQEKNFTTAPAICHDGKAHFPREGVFVSNGTHWFVTQRNFYEPQIITTDNTFVSGNCDVVIGIVNNTVYDPLQPELDSGGGGSDIIKLLNEQVNKEMQSSNLYMSMSSWCYTHSLDGAGLFLFDHAAEEYEHAKKLIIFLNENNVPVQLTSISAPEHKFEGLTQIFQKAYEHEQHISESINNIVDHAIKSKDHATFNFLQWYVAEQHEEEVLFKDILDKIELIGNENHGLYLADQYVKGIAKSRKS

SEQ ID NO: 8731 - protein, 1315 aa, Artificial Sequence
  SARS-CoV-2/Hong Kong/case42_VM20002493/2020__EPI_ISL_414527 spike protein (1-1147)(K986P_V987P) Ferritin construct
MFVFLVLLPLVSSQCVNLTTRTQLPPAYTNSFTRGVYYPDKVFRSSVLHSTQDLFLPFFSNVTWFHAIHVSGTNGTKRFDNPVLPFNDGVYFASTEKSNIIRGWIFGTTLDSKTQSLLIVNNATNVVIKVCEFQFCNDPFLGVYYHKNNKSWMESEFRVYSSANNCTFEYVSQPFLMDLEGKQGNFKNLREFVFKNIDGYFKIYSKHTPINLVRDLPQGFSALEPLVDLPIGINITRFQTLLALHRSYLTPGDSSSGWTAGAAAYYVGYLQPRTFLLKYNENGTITDAVDCALDPLSETKCTLKSFTVEKGIYQTSNFRVQPTESIVRFPNITNLCPFGEVFNATRFASVYAWNRKRISNCVADYSVLYNSASFSTFKCYGVSPTKLNDLCFTNVYADSFVIRGDEVRQIAPGQTGKIADYNYKLPDDFTGCVIAWNSNNLDSKVGGNYNYLYRLFRKSNLKPFERDISTEIYQAGSTPCNGVEGFNCYFPLQSYGFQPTNGVGYQPYRVVVLSFELLHAPATVCGPKKSTNLVKNKCVNFNFNGLTGTGVLTESNKKFLPFQQFGRDIADTTDAVRDPQTLEILDITPCSFGGVSVITPGTNTSNQVAVLYQDVNCTEVPVAIHADQLTPTWRVYSTGSNVFQTRAGCLIGAEHVNNSYECDIPIGAGICASYQTQTNSPRRARSVASQSIIAYTMSLGAENSVAYSNNSIAIPTNFAISVTTEILPVSMTKTSVDCTMYICGDSTECSNLLLQYGSFCTQLNRALTGIAVEQDKNTQEVFAQVKQIYKTPPIKDFGGFNFSQILPDPSKPSKRSFIEDLLFNKVTLADAGFIKQYGDCLGDIAARDLICAQKFNGLTVLPPLLTDEMIAQYTSALLAGTITSGWTFGAGAALQIPFAMQMAYRFNGIGVTQNVLYENQKLIANQFNSAIGKIQDSLSSTASALGKLQDVVNQNAQALNTLVKQLSSNFGAISSVLNDILSRLDPPEAEVQIDRLITGRLQSLQTYVTQQLIRAAEIRASANLAATKMSECVLGQSKRVDFCGKGYHLMSFPQSAPHGVVFLHVTYVPAQEKNFTTAPAICHDGKAHFPREGVFVSNGTHWFVTQRNFYEPQIITTDNTFVSGNCDVVIGIVNNTVYDPLQPELDSGGGGSDIIKLLNEQVNKEMQSSNLYMSMSSWCYTHSLDGAGLFLFDHAAEEYEHAKKLIIFLNENNVPVQLTSISAPEHKFEGLTQIFQKAYEHEQHISESINNIVDHAIKSKDHATFNFLQWYVAEQHEEEVLFKDILDKIELIGNENHGLYLADQYVKGIAKSRKS

SEQ ID NO: 8732 - protein, 1315 aa, Artificial Sequence
  SARS-CoV-2/USA/CruiseA-23/2020__EPI_ISL_414482 spike protein (1-1147)(K986P_V987P) Ferritin construct
MFVFLVLLPLVSSQCVNLTTRTQLPPAYTNSFTRGVYYPDKVFRSSVLHSTQDLFLPFFSNVTWFHAIHVSGTNGTKRFDNPVLPFNDGVYFASTEKSNIIRGWIFGTTLDSKTQSLLIVNNATNVVIKVCEFQFCNDPFLGVYYHKNNKSWMESEFRVYSSANNCTFEYVSQPFLMDLEVKQGNFKNLREFVFKNIDGYFKIYSKHTPINLVRDLPQGFSALEPLVDLPIGINITRFQTLLALHRSYLTPGDSSSGWTAGAAAYYVGYLQPRTFLLKYNENGTITDAVDCALDPLSETKCTLKSFTVEKGIYQTSNFRVQPTESIVRFPNITNLCPFGEVFNATRFASVYAWNRKRISNCVADYSVLYNSASFSTFKCYGVSPTKLNDLCFTNVYADSFVIRGDEVRQIAPGQTGKIADYNYKLPDDFTGCVIAWNSNNLDSKVGGNYNYLYRLFRKSNLKPFERDISTEIYQAGSTPCNGVEGFNCYFPLQSYGFQPTNGVGYQPYRVVVLSFELLHAPATVCGPKKSTNLVKNKCVNFNFNGLTGTGVLTESNKKFLPFQQFGRDIADTTDAVRDPQTLEILDITPCSFGGVSVITPGTNTSNQVAVLYQDVNCTEVPVAIHADQLTPTWRVYSTGSNVFQTRAGCLIGAEHVNNSYECDIPIGAGICASYQTQTNSPRRARSVASQSIIAYTMSLGAENSVAYSNNSIAIPTNFTISVTTEILPVSMTKTSVDCTMYICGDSTECSNLLLQYGSFCTQLNRALTGIAVEQDKNTQEVFAQVKQIYKTPPIKDFGGFNFSQILPDPSKPSKRSFIEDLLFNKVTLADAGFIKQYGDCLGDIAARDLICAQKFNGLTVLPPLLTDEMIAQYTSALLAGTITSGWTFGAGAALQIPFAMQMAYRFNGIGVTQNVLYENQKLIANQFNSAIGKIQDSLSSTASALGKLQDVVNQNAQALNTLVKQLSSNFGAISSVLNDILSRLDPPEAEVQIDRLITGRLQSLQTYVTQQLIRAAEIRASANLAATKMSECVLGQSKRVDFCGKGYHLMSFPQSAPHGVVFLHVTYVPAQEKNFTTAPAICHDGKAHFPREGVFVSNGTHWFVTQRNFYEPQIITTDNTFVSGNCDVVIGIVNNTVYDPLQPELDSGGGGSDIIKLLNEQVNKEMQSSNLYMSMSSWCYTHSLDGAGLFLFDHAAEEYEHAKKLIIFLNENNVPVQLTSISAPEHKFEGLTQIFQKAYEHEQHISESINNIVDHAIKSKDHATFNFLQWYVAEQHEEEVLFKDILDKIELIGNENHGLYLADQYVKGIAKSRKS

SEQ ID NO: 8733 - protein, 1315 aa, Artificial Sequence
  SARS-CoV-2/Hong Kong/case85_VM20002868/2020__EPI_ISL_414519 spike protein (1-1147)(K986P_V987P) Ferritin construct
MFVFLVLVPLVSSQCVNLTTRTQLPPAYTNSFTRGVYYPDKVFRSSVLHSTQDLFLPFFSNVTWFHAIHVSGTNGTKRFDNPVLPFNDGVYFASTEKSNIIRGWIFGTTLDSKTQSLLIVNNATNVVIKVCEFQFCNDPFLGVYYHKNNKSWMESEFRVYSSANNCTFEYVSQPFLMDLEGKQGNFKNLREFVFKNIDGYFKIYSKHTPINLVRDLPQGFSALEPLVDLPIGINITRFQTLLALHRSYLTPGDSSSGWTAGAAAYYVGYLQPRTFLLKYNENGTITDAVDCALDPLSETKCTLKSFTVEKGIYQTSNFRVQPTESIVRFPNITNLCPFGEVFNATRFASVYAWNRKRISNCVADYSVLYNSASFSTFKCYGVSPTKLNDLCFTNVYADSFVIRGDEVRQIAPGQTGKIADYNYKLPDDFTGCVIAWNSNNLDSKVGGNYNYLYRLFRKSNLKPFERDISTEIYQAGSTPCNGVEGFNCYFPLQSYGFQPTNGVGYQPYRVVVLSFELLHAPATVCGPKKSTNLVKNKCVNFNFNGLTGTGVLTESNKKFLPFQQFGRDIADTTDAVRDPQTLEILDITPCSFGGVSVITPGTNTSNQVAVLYQDVNCTEVPVAIHADQLTPTWRVYSTGSNVFQTRAGCLIGAEHVNNSYECDIPIGAGICASYQTQTNSPRRARSVASQSIIAYTMSLGAENSVAYSNNSIAIPTNFTISVTTEILPVSMTKTSVDCTMYICGDSTECSNLLLQYGSFCTQLNRALTGIAVEQDKNTQEVFAQVKQIYKTPPIKDFGGFNFSQILPDPSKPSKRSFIEDLLFNKVTLADAGFIKQYGDCLGDIAARDLICAQKFNGLTVLPPLLTDEMIAQYTSALLAGTITSGWTFGAGAALQIPFAMQMAYRFNGIGVTQNVLYENQKLIANQFNSAIGKIQDSLSSTASALGKLQDVVNQNAQALNTLVKQLSSNFGAISSVLNDILSRLDPPEAEVQIDRLITGRLQSLQTYVTQQLIRAAEIRASANLAATKMSECVLGQSKRVDFCGKGYHLMSFPQSAPHGVVFLHVTYVPAQEKNFTTAPAICHDGKAHFPREGVFVSNGTHWFVTQRNFYEPQIITTDNTFVSGNCDVVIGIVNNTVYDPLQPELDSGGGGSDIIKLLNEQVNKEMQSSNLYMSMSSWCYTHSLDGAGLFLFDHAAEEYEHAKKLIIFLNENNVPVQLTSISAPEHKFEGLTQIFQKAYEHEQHISESINNIVDHAIKSKDHATFNFLQWYVAEQHEEEVLFKDILDKIELIGNENHGLYLADQYVKGIAKSRKS

SEQ ID NO: 8734 - protein, 1315 aa, Artificial Sequence; identical to SEQ ID NO: 8724
  SARS-CoV-2/England/200990660/2020__EPI_ISL_414523 spike protein (1-1147)(K986P_V987P) Ferritin construct

SEQ ID NO: 8735 - protein, 1315 aa, Artificial Sequence
  SARS-CoV-2/Australia/NSW09/2020__EPI_ISL_413595 spike protein (1-1147)(K986P_V987P) Ferritin construct
MFVFLVLLPLVSSQCVNLTTRTQLPPAYTNSFTRGVYYPDKVFRSSVLHSTQDLFLPFFSNVTWFHAIHVSGTNGTKRFDNPVLPFNDGVYFASTEKSNIIRGWIFGTTLDSKTQSLLIVNNATNVVIKVCEFQFCNDPFLGVYYHKNNKSWMESEFRVYSSANNCTFEYVSQPFLMDLEGKQGNFKNLREFVFKNIDGYFKIYSKHTPINLVRDLPQGFSALEPLVDLPIGINITRFQTLLALHRSYLTPGDSSSGWTAGAAAYYVGYLQPRTFLLKYNENGTITDAVDCALDPLSETKCTLKSFTVEKGIYQTSNFRVQPTESIVRFPNITNLCPFGEVFNATRFASVYAWNRKRISNCVADYSVLYNSASFSTFKCYGVSPTKLNDLCFTNVYADSFVIRGDEVRQIAPGQTGKIADYNYKLPDDFTGCVIAWNSNNLDSKVGGNYNYLYRLFRKSNLKPFERDISTEIYQAGSTPCNGVEGFNCYFPLQSYGFQPTNGVGYQPYRVVVLSFELLHAPATVCGPKKSTNLVKNKCVNFNFNGLTGTGVLTESNKKFLPFQQFGRDIADTTDAVRDPQTLEILDITPCSFGGVSVITPGTNTSNQVAVLYQDVNCTEVPVAIHADQLTPTWRVYSTGSNVFQTRAGCLIGAEHVNNSYECDIPIGAGICASYQTQTNSPRRARSVASQSIIAYTMSLGAENSVAYSNNSIAIPTNFTISVTTEILPVSMTKTSVDCTMYICGDSTECSNLLLQYGSFCTQLNRALTGIAVEQDKNTQEVFAQVKQIYKTPPIKDFGGFNFSQILPDPSKPSKRSFIEDLLFNKVTLADAGFIKQYGDCLGDIAARDLICAQKFNGLTVLPPLLTDEMIAQYTSALLAGTITSGWTFGAGAALQIPFAMQMAYRFNGIGVTQNVLYENQKLIANQFNSAIGKIQDSLSFTASALGKLQDVVNQNAQALNTLVKQLSSNFGAISSVLNDILSRLDPPEAEVQIDRLITGRLQSLQTYVTQQLIRAAEIRASANLAATKMSECVLGQSKRVDFCGKGYHLMSFPQSAPHGVVFLHVTYVPAQEKNFTTAPAICHDGKAHFPREGVFVSNGTHWFVTQRNFYEPQIITTDNTFVSGNCDVVIGIVNNTVYDPLQPELDSGGGGSDIIKLLNEQVNKEMQSSNLYMSMSSWCYTHSLDGAGLFLFDHAAEEYEHAKKLIIFLNENNVPVQLTSISAPEHKFEGLTQIFQKAYEHEQHISESINNIVDHAIKSKDHATFNFLQWYVAEQHEEEVLFKDILDKIELIGNENHGLYLADQYVKGIAKSRKS

SEQ ID NO: 8736 - protein, 1315 aa, Artificial Sequence; identical to SEQ ID NO: 8716
  SARS-CoV-2/Australia/NSW10/2020__EPI_ISL_413596 spike protein (1-1147)(K986P_V987P) Ferritin construct

SEQ ID NO: 8737 - protein, 1315 aa, Artificial Sequence
  SARS-CoV-2/Switzerland/1000477797/2020__EPI_ISL_413023 spike protein (1-1147)(K986P_V987P) Ferritin construct
MFVFLVLLPLVSSQCVNLTTRTQLPPAYTNSFTRGVYYPDKVFRSSVLHSTQDLFLPFFSNVTWFHAIHVSGTNGTKRFDNPVLPFNDGVYFASTEKSNIIRGWIFGTTLDSKTQSLLIVNNATNVVIKVCEFQFCNDPFLGVYYHKNNKSWMESEFRVYSSANNCTFEYVSQPFLMDLEGKQGNFKNLREFVFKNIDGYFNIYSKHTPINLVRDLPQGFSALEPLVDLPIGINITRFQTLLALHRSYLTPGDSSSGWTAGAAAYYVGYLQPRTFLLKYNENGTITDAVDCALDPLSETKCTLKSFTVEKGIYQTSNFRVQPTESIVRFPNITNLCPFGEVFNATRFASVYAWNRKRISNCVADYSVLYNSASFSTFKCYGVSPTKLNDLCFTNVYADSFVIRGDEVRQIAPGQTGKIADYNYKLPDDFTGCVIAWNSNNLDSKVGGNYNYLYRLFRKSNLKPFERDISTEIYQAGSTPCNGVEGFNCYFPLQSYGFQPTNGVGYQPYRVVVLSFELLHAPATVCGPKKSTNLVKNKCVNFNFNGLTGTGVLTESNKKFLPFQQFGRDIADTTDAVRDPQTLEILDITPCSFGGVSVITPGTNTSNQVAVLYQGVNCTEVPVAIHADQLTPTWRVYSTGSNVFQTRAGCLIGAEHVNNSYECDIPIGAGICASYQTQTNSPRRARSVASQSIIAYTMSLGAENSVAYSNNSIAIPTNFTISVTTEILPVSMTKTSVDCTMYICGDSTECSNLLLQYGSFCTQLNRALTGIAVEQDKNTQEVFAQVKQIYKTPPIKDFGGFNFSQILPDPSKPSKRSFIEDLLFNKVTLADAGFIKQYGDCLGDIAARDLICAQKFNGLTVLPPLLTDEMIAQYTSALLAGTITSGWTFGAGAALQIPFAMQMAYRFNGIGVTQNVLYENQKLIANQFNSAIGKIQDSLSSTASALGKLQDVVNQNAQALNTLVKQLSSNFGAISSVLNDILSRLDPPEAEVQIDRLITGRLQSLQTYVTQQLIRAAEIRASANLAATKMSECVLGQSKRVDFCGKGYHLMSFPQSAPHGVVFLHVTYVPAQEKNFTTAPAICHDGKAHFPREGVFVSNGTHWFVTQRNFYEPQIITTDNTFVSGNCDVVIGIVNNTVYDPLQPELDSGGGGSDIIKLLNEQVNKEMQSSNLYMSMSSWCYTHSLDGAGLFLFDHAAEEYEHAKKLIIFLNENNVPVQLTSISAPEHKFEGLTQIFQKAYEHEQHISESINNIVDHAIKSKDHATFNFLQWYVAEQHEEEVLFKDILDKIELIGNENHGLYLADQYVKGIAKSRKS

SEQ ID NO: 8738 - protein, 1315 aa, Artificial Sequence
  SARS-CoV-2/Belgium/BA-02291/2020__EPI_ISL_415159 spike protein (1-1147)(K986P_V987P) Ferritin construct
MFVFLVLLPLVSSQCVNLTTRTQLPPAYTNSFTRGVYYPDKVFRSSVLHSTQDLFLPFFSNVTWFHAIHVSGTNGTKRFDNPVLPFNDGVYFASTEKSNIIRGWIFGTTLDSKTQSLLIVNNATNVVIKVCEFQFCNDPFLGVYYHKNNKSWMESEFRVYSSANNCTFEYVSQPFLMDLEGKQGNFKNLREFVFKNIDGYFKIYSKHTPINLVRDLPQGFSALEPLVDLPIGINITRFQTLLALHRSYLTPGDSSSGWTAGAAAYYVGYLQPRTFLLKYNENGTITDAVDCALDPLSETKCTLKSFTVEKGIYQTSNFRVQPTESIVRFPNITNLCPFGEVFNATRFASVYAWNRKRISNCVADYSVLYNSASFSTFKCYGVSPTKLNDLCFTNVYADSFVIRGDEVRQIAPGQTGKIADYNYKLPDDFTGCVIAWNSNNLDSKVGGNYNYLYRLFRRSNLKPFERDISTEIYQAGSTPCNGVEGFNCYFPLQSYGFQPTNGVGYQPYRVVVLSFELLPAPATVCGPKKSTNLVKNKCVNFNFNGLTGTGVLTESNKKFLPFQQFGRDIADTTDAVRDPQTLEILDITPCSFGGVSVITPGTNTSNQVAVLYQGVNCTEVPVAIHADQLTPTWRVYSTGSNVFQTRAGCLIGAEHVNNSYECDIPIGAGICASYQTQTNSPRRARSVASQSIIAYTMSLGAENSVAYSNNSIAIPTNFTISVTTEILPVSMTKTSVDCTMYICGDSTECSNLLLQYGSFCTQLNRALTGIAVEQDKNTQEVFAQVKQIYKTPPIKDFGGFNFSQILPDPSKPSKRSFIEDLLFNKVTLADAGFIKQYGDCLGDIAARDLICAQKFNGLTVLPPLLTDEMIAQYTSALLAGTITSGWTFGAGAALQIPFAMQMAYRFNGIGVTQNVLYENQKLIANQFNSAIGKIQDSLSSAAPALGKLQDVVNQNAQALNTLVKQLSSNFGAISSVLNDILSRLDPPEAEVQIDRLITGRLQSLQTYVTQQLIRAAEIRASANLAATKMSECVLGQSKRVDFCGKGYHLMSFPQSAPHGVVFLHVTYVPAQEKNFTTAPAICHDGKAHFPREGVFVSNGTHWFVTQRNFYEPQIITTDNTFVSGNCDVVIGIVNNTVYDPLQPELDSGGGGSDIIKLLNEQVNKEMQSSNLYMSMSSWCYTHSLDGAGLFLFDHAAEEYEHAKKLIIFLNENNVPVQLTSISAPEHKFEGLTQIFQKAYEHEQHISESINNIVDHAIKSKDHATFNFLQWYVAEQHEEEVLFKDILDKIELIGNENHGLYLADQYVKGIAKSRKS

SEQ ID NO: 8739 - protein, 1315 aa, Artificial Sequence
  SARS-CoV-2/USA/WA8-UW5/2020__EPI_ISL_413486 spike protein (1-1147)(K986P_V987P) Ferritin construct
MFVFLVLLPLVSSQCVNLTTRTQLPPAYTNSFTRGVYYPDKVFRSSVLHSTQDLFLPFFSNVTWFHAIHVSGTNGTKRFDNPVLPFNDGVYFASTEKSNIIRGWIFGTTLDSKTQSLLIVNNATNVVIKVCEFQFCNDPFLGVYYHKNNKSWMESEFRVYSSANNCTFEYVSQPFLMDLEGKQGNFKNLREFVFKNIDGYFKIYSKHTPINLVRDLPQGFSALEPLVDLPIGINITRFQTLLALHRSYLTPGDSSSGWTAGAAAYYVGYLQPRTFLLKYNENGTITDAVDCALDPLSETKCTLKSFTVEKGIYQTSNFRVQPTESIVRFPNITNLCPFGEVFNATRFASVYAWNRKRISNCVADYSVLYNSASFSTFKCYGVSPTKLNDLCFTNVYADSFVIRGDEVRQIAPGQTGKIADYNYKLPDDFTGCVIAWNSNNLDSKVGGNYNYLYRLFRKSNLKPFERDISTEIYQAGSTPCNGVEGFNCYFPLQSYGFQPTNGVGYQPYRVVVLSFELLHAPATVCGPKKSTNLVKNKCVNFNFNGLTGTGVLTESNKKFLPFQQFGRDIADTTDAVRDPQTLEILDITPCSFGGVSVITPGTNTSNQVAVLYQDVNCTEVPVAIHADQLTPTWRVYSTGSNVFQTRAGCLIGAEYVNNSYECDIPIGAGICASYQTQTNSPRRARSVASQSIIAYTMSLGAENSVAYSNNSIAIPTNFTISVTTEILPVSMTKTSVDCTMYICGDSTECSNLLLQYGSFCTQLNRALTGIAVEQDKNTQEVFAQVKQIYKTPPIKDFGGFNFSQILPDPSKPSKRSFIEDLLFNKVTLADAGFIKQYGDCLGDIAARDLICAQKFNGLTVLPPLLTDEMIAQYTSALLAGTITSGWTFGAGAALQIPFAMQMAYRFNGIGVTQNVLYENQKLIANQFNSAIGKIQDSLSSTASALGKLQDVVNQNAQALNTLVKQLSSNFGAISSVLNDILSRLDPPEAEVQIDRLITGRLQSLQTYVTQQLIRAAEIRASANLAATKMSECVLGQSKRVDFCGKGYHLMSFPQSAPHGVVFLHVTYVPAQEKNFTTAPAICHDGKAHFPREGVFVSNGTHWFVTQRNFYEPQIITTDNTFVSGNCDVVIGIVNNTVYDPLQPELDSGGGGSDIIKLLNEQVNKEMQSSNLYMSMSSWCYTHSLDGAGLFLFDHAAEEYEHAKKLIIFLNENNVPVQLTSISAPEHKFEGLTQIFQKAYEHEQHISESINNIVDHAIKSKDHATFNFLQWYVAEQHEEEVLFKDILDKIELIGNENHGLYLADQYVKGIAKSRKS

SEQ ID NO: 8740 - protein, 1315 aa, Artificial Sequence
  SARS-CoV-2/England/20102000506/2020__EPI_ISL_415147 spike protein (1-1147)(K986P_V987P) Ferritin construct
MFVFLVLLPLVSSQCVNLTTRTQLPPAYTNSFTRGVYYPDKVFRSSVLHSTQDLFLPFFSNVTWFHAIHVSGTNGTKRFDNPVLPFNDGVYFASTEKSNIIRGWIFGTTLDSKTQSLLIVNNATNVVIKVCEFQFCNDPFLGVYYHKNNKSWMESEFRVYSSANNCTFEYVSQPFLMDLEGKQGNFKNLREFVFKNIDGYFKIYSKHTPINLVRDLPQGFSALEPLVDLPIGINITRFQTLLALHRSYLTPGDSSSGWTAGAAAYYVGYLQPRTFLLKYNENGTITDAVDCALDPLSETKCTLKSFTVEKGIYQTSNFRVQPTESIVRFPNITNLCPFGEVFNATRFASVYAWNRKRISNCVADYSVLYNSASFSTFKCYGVSPTKLNDLCFTNVYADSFVIRGDEVRQIAPGQTGKIADYNYKLPDDFTGCVIAWNSNNLDSKVGGNYNYLYRLFRKSNLKPFERDISTEIYQAGSTPCNGVEGFNCYFPLQSYGFQPTNGVGYQPYRVVVLSFELLHAPATVCGPKKSTNLVKNKCVNFNFNGLTGTGVLTESNKKFLPFQQFGRDIADTTDAVRDPQTLEILDITPCSFGGVSVITPGTNTSNQVAVLYQGVNCTEVPVAIHADQLTPTWRVYSTGSNVFQTRAGCLIGAEHVNNSYECDIPIGAGICASYQTQTNSPRRARSVASQSIIAYTMSLGAENSVAYSNNSIAIPTNFTISVTTEILPVSMTKTSVDCTMYICGDSTECSNLLLQYGSFCTQLNRALTGIAVEQDKNTQEVFAQVKQIYKTPPIKDFGGFNFSQILPDPSKPSKRSFIEDLLFNKVTLADAGFIKQYGYCLGDIAARDLICAQKFNGLTVLPPLLTDEMIAQYTSALLAGTITSGWTFGAGAALQIPFAMQMAYRFNGIGVTQNVLYENQKLIANQFNSAIGKIQDSLSSTASALGKLQDVVNQNAQALNTLVKQLSSNFGAISSVLNDILSRLDPPEAEVQIDRLITGRLQSLQTYVTQQLIRAAEIRASANLAATKMSECVLGQSKRVDFCGKGYHLMSFPQSAPHGVVFLHVTYVPAQEKNFTTAPAICHDGKAHFPREGVFVSNGTHWFVTQRNFYEPQIITTDNTFVSGNCDVVIGIVNNTVYDPLQPELDSGGGGSDIIKLLNEQVNKEMQSSNLYMSMSSWCYTHSLDGAGLFLFDHAAEEYEHAKKLIIFLNENNVPVQLTSISAPEHKFEGLTQIFQKAYEHEQHISESINNIVDHAIKSKDHATFNFLQWYVAEQHEEEVLFKDILDKIELIGNENHGLYLADQYVKGIAKSRKS

SEQ ID NO: 8741 - protein, 1315 aa, Artificial Sequence
  SARS-CoV-2/Belgium/VAG-03013/2020__EPI_ISL_415155 spike protein (1-1147)(K986P_V987P) Ferritin construct
MFVFLVLLPLVSSQCVNLTTRTQLPPAYTNSFTRGVYYPDKVFRSSVLHSTQDLFLPFFSNVTWFHAIHVSGTNGTKRFDNPVLPFNDGVYFASTEKSNIIRGWIFGTTLDSKTQSLLIVNNATNVVIKVCEFQFCNDPFLGVYYHKNNKSWMESEFRVYSSANNCTFEYVSQPFLMDLEGKQGNFKNLREFVFKNIDGYFKIYSKHTPINLVRDLPQGFSALEPLVDLPIGINITRFQTLLALHRSYLTPGDSSSGWTAGAAAYYVGYLQPRTFLLKYNENGTITDAVDCALDPLSETKCTLKSFTVEKGIYQTSNFRVQPTESIVRFPNITNLCPFGEVFNATRFASVYAWNRKRISNCVADYSVLYNSASFSTFKCYGVSPTKLNDLCFTNVYADSFVIRGDEVRQIAPGQTGKIADYNYKLPDDFTGCVIAWNSNNLDSKVGGNYNYLYRLFRKSNLKPFERDISTEIYQAGSTPCNGVEGFNCYFPLQSYGFQPTNGVGYQPYRVVVLSFELLHAPATVCGPKKSTNLVKNKCVNFNFNGLTGTGVLTESNKKFLPFQQFGRDIADTTDAVRDPQTLEILDITPCSFGGVSVITPGTNTSNQVAVLYQGVNCTEVPVAIHADQLTPTWRVYSTGSNVFQTRAGCLIGAEHVNNSYECDIPIGAGICASYQTQTNSPRRARSVASQSIIAYTMSLGAENSVAYSNNSIAIPTNFTISVTTEILPVSMTKTSVDCTMYICGDSTECSNLLLQYGSFCTQLNRALTGIAVEQDKNTQEVFAQVKQIYKTPPIKDFGGFNFSQILPDPSKPSKRSFIEDLLFNKVTLADAGFIKQYGDCLGDIAARDLICAQKFNGLTVLPPLLTDEMIAQYTSALLAGTITSGWTFGAGAALQIPFAMQMAYRFNGIGVTQNVLYENQKLIANQFNSAIGKIQDSLSSTATALGKLQDVVNQNAQALNTLVKQLSSNFGAISSVLNDILSRLDPPEAEVQIDRLITGRLQSLQTYVTQQLIRAAEIRASANLAATKMSECVLGQSKRVDFCGKGYHLMSFPQSAPHGVVFLHVTYVPAQEKNFTTAPAICHDGKAHFPREGVFVSNGTHWFVTQRNFYEPQIITTDNTFVSGNCDVVIGIVNNTVYDPLQPELDSGGGGSDIIKLLNEQVNKEMQSSNLYMSMSSWCYTHSLDGAGLFLFDHAAEEYEHAKKLIIFLNENNVPVQLTSISAPEHKFEGLTQIFQKAYEHEQHISESINNIVDHAIKSKDHATFNFLQWYVAEQHEEEVLFKDILDKIELIGNENHGLYLADQYVKGIAKSRKS

SEQ ID NO: 8742 - protein, 1315 aa, Artificial Sequence
  SARS-CoV-2/Belgium/BC-03016/2020__EPI_ISL_415157 spike protein (1-1147)(K986P_V987P) Ferritin construct
MFVFLVLLPLVSSQCVNLTTRTQLPPAYTNSFTRGVYYPDKVFRSSVLHSTQDLFLPFFSNVTWFHAIHVSGTNGTKRFDNPVLPFNDGVYFASTEKSNIIRGWIFGTTLDSKTQSLLIVNNATNVVIKVCEFQFCNDPFLGVYYHKNNKSWMESEFRVYSSANNCTFEYVSQPFLMDLEGKQGNFKNLREFVFKNIDGYFKIYSKHTPINLVRDLPQGFSALEPLVDLPIGINITRFQTLLALHRSYLTPGDSSSGWTAGAAAYYVGYLQPRTFLLKYNENGTITDAVDCALDPLSETKCTLKSFTVEKGIYQTSNFRVQPTESIVRFPNITNLCPFGEVFNATRFASVYAWNRKRISNCVADYSVLYNSASFSTFKCYGVSPTKLNDLCFTNVYADSFVIRGDEVRQIAPGQTGKIADYNYKLPDDFTGCVIAWNSNNLDSKVGGNYNYLYRLFRKSNLKPFERDISTEIYQAGSTPCNGVEGFNCYFPLQSYGFQPTNGVGYQPYRVVVLSFELLHAPATVCGPKKSTNLVKNKCVNFNFNGLTGTGVLTESNKKFLPFQQFGRDIADTTDAVRDPQTLEILDITPCSFGGVSVITPGTNTSNQVAVLYQGVNCTEVPVAIHADQLTPTWRVYSTGSNVFQTRAGCLIGAEHVNNSYECDIPIGAGICASYQTQTNSPRRARSVASQSIIAYTMSLGAENSVAYSNNSIAIPTNFTISVTTEILPVSMTKTSVDCTMYICGDSTECSNLLLQYGSFCTQLNRALTGIAVEQDKNTQEVFAQVKQIYKTPPIKDFGGFNFSQILPDPSKPSKRSFIEDLLFNKVTLADAGFIKQYGDCLGDIAARDLICAQKFNGLTVLPPLLTDEMIAQYTSALLAGTITSGWTFGAGAALQIPFAMQMAYRFNGIGVTQNVLYENQKLIANQFNSAIGKIQDSLSSTAPALGKLQDVVNQNAQALNTLVKQLSSNFGAISSVLNDILSRLDPPEAEVQIDRLITGRLQSLQTYVTQQLIRAAEIRASANLAATKMSECVLGQSKRVDFCGKGYHLMSFPQSAPHGVVFLHVTYVPAQEKNFTTAPAICHDGKAHFPREGVFVSNGTHWFVTQRNFYEPQIITTDNTFVSGNCDVVIGIVNNTVYDPLQPELDSGGGGSDIIKLLNEQVNKEMQSSNLYMSMSSWCYTHSLDGAGLFLFDHAAEEYEHAKKLIIFLNENNVPVQLTSISAPEHKFEGLTQIFQKAYEHEQHISESINNIVDHAIKSKDHATFNFLQWYVAEQHEEEVLFKDILDKIELIGNENHGLYLADQYVKGIAKSRKS

SEQ ID NO: 8743 - protein, 1315 aa, Artificial Sequence
  SARS-CoV-2/Germany/BavPat3/2020__EPI_ISL_414521 spike protein (1-1147)(K986P_V987P) Ferritin construct
MFVFLVLLPLVSSQCVNLTTRTQLPPAYTNSFTRGVYYPDKVFRSSVLHSTQDLFLPFFSNVTWFHAIHVSGTNGTKRFDNPVLPFNDGVYFASTEKSNIIRGWIFGTTLDSKTQSLLIVNNATNVVIKVCEFQFCNDPFLGVYYHKNNKSWMESEFRVYSSANNCTFEYVSQPFLMDLEGKQGNFKNLREFVFKNIDGYFKIYSKHTPINLVRDLPQGFSALEPLVDLPIGINITRFQTLLALHRSYLTPGDSSSGWTAGAAAYYVGYLQPRTFLLKYNENGTITDAVDCALDPLSETKCTLKSFTVEKGIYQTSNFRVQPTESIVRFPNITNLCPFGEVFNATRFASVYAWNRKRISNCVADYSVLYNSASFSTFKCYGVSPTKLNDLCFTNVYADSFVIRGDEVRQIAPGQTGKIADYNYKLPDDFTGCVIAWNSNNLDSKVGGNYNYLYRLFRKSNLKPFERDISTEIYQAGSTPCNGVEGFNCYFPLQSYGFQPTNGVGYQPYRVVVLSFELLHAPATVCGPKKSTNLVKNKCVNFNFNGLTGTGVLTESNKKFLPFQQFGRDIADTTDAVRDPQTLEILDITPCSFGGVSVITPGTNTSNQVAVLYQDVNCTEVPVAIHADQLTPTWRVYSTGSNVFQTRAGCLIGAEHVNNSYECDIPIGAGICASYQTQTNSPRRARSVASQSIIAYTMSLGAENSVAYSNNSIAIPTNFTISVTTEILPVSMTKTSVDCTMYICGDSTECSNLLLQYGSFCTQLNRALTGIAVEQDKNTQQVFAQVKQIYKTPPIKDFGGFNFSQILPDPSKPSKRSFIEDLLFNKVTLADAGFIKQYGDCLGDIAARDLICAQKFNGLTVLPPLLTDEMIAQYTSALLAGTITSGWTFGAGAALQIPFAMQMAYRFNGIGVTQNVLYENQKLIANQFNSAIGKIQDSLSSTASALGKLQDVVNQNAQALNTLVKQLSSNFGAISSVLNDILSRLDPPEAEVQIDRLITGRLQSLQTYVTQQLIRAAEIRASANLAATKMSECVLGQSKRVDFCGKGYHLMSFPQSAPHGVVFLHVTYVPAQEKNFTTAPAICHDGKAHFPREGVFVSNGTHWFVTQRNFYEPQIITTDNTFVSGNCDVVIGIVNNTVYDPLQPELDSGGGGSDIIKLLNEQVNKEMQSSNLYMSMSSWCYTHSLDGAGLFLFDHAAEEYEHAKKLIIFLNENNVPVQLTSISAPEHKFEGLTQIFQKAYEHEQHISESINNIVDHAIKSKDHATFNFLQWYVAEQHEEEVLFKDILDKIELIGNENHGLYLADQYVKGIAKSRKS

SEQ ID NO: 8744 - protein, 1315 aa, Artificial Sequence
  SARS-CoV-2/France/HF1805/2020__EPI_ISL_414628 spike protein (1-1147)(K986P_V987P) Ferritin construct
MFVFLVLLPLVSSQCVNLTTRTQLPPAYTNSFTRGVYYPDKVFRSSVLHSTQDLFLPFFSNVTWFHAIHVSGTNGTKRFDNPVLPFNDGVYFASTEKSNIIRGWIFGTTLDSKTQSLLIVNNATNVVIKVCEFQFCNDPFLGVYYHKNNKSWMESEFRVYSSANNCTFEYVSQPFLMDLEGKQGNFKNLREFVFKNIDGYFKIYSKHTPINLVRDLPQGFSALEPLVDLPIGINITRFQTLLALHRSYLTPGDSSSGWTAGAAAYYVGYLQPRTFLLKYNENGTITDAVDCALDPLSETKCTLKSFTVEKGIYQTSNFRVQPTESIVRFPNITNLCPFGEVFNATRFASVYAWNRKRISNCVADYSVLYNSASFSTFKCYGVSPTKLNDLCFTNVYADSFVIRGDEVRQIAPGQTGKIADYNYKLPDDFTGCVIAWNSNNLDSKVGGNYNYLYRLFRKSNLKPFERDISTEIYQAGSTPCNGVEGFNCYFPLQSYGFQPTNGVGYQPYRVVVLSFELLHAPATVCGPKKSTNLVKNKCVNFNFNGLTGTGVLTESNKKFLPFQQFGRDIADTTDAVRDPQTLEILDITPCSFGGVSVITPGTNTSNQVAVLYQGVNCTEVPVAIHADQLTPTWRVYSTGSNVFQTRAGCLIGAEHVNNSYECDIPIGAGICASYQTQTNSPRRARSVASQSIIAYTMSLGAENSVAYSNNSIAIPTNFTISVTTEILPVSMTKTSVDCTMYICGDSTECSNLLLQYGSFCTQLNRALTGIAVEQDKNTQEVFAQVKQIYKTPPIKDFGGFNFSQILPDPSKPSKRSFIEDLLFNKVTLADAGFIKQYGDCLGDIAARDLICAQKFNGLTVLPPLLTDEMIAQYTSALLAGTITSGWTFGAGAALQIPFAMQMAYRFNGIGVTQNVLYENQKLIANQFNSAIGKIQDSLSSTASALGKLQDVVNQNAQALNTLVKQLSSNFGAISSVLNDILSRLDPPEAEVQIDRLITGRLQSLQTYVTQQLIRAAEIRASANLAATKMSECVLGQSKRVDFCGKGYHLMSFPQSAPHGVVFLHVTYVPAQEKNFTTAPAICHDGKAHFPREGVFVSNGTHWFVTQRNFYEPQIITTDNTFVSGNCDVVIGVVNNTVYDPLQPELDSGGGGSDIIKLLNEQVNKEMQSSNLYMSMSSWCYTHSLDGAGLFLFDHAAEEYEHAKKLIIFLNENNVPVQLTSISAPEHKFEGLTQIFQKAYEHEQHISESINNIVDHAIKSKDHATFNFLQWYVAEQHEEEVLFKDILDKIELIGNENHGLYLADQYVKGIAKSRKS

SEQ ID NO: 8745 - protein, 1315 aa, Artificial Sequence
  SARS-CoV-2/Netherlands/ZuidHolland_9/2020__EPI_ISL_414445 spike protein (1-1147)(K986P_V987P) Ferritin construct
MFVFLVLLPLVSSQCVNLTTRTQLPPAYTNSFTRGVYYPDKVFRSSVLHSTQDLFLPFFSNVTWFHAIHVSGTNGTKRFDNPVLPFNDGVYFASTEKSNIIRGWIFGTTLDSKTQSLLIVNNATNVVIKVCEFQFCNDPFLGVYYHKNNKSWMESEFRVYSSANNCTFEYVSQPFLMDLEGKQGNFKNLREFVFKNIDGYFKIYSKHTPINLVRDLPQGFSALEPLVDLPIGINITRFQTLLALHRSYLTPGDSSSGWTAGAAAYYVGYLQPRTFLLKYNENGTITDAVDCALDPLSETKCTLKSFTVEKGIYQTSNFRVQPTESIVRFPNITNLCPFGEVFNATRFASVYAWNRKRISNCVADYSVLYNSASFSTFKCYGVSPTKLNDLCFTNVYADSFVIRGDEVRQIAPGQTGKIADYNYKLPDDFTGCVIAWNSNNLDSKVGGNYNYLYRLFRKSNLKPFERDISTEIYQAGSTPCNGVEGFNCYFPLQSYGFQPTNGVGYQPYRVVVLSFELLHAPATVCGPKKSTNLVKNKCVNFNFNGLTGTGVLTESNKKFLPFQQFGRDIADTTDAVRDPQTLEILDITPCSFGGVSVITPGTNTSNQVAVLYQGVNCTEVPVAIHADQLTPTWRVYSTGSNVFQTRAGCLIGAEHVNNSYECDIPIGAGICASYQTQTNSPRRARSVASQSIIAYTMSLGAENSVAYSNNSIAIPTNFTISVTTEILPVSMTKTSVDCTMYICGDSTECSNLLLQYGSFCTQLNRALTGIAVEQDKNTQEVFAQVKQIYKTPPIKDFGGFNFSQILPDPSKPSKRSFIEDLLFNKVTLADAGFIKQYGDCLGDIAARDLICVQKFNGLTVLPPLLTDEMIAQYTSALLAGTITSGWTFGAGAALQIPFAMQMAYRFNGIGVTQNVLYENQKLIANQFNSAIGKIQDSLSSTASALGKLQDVVNQNAQALNTLVKQLSSNFGAISSVLNDILSRLDPPEAEVQIDRLITGRLQSLQTYVTQQLIRAAEIRASANLAATKMSECVLGQSKRVDFCGKGYHLMSFPQSAPHGVVFLHVTYVPAQEKNFTTAPAICHDGKAHFPREGVFVSNGTHWFVTQRNFYEPQIITTDNTFVSGNCDVVIGIVNNTVYDPLQPELDSGGGGSDIIKLLNEQVNKEMQSSNLYMSMSSWCYTHSLDGAGLFLFDHAAEEYEHAKKLIIFLNENNVPVQLTSISAPEHKFEGLTQIFQKAYEHEQHISESINNIVDHAIKSKDHATFNFLQWYVAEQHEEEVLFKDILDKIELIGNENHGLYLADQYVKGIAKSRKS

SEQ ID NO: 8746 - protein, 1315 aa, Artificial Sequence
  SARS-CoV-2/Finland/FIN03032020A/2020__EPI_ISL_413602 spike protein (1-1147)(K986P_V987P) Ferritin construct
MFVFLVLLPLVSSQCVNLTTRTQLPPAYTNSFTRGVYYPDKVFRSSVLHSTQDLFLPFFSNVTWFHAIHVSGTNGTKRFDNPVLPFNDGVYFASTEKSNIIRGWIFGTTLDSKTQSLLIVNNATNVVIKVCEFQFCNDPFLGVYYHKNNKSWMESEFRVYSSANNCTFEYVSQPFLMDLEGKQGNFKNLREFVFKNIDGYFKIYSKHTPINLVRDLPQGFSALEPLVDLPIGINITRFQTLLALHRSYLTPGDSSSGWTAGAAAYYVGYLQPRTFLLKYNENGTITDAVDCALDPLSETKCTLKSFTVEKGIYQTSNFRVQPTESIVRFPNITNLCPFGEVFNATRFASVYAWNRKRISNCVADYSVLYNSASFSTFKCYGVSPTKLNDLCFTNVYADSFVIRGDEVRQIAPGQTGKIADYNYKLPDDFTGCVISWNSNNLDSKVGGNYNYLYRLFRKSNLKPFERDISTEIYQAGSTPCNGVEGFNCYFPLQSYGFQPTNGVGYQPYRVVVLSFELLHAPATVCGPKKSTNLVKNKCVNFNFNGLTGTGVLTESNKKFLPFQQFGRDIADTTDAVRDPQTLEILDITPCSFGGVSVITPGTNTSNQVAVLYQGVNCTEVPVAIHADQLTPTWRVYSTGSNVFQTRAGCLIGAEHVNNSYECDIPIGAGICASYQTQTNSPRRARSVASQSIIAYTMSLGAENSVAYSNNSIAIPTNFTISVTTEILPVSMTKTSVDCTMYICGDSTECSNLLLQYGSFCTQLNRALTGIAVEQDKNTQEVFAQVKQIYKTPPIKDFGGFNFSQILPDPSKPSKRSFIEDLLFNKVTLADAGFIKQYGDCLGDIAARDLICAQKFNGLTVLPPLLTDEMIAQYTSALLAGTITSGWTFGAGAALQIPFAMQMAYRFNGIGVTQNVLYENQKLIANQFNSAIGKIQDSLSSTASALGKLQDVVNQNAQALNTLVKQLSSNFGAISSVLNDILSRLDPPEAEVQIDRLITGRLQSLQTYVTQQLIRAAEIRASANLAATKMSECVLGQSKRVDFCGKGYHLMSFPQSAPHGVVFLHVTYVPAQEKNFTTAPAICHDGKAHFPREGVFVSNGTHWFVTQRNFYEPQIITTDNTFVSGNCDVVIGIVNNTVYDPLQPELDSGGGGSDIIKLLNEQVNKEMQSSNLYMSMSSWCYTHSLDGAGLFLFDHAAEEYEHAKKLIIFLNENNVPVQLTSISAPEHKFEGLTQIFQKAYEHEQHISESINNIVDHAIKSKDHATFNFLQWYVAEQHEEEVLFKDILDKIELIGNENHGLYLADQYVKGIAKSRKS

SEQ ID NO: 8747 - protein, 1315 aa, Artificial Sequence
  SARS-CoV-2/France/GE1977/2020__EPI_ISL_414632 spike protein (1-1147)(K986P_V987P) Ferritin construct
MFVFLVLLPLVSSQCVNLTTRTQLPPAYTNSFTRGVYYPDKVFRSSVLHSTQDLFLPFFSNVTWFHAIHVSGTNGTKRFDNPVLPFNDGVYFASTEKSNIIRGWIFGTTLDSKTQSLLIVNNATNVVIKVCEFQFCNDPFLGVYYHKNNKSWMESEFRVYSSANNCTFEYVSQPFLMDLEGKQGNFKNLREFVFKNIDGYFKIYSKHTPINLVRDLPQGFSALEPLVDLPIGINITRFQTLLALHRSYLTPGDSSSGWTAGAAAYYVGYLQPRTFLLKYNENGTITDAVDCALDPLSETKCTLKSFTVEKGIYQTSNFRVQPTESIVRFPNITNLCPFGEVFNATRFASVYAWNRKRISNCVADYSVLYNSASFSTFKCYGVSPTKLNDLCFTNVYADSFVIRGDEVRQIAPGQTGKIADYNYKLPDDFTGCVIAWNSNNLDSKVGGNYNYLYRLFRKSNLKPFERDISTEIYQAGSTPCNGVEGFNCYFPLQSYGFQPTNGVGYQPYRVVVLSFELLHAPATVCGPKKSTNLVKNKCVNFNFNGLTGTGVLTESNKKFLPFQQFGRDIADTTDAVRDPQTLEILDITPCSFGGVSVITPGTNTSNQVAVLYQGVNCTEVPVAIHADQLTPTWRVYSTGSNVFQTRAGCLIGAEHVNNSYECDIPIGAGICASYQTQTNSPRRARSVASQSIIAYTMSLGAENSVAYSNNSIAIPTNFTISVTTEILPVSMTKTSVDCTMYICGDSTECSNLLLQYGSFCTQLNRALTGIAVEQDKNTQEVFAQVKQIYKTPPIKDFGGFNFSQILPDPSKPSKRSFIEDLLFNKVTLADAGFIKQYGDCLGDIAARDLICAQKFNGLTVLPPLLTDEMIAQYTSALLAGTITSGWTFGAGAALQIPFAMQMAYRFNGIGVTQNVLYENQKLIANQFNSAIGKIQDSLFSTASALGKLQDVVNQNAQALNTLVKQLSSNFGAISSVLNDILSRLDPPEAEVQIDRLITGRLQSLQTYVTQQLIRAAEIRASANLAATKMSECVLGQSKRVDFCGKGYHLMSFPQSAPHGVVFLHVTYVPAQEKNFTTAPAICHDGKAHFPREGVFVSNGTHWFVTQRNFYEPQIITTDNTFVSGNCDVVIGIVNNTVYDPLQPELDSGGGGSDIIKLLNEQVNKEMQSSNLYMSMSSWCYTHSLDGAGLFLFDHAAEEYEHAKKLIIFLNENNVPVQLTSISAPEHKFEGLTQIFQKAYEHEQHISESINNIVDHAIKSKDHATFNFLQWYVAEQHEEEVLFKDILDKIELIGNENHGLYLADQYVKGIAKSRKS

SEQ ID NO: 8748 - protein, 1315 aa, Artificial Sequence
  SARS-CoV-2/Finland/FIN-313/2020__EPI_ISL_414641 spike protein (1-1147)(K986P_V987P) Ferritin construct
MFVFLVLLPLVSSQCVNLTTRTQLPPAYTNSFTRGVYYPDKVFRSSVLHSTQDLFLPFFSNVTWFHAIHVSGTNGTKRFDNPVLPFNDGVYFASTEKSNIIRGWIFGTTLDSKTQSLLIVNNATNVVIKVCEFQFCNDPFLGVYYHKNNKSWMESEFRVYSSANNCTFEYVSQPFLMDLEGKQGNFKNLREFVFKNIDGYFKIYSKHTPINLVRDLPQGFSALEPLVDLPIGINITRFKTLLALHRSYLTPGDSSSGWTAGAAAYYVGYLQPRTFLLKYNENGTITDAVDCALDPLSETKCTLKSFTVEKGIYQTSNFRVQPTESIVRFPNITNLCPFGEVFNATRFASVYAWNRKRISNCVADYSVLYNSASFSTFKCYGVSPTKLNDLCFTNVYADSFVIRGDEVRQIAPGQTGKIADYNYKLPDDFTGCVIAWNSNNLDSKVGGNYNYLYRLFRKSNLKPFERDISTEIYQAGSTPCNGVEGFNCYFPLQSYGFQPTNGVGYQPYRVVVLSFELLHAPATVCGPKKSTNLVKNKCVNFNFNGLTGTGVLTESNKKFLPFQQFGRDIADTTDAVRDPQTLEILDITPCSFGGVSVITPGTNTSNQVAVLYQGVNCTEVPVAIHADQLTPTWRVYSTGSNVFQTRAGCLIGAEHVNNSYECDIPIGAGICASYQTQTNSPRRARSVASQSIIAYTMSLGAENSVAYSNNSIAIPTNFTISVTTEILPVSMTKTSVDCTMYICGDSTECSNLLLQYGSFCTQLNRALTGIAVEQDKNTQEVFAQVKQIYKTPPIKDFGGFNFSQILPDPSKPSKRSFIEDLLFNKVTLADAGFIKQYGDCLGDIAARDLICAQKFNGLTVLPPLLTDEMIAQYTSALLAGTITSGWTFGAGAALQIPFAMQMAYRFNGIGVTQNVLYENQKLIANQFNSAIGKIQDSLSSTASALGKLQDVVNQNAQALNTLVKQLSSNFGAISSVLNDILSRLDPPEAEVQIDRLITGRLQSLQTYVTQQLIRAAEIRASANLAATKMSECVLGQSKRVDFCGKGYHLMSFPQSAPHGVVFLHVTYVPAQEKNFTTAPAICHDGKAHFPREGVFVSNGTHWFVTQRNFYEPQIITTDNTFVSGNCDVVIGIVNNTVYDPLQPELDSGGGGSDIIKLLNEQVNKEMQSSNLYMSMSSWCYTHSLDGAGLFLFDHAAEEYEHAKKLIIFLNENNVPVQLTSISAPEHKFEGLTQIFQKAYEHEQHISESINNIVDHAIKSKDHATFNFLQWYVAEQHEEEVLFKDILDKIELIGNENHGLYLADQYVKGIAKSRKS

SEQ ID NO: 8749 - protein, 1315 aa, Artificial Sequence
  SARS-CoV-2/Netherlands/ZuidHolland_2/2020__EPI_ISL_414556 spike protein (1-1147)(K986P_V987P) Ferritin construct
MFVFLVLLPLVSSQCVNLTTRTQLPPAYTNSFTRGVYYPDKVFRSSVLHSTQDLFLPFFSNVTWFHAIHVSGTNGTKRFDNPVLPFNDGVYFASTEKSNIIRGWIFGTTLDSKTQSLLIVNNATNVVIKVCEFQFCNDPFLGVYYHKNNKSWMESEFRVYSSANNCTFEYVSQPFLMDLEGKQGNFKNLREFVFKNIDGYFKIYSKHTPINLVRDLPQGFSALEPLVDLPIGINITRFQTLLALHRSYLTPGDSSSGWTAGAAAYYVGYLQPRTFLLKYNENGTITDAVDCALDPLSETKCTLKSFTVEKGIYQTSNFRVQPTESIVRFPNITNLCPFGEVFNATRFASVYAWNRKRISNCVADYSVLYNSASFSTFKCYGVSPTKLNDLCFTNVYADSFVIRGDEVRQIAPGQTGKIADYNYKLPDDFTGCVIAWNSNNLDSKVGGNYNYLYRLFRKSNLKPFERDISTEIYQAGSTPCNGVEGFNCYFPLQSYGFQPTNGVGYQPYRVVVLSFELLHAPATVCGPKKSTNLVKNKCVNFNFNGLTGTGVLTESNKKFLPFQQFGRDIADTTDAVRDPQTLEILDITPCSFGGVSVITPGTNTSNQVAVLYQGVNCTEVPVAIHADQLTPTWRVYSTGSNVFQTRAGCLIGAEHVNNSYECDIPIGAGICASYQTQTNSPRRARSVASQSIIAYTMSLGAENSVAYSNNSIAIPTNFTISVTTEILPVSMTKTSVDCTMYICGDSTECSNLLLQYGSFCTQLNRALTGIALEQDKNTQEVFAQVKQIYKTPPIKDFGGFNFSQILPDPSKPSKRSFIEDLLFNKVTLADAGFIKQYGDCLGDIAARDLICAQKFNGLTVLPPLLTDEMIAQYTSALLAGTITSGWTFGAGAALQIPFAMQMAYRFNGIGVTQNVLYENQKLIANQFNSAIGKIQDSLSSTASALGKLQDVVNQNAQALNTLVKQLSSNFGAISSVLNDILSRLDPPEAEVQIDRLITGRLQSLQTYVTQQLIRAAEIRASANLAATKMSECVLGQSKRVDFCGKGYHLMSFPQSAPHGVVFLHVTYVPAQEKNFTTAPAICHDGKAHFPREGVFVSNGTHWFVTQRNFYEPQIITTDNTFVSGNCDVVIGIVNNTVYDPLQPELDSGGGGSDIIKLLNEQVNKEMQSSNLYMSMSSWCYTHSLDGAGLFLFDHAAEEYEHAKKLIIFLNENNVPVQLTSISAPEHKFEGLTQIFQKAYEHEQHISESINNIVDHAIKSKDHATFNFLQWYVAEQHEEEVLFKDILDKIELIGNENHGLYLADQYVKGIAKSRKS

SEQ ID NO: 8750 - protein, 1315 aa, Artificial Sequence
  SARS-CoV-2/USA/WA-UW31/2020__EPI_ISL_414618 spike protein (1-1147)(K986P_V987P) Ferritin construct
MFVFLVLLPLVSSQCVNLTTRTQLPPAYTNSFTRGVYYPDKVFRSSVLHSTQDLFLPFFSNVTWFHAIHVSGTNGTKRFDNPVLPFNDGVYFASTEKSNIIRGWIFGTTLDSKTQSLLIVNNATNVVIKVCEFQFCNDPFLGVYYHKNNKSWMESEFRVYSSANNCTFEYVSQPFLMDLEGKQGNFKNLREFVFKNIDGYFKIYSKHTPINLVRDLPQGFSALEPLVDLPIGINITRFQTLLALHRSYLTPGDSSSGWTAGAAAYYVGYLQPRTFLLKYNENGTITDAVDCALDPLSETKCTLKSFTVEKGIYQTSNFRVQPTESIVRFPNITNLCPFGEVFNATRFASVYAWNRKRISNCVADYSVLYNSASFSTFKCYGVSPTKLNDLCFTNVYADSFVIRGDEVRQIAPGQTGKIADYNYKLPDDFTGCVIAWNSNNLDSKVGGNYNYLYRLFRKSNLKPFERDISTEIYQAGSTPCNGAEGFNCYFPLQSYGFQPTNGVGYQPYRVVVLSFELLHAPATVCGPKKSTNLVKNKCVNFNFNGLTGTGVLTESNKKFLPFQQFGRDIADTTDAVRDPQTLEILDITPCSFGGVSVITPGTNTSNQVAVLYQDVNCTEVPVAIHADQLTPTWRVYSTGSNVFQTRAGCLIGAEHVNNSYECDIPIGAGICASYQTQTNSPRRARSVASQSIIAYTMSLGAENSVAYSNNSIAIPTNFTISVTTEILPVSMTKTSVDCTMYICGDSTECSNLLLQYGSFCTQLNRALTGIAVEQDKNTQEVFAQVKQIYKTPPIKDFGGFNFSQILPDPSKPSKRSFIEDLLFNKVTLADAGFIKQYGDCLGDIAARDLICAQKFNGLTVLPPLLTDEMIAQYTSALLAGTITSGWTFGAGAALQIPFAMQMAYRFNGIGVTQNVLYENQKLIANQFNSAIGKIQDSLSSTASALGKLQDVVNQNAQALNTLVKQLSSNFGAISSVLNDILSRLDPPEAEVQIDRLITGRLQSLQTYVTQQLIRAAEIRASANLAATKMSECVLGQSKRVDFCGKGYHLMSFPQSAPHGVVFLHVTYVPAQEKNFTTAPAICHDGKAHFPREGVFVSNGTHWFVTQRNFYEPQIITTDNTFVSGNCDVVIGIVNNTVYDPLQPELDSGGGGSDIIKLLNEQVNKEMQSSNLYMSMSSWCYTHSLDGAGLFLFDHAAEEYEHAKKLIIFLNENNVPVQLTSISAPEHKFEGLTQIFQKAYEHEQHISESINNIVDHAIKSKDHATFNFLQWYVAEQHEEEVLFKDILDKIELIGNENHGLYLADQYVKGIAKSRKS

SEQ ID NO: 8751 - protein, 1315 aa, Artificial Sequence
  SARS-CoV-2/South Korea/SNU01/2020__EPI_ISL_411929 spike protein (1-1147)(K986P_V987P) Ferritin construct
MFVFLVLLPLVSSQCVNLTTRTQLPPAYTNSFTRGVYYPDKVFRSSVLHSTQDLFLPFFSNVTWFHAIHVSGTNGTKRFDNPVLPFNDGVYFASTEKSNIIRGWIFGTTLDSKTQSLLIVNNATNVVIKVCEFQFCNDPFLGVYYHKNNKSWMESEFRVYSSANNCTFEYVSQPFLMDLEGKQGNFKNLREFVFKNIDGYFKIYSKHTPINLVRDLPQGFWALEPLVDLPIGINITRFQTLLALHRSYLTPGDSSSGWTAGAAAYYVGYLQPRTFLLKYNENGTITDAVDCALDPLSETKCTLKSFTVEKGIYQTSNFRVQPTESIVRFPNITNLCPFGEVFNATRFASVYAWNRKRISNCVADYSVLYNSASFSTFKCYGVSPTKLNDLCFTNVYADSFVIRGDEVRQIAPGQTGKIADYNYKLPDDFTGCVIAWNSNNLDSKVGGNYNYLYRLFRKSNLKPFERDISTEIYQAGSTPCNGVEGFNCYFPLQSYGFQPTNGVGYQPYRVVVLSFELLHAPATVCGPKKSTNLVKNKCVNFNFNGLTGTGVLTESNKKFLPFQQFGRDIADTTDAVRDPQTLEILDITPCSFGGVSVITPGTNTSNQVAVLYQDVNCTEVPVAIHADQLTPTWRVYSTGSNVFQTRAGCLIGAEHVNNSYECDIPIGAGICASYQTQTNSPRRARSVASQSIIAYTMSLGAENSVAYSNNSIAIPTNFTISVTTEILPVSMTKTSVDCTMYICGDSTECSNLLLQYGSFCTQLNRALTGIAVEQDKNTQEVFAQVKQIYKTPPIKDFGGFNFSQILPDPSKPSKRSFIEDLLFNKVTLADAGFIKQYGDCLGDIAARDLICAQKFNGLTVLPPLLTDEMIAQYTSALLAGTITSGWTFGAGAALQIPFAMQMAYRFNGIGVTQNVLYENQKLIANQFNSAIGKIQDSLSSTASALGKLQDVVNQNAQALNTLVKQLSSNFGAISSVLNDILSRLDPPEAEVQIDRLITGRLQSLQTYVTQQLIRAAEIRASANLAATKMSECVLGQSKRVDFCGKGYHLMSFPQSAPHGVVFLHVTYVPAQEKNFTTAPAICHDGKAHFPREGVFVSNGTHWFVTQRNFYEPQIITTDNTFVSGNCDVVIGIVNNTVYDPLQPELDSGGGGSDIIKLLNEQVNKEMQSSNLYMSMSSWCYTHSLDGAGLFLFDHAAEEYEHAKKLIIFLNENNVPVQLTSISAPEHKFEGLTQIFQKAYEHEQHISESINNIVDHAIKSKDHATFNFLQWYVAEQHEEEVLFKDILDKIELIGNENHGLYLADQYVKGIAKSRKS

SEQ ID NO: 8752 - protein, 1315 aa, Artificial Sequence
  SARS-CoV-2/China/WF0004/2020__EPI_ISL_413694 spike protein (1-1147)(K986P_V987P) Ferritin construct
MFVFLVLLPLVSSQCVNLTTRTQLPPAYTNSFTRGVYYPDKVFRSSVLHSTQDLFLPFFSNVTWFHAIHVSGTNGTKRFDNPVLPFNDGVYFASTEKSNIIRGWIFGTTLDSKTQSLLIVNNATNVVIKVCEFQFCNDPFLGVYYHKNNKSWTESEFRVYSSANNCTFEYVSQPFLMDLEGKQGNFKNLREFVFKNIDGYFKIYSKHTPINLVRDLPQGFSALEPLVDLPIGINITRFQTLLALHRSYLTPGDSSSGWTAGAAAYYVGYLQPRTFLLKYNENGTITDAVDCALDPLSETKCTLKSFTVEKGIYQTSNFRVQPTESIVRFPNITNLCPFGEVFNATRFASVYAWNRKRISNCVADYSVLYNSASFSTFKCYGVSPTKLNDLCFTNVYADSFVIRGDEVRQIAPGQTGKIADYNYKLPDDFTGCVIAWNSNNLDSKVGGNYNYLYRLFRKSNLKPFERDISTEIYQAGSTPCNGVEGFNCYFPLQSYGFQPTNGVGYQPYRVVVLSFELLHAPATVCGPKKSTNLVKNKCVNFNFNGLTGTGVLTESNKKFLPFQQFGRDIADTTDAVRDPQTLEILDITPCSFGGVSVITPGTNTSNQVAVLYQDVNCTEVPVAIHADQLTPTWRVYSTGSNVFQTRAGCLIGAEHVNNSYECDIPIGAGICASYQTQTNSPRRARSVASQSIIAYTMSLGAENSVAYSNNSIAIPTNFTISVTTEILPVSMTKTSVDCTMYICGDSTECSNLLLQYGSFCTQLNRALTGIAVEQDKNTQEVFAQVKQIYKTPPIKDFGGFNFSQILPDPSKPSKRSFIEDLLFNKVTLADAGFIKQYGDCLGDIAARDLICAQKFNGLTVLPPLLTDEMIAQYTSALLAGTITSGWTFGAGAALQIPFAMQMAYRFNGIGVTQNVLYENQKLIANQFNSAIGKIQDSLSSTASALGKLQDVVNQNAQALNTLVKQLSSNFGAISSVLNDILSRLDPPEAEVQIDRLITGRLQSLQTYVTQQLIRAAEIRASANLAATKMSECVLGQSKRFDFCGKGYHLMSFPQSAPHGVVFLHVTYVPAQEKNFTTAPAICHDGKAHFPREGVFVSNGTHWFVTQRNFYEPQIITTDNTFVSGNCDVVIGIVNNTVYDPLQPELDSGGGGSDIIKLLNEQVNKEMQSSNLYMSMSSWCYTHSLDGAGLFLFDHAAEEYEHAKKLIIFLNENNVPVQLTSISAPEHKFEGLTQIFQKAYEHEQHISESINNIVDHAIKSKDHATFNFLQWYVAEQHEEEVLFKDILDKIELIGNENHGLYLADQYVKGIAKSRKS

SEQ ID NO: 8753 - protein, 1315 aa, Artificial Sequence
  SARS-CoV-2/China/WF0028/2020__EPI_ISL_413791 spike protein (1-1147)(K986P_V987P) Ferritin construct
MFVFLVLLPLVSSQCVNLTTRTQLPPAYTNSFTRGVYYPDKVFRSSVLHSTQDLFLPFFSNVTWFHAIHVSGTNGTKRFDNPVLPFNDGVYFASTEKSNIIRGWIFGTTLDSKTQSLLIVNNATNVVIKVCEFQFCNDPFLGVYYHKNNKSWMESEFRVYSSANNCTFEYVSQPFLMDLEGKQGNFKNLREFVFKNIDGYFKIYSKHTPINLVRDLPQGFSALEPLVDLPIGINITRFQTLLALHRSYLTPGDSSSGWTAGAAAYYVGYLQPRTFLLKYNENGTITDAVDCALDPLSETKCTLKSFTVEKGIYQTSNFRVQPTESIVRFPNITNLCPFGEVFNATRFASVYAWNRKRISNCVADYSVLYNSASFSTFKCYGVSPTKLNDLCFTNVYADSFVIRGDEVRQIAPGQTGKIADYNYKLPDDFTGCVIAWNSNNLDSKVGGNYNYLYRLFRKSNLKPFERDISTEIYQAGSTPCNGVEGFNCYFPLQSYGFQPTNGVGYQPYRVVVLSFELLHAPATVCGPKKSTNLVKNKCVNFNFNGLTGTGVLTESNKKFLPFQQFGRDIADTTDAVRDPQTLEILDITPCSFGGVSVITPGTNTSNQVAVLYQDVNCTEVPVAIHADQLTPTWRVYSTGSNVFQTRAGCLIGAEHVNNSYECDIPIGAGICASYQTQTNSPRRARSVASQSIIAYTMSLGAENSVAYSNNSIAIPTNFTISVTTEILPVSMTKTSVDCTMYICGDSTECSNLLLQYGSFCTQLNRALTGIAVEQDKNTQEVFAQVKQIYKTPPIKDFGGFNFSQILPDPSKPSKRSFIEDLLFNKVTLADAGFIKQYGDCLGDIAARDLICAQKFNGLTVLPPLLTDEMIAQYTSALLAGTITSGWTFGAGAALQIPFAMQMAYRFNGIGVTQNVLYENQKLIANQFNSAIGKIQDSLSSTASALGKLQDVVNQNAQALNTLVKQLSSNFGAISSVLNDILSRLDPPEAEVQIDRLITGRLQSLQTYVTQQLIRAAEIRASANLAATKMSECVLGQSKRVDFCGKGYHLMSFPQSAPHGVVFLHVTYVPAQEKNFTTAPAICHDGKAHFPREGVFVSNGTHWFVTQRNFYEPQIITTDNTFVSGNCDVVIGIVNNTVYDPLQPELESGGGGSDIIKLLNEQVNKEMQSSNLYMSMSSWCYTHSLDGAGLFLFDHAAEEYEHAKKLIIFLNENNVPVQLTSISAPEHKFEGLTQIFQKAYEHEQHISESINNIVDHAIKSKDHATFNFLQWYVAEQHEEEVLFKDILDKIELIGNENHGLYLADQYVKGIAKSRKS

SEQ ID NO: 8754 - protein, 1315 aa, Artificial Sequence
  SARS-CoV-2/2019-nCoV/USA-CruiseA-18/2020__MT159716.1 spike protein (1-1147)(K986P_V987P) Ferritin construct
MFVFLVLLPLVSSQCVNLTTRTQLPPAYTNSFTRGVYYPDKVFRSSVLHSTQDLFLPFFSNVTWFHAIHVSGTNGTKRFDNPVLPFNDGVYFASTEKSNIIRGWIFGTTLDSKTQSLLIVNNATNVVIKVCEFQFCNDPFLGVYYHKNNKSWMESELRVYSSANNCTFEYVSQPFLMDLEGKQGNFKNLREFVFKNIDGYFKIYSKHTPINLVRDLPQGFSALEPLVDLPIGINITRFQTLLALHRSYLTPGDSSSGWTAGAAAYYVGYLQPRTFLLKYNENGTITDAVDCALDPLSETKCTLKSFTVEKGIYQTSNFRVQPTESIVRFPNITNLCPFGEVFNATRFASVYAWNRKRISNCVADYSVLYNSASFSTFKCYGVSPTKLNDLCFTNVYADSFVIRGDEVRQIAPGQTGKIADYNYKLPDDFTGCVIAWNSNNLDSKVGGNYNYLYRLFRKSNLKPFERDISTEIYQAGSTPCNGVEGFNCYFPLQSYGFQPTNGVGYQPYRVVVLSFELLHAPATVCGPKKSTNLVKNKCVNFNFNGLTGTGVLTESNKKFLPFQQFGRDIADTTDAVRDPQTLEILDITPCSFGGVSVITPGTNTSNQVAVLYQDVNCTEVPVAIHADQLTPTWRVYSTGSNVFQTRAGCLIGAEHVNNSYECDIPIGAGICASYQTQTNSPRRARSVASQSIIAYTMSLGAENSVAYSNNSIAIPTNFTISVTTEILPVSMTKTSVDCTMYICGDSTECSNLLLQYGSFCTQLNRALTGIAVEQDKNTQEVFAQVKQIYKTPPIKDFGGFNFSQILPDPSKPSKRSFIEDLLFNKVTLADAGFIKQYGDCLGDIAARDLICAQKFNGLTVLPPLLTDEMIAQYTSALLAGTITSGWTFGAGAALQIPFAMQMAYRFNGIGVTQNVLYENQKLIANQFNSAIGKIQDSLSSTASALGKLQDVVNQNAQALNTLVKQLSSNFGAISSVLNDILSRLDPPEAEVQIDRLITGRLQSLQTYVTQQLIRAAEIRASANLAATKMSECVLGQSKRVDFCGKGYHLMSFPQSAPHGVVFLHVTYVPAQEKNFTTAPAICHDGKAHFPREGVFVSNGTHWFVTQRNFYEPQIITTDNTFVSGNCDVVIGIVNNTVYDPLQPELDSGGGGSDIIKLLNEQVNKEMQSSNLYMSMSSWCYTHSLDGAGLFLFDHAAEEYEHAKKLIIFLNENNVPVQLTSISAPEHKFEGLTQIFQKAYEHEQHISESINNIVDHAIKSKDHATFNFLQWYVAEQHEEEVLFKDILDKIELIGNENHGLYLADQYVKGIAKSRKS

SEQ ID NO: 8755 - protein, 1315 aa, Artificial Sequence
  SARS-CoV-2/SARS-CoV-2/Yunnan-01/human/2020/CHN__MT049951.1 spike protein (1-1147)(K986P_V987P) Ferritin construct
MFVFLVLLPLVSSQCVNLTTRTQLPPANTNSFTRGVYYPDKVFRSSVLHSTQDLFLPFFSNVTWFHAIHVSGTNGTKRFDNPVLPFNDGVYFASTEKSNIIRGWIFGTTLDSKTQSLLIVNNATNVVIKVCEFQFCNDPFLGVYYHKNNKSWMESEFRVYSSANNCTFEYVSQPFLMDLEGKQGNFKNLREFVFKNIDGYFKIYSKHTPINLVRDLPQGFSALEPLVDLPIGINITRFQTLLALHRSYLTPGDSSSGWTAGAAAYYVGYLQPRTFLLKYNENGTITDAVDCALDPLSETKCTLKSFTVEKGIYQTSNFRVQPTESIVRFPNITNLCPFGEVFNATRFASVYAWNRKRISNCVADYSVLYNSASFSTFKCYGVSPTKLNDLCFTNVYADSFVIRGDEVRQIAPGQTGKIADYNYKLPDDFTGCVIAWNSNNLDSKVGGNYNYLYRLFRKSNLKPFERDISTEIYQAGSTPCNGVEGFNCYFPLQSYGFQPTNGVGYQPYRVVVLSFELLHAPATVCGPKKSTNLVKNKCVNFNFNGLTGTGVLTESNKKFLPFQQFGRDIADTTDAVRDPQTLEILDITPCSFGGVSVITPGTNTSNQVAVLYQDVNCTEVPVAIHADQLTPTWRVYSTGSNVFQTRAGCLIGAEHVNNSYECDIPIGAGICASYQTQTNSPRRARSVASQSIIAYTMSLGAENSVAYSNNSIAIPTNFTISVTTEILPVSMTKTSVDCTMYICGDSTECSNLLLQYGSFCTQLNRALTGIAVEQDKNTQEVFAQVKQIYKTPPIKDFGGFNFSQILPDPSKPSKRSFIEDLLFNKVTLADAGFIKQYGDCLGDIAARDLICAQKFNGLTVLPPLLTDEMIAQYTSALLAGTITSGWTFGAGAALQIPFAMQMAYRFNGIGVTQNVLYENQKLIANQFNSAIGKIQDSLSSTASALGKLQDVVNQNAQALNTLVKQLSSNFGAISSVLNDILSRLDPPEAEVQIDRLITGRLQSLQTYVTQQLIRAAEIRASANLAATKMSECVLGQSKRVDFCGKGYHLMSFPQSAPHGVVFLHVTYVPAQEKNFTTAPAICHDGKAHFPREGVFVSNGTHWFVTQRNFYEPQIITTDNTFVSGNCDVVIGIVNNTVYDPLQPELDSGGGGSDIIKLLNEQVNKEMQSSNLYMSMSSWCYTHSLDGAGLFLFDHAAEEYEHAKKLIIFLNENNVPVQLTSISAPEHKFEGLTQIFQKAYEHEQHISESINNIVDHAIKSKDHATFNFLQWYVAEQHEEEVLFKDILDKIELIGNENHGLYLADQYVKGIAKSRKS

SEQ ID NO: 8756 - protein, 1315 aa, Artificial Sequence
  SARS-CoV-2/USA/WA-UW292/2020__EPI_ISL_418077 spike protein (1-1147)(K986P_V987P) Ferritin construct
MFVFLVLLPLVSSQCVNLTTRTQLPPAYTNSFTRGVYYPDKVFRSSVLHSTQDLFLPFFSNVTWFHAIHVSGTNGTKRFDNPVLPFNDGVYFASTEKSNIIRGWIFGTTLDSKTQSLLIVNNATNVVIKVCEFQFCNDPFLGVYYHKNNKSWMESEFRVYSSANNCTFEYVSQPFLMDLEGKQGNFKNLREFVFKNIDGYFKIYSKHTPINLVRDLPQGFSALEPLVDLPIGINITRFQTLLALHRSYLTPGDSSSGWTAGAAAYYVGYLQPRTFLLKYNENGTITDAVDCALDPLSETKCTLKSFTVEKGIYQTSNFRVQPTESIVRFPNITNLCPFGEVFNATRFASVYAWNRKRISNCVADYSVLYNSASFSTFKCYGVSPTKLNDLCFTNVYADSFVIRGDEVRQIAPGQTGKIADYNYKLPDDFTGCVIAWNSNNLDSKVGGNYNYLYRLFRKSNLKPFERDISTEIYQASSTPCNGVEGFNCYFPLQSYGFQPTNGVGYQPYRVVVLSFELLHAPATVCGPKKSTNLVKNKCVNFNFNGLTGTGVLTESNKKFLPFQQFGRDIADTTDAVRDPQTLEILDITPCSFGGVSVITPGTNTSNQVAVLYQDVNCTEVPVAIHADQLTPTWRVYSTGSNVFQTRAGCLIGAEHVNNSYECDIPIGAGICASYQTQTNSPRRARSVASQSIIAYTMSLGAENSVAYSNNSIAIPTNFTISVTTEILPVSMTKTSVDCTMYICGDSTECSNLLLQYGSFCTQLNRALTGIAVEQDKNTQEVFAQVKQIYKTPPIKDFGGFNFSQILPDPSKPSKRSFIEDLLFNKVTLADAGFIKQYGDCLGDIAARDLICAQKFNGLTVLPPLLTDEMIAQYTSALLAGTITSGWTFGAGAALQIPFAMQMAYRFNGIGVTQNVLYENQKLIANQFNSAIGKIQDSLSSTASALGKLQDVVNQNAQALNTLVKQLSSNFGAISSVLNDILSRLDPPEAEVQIDRLITGRLQSLQTYVTQQLIRAAEIRASANLAATKMSECVLGQSKRVDFCGKGYHLMSFPQSAPHGVVFLHVTYVPAQEKNFTTAPAICHDGKAHFPREGVFVSNGTHWFVTQRNFYEPQIITTDNTFVSGNCDVVIGIVNNTVYDPLQPELDSGGGGSDIIKLLNEQVNKEMQSSNLYMSMSSWCYTHSLDGAGLFLFDHAAEEYEHAKKLIIFLNENNVPVQLTSISAPEHKFEGLTQIFQKAYEHEQHISESINNIVDHAIKSKDHATFNFLQWYVAEQHEEEVLFKDILDKIELIGNENHGLYLADQYVKGIAKSRKS

SEQ ID NO: 8757 - protein, 1315 aa, Artificial Sequence
  SARS-CoV-2/Iceland/192/2020__EPI_ISL_417819 spike protein (1-1147)(K986P_V987P) Ferritin construct
MFVFFVLLPLVSSQCVNLTTRTQLPPAYTNSFTRGVYYPDKVFRSSVLHSTQDLFLPFFSNVTWFHAIHVSGTNGTKRFDNPVLPFNDGVYFASTEKSNIIRGWIFGTTLDSKTQSLLIVNNATNVVIKVCEFQFCNDPFLGVYYHKNNKSWMESEFRVYSSANNCTFEYVSQPFLMDLEGKQGNFKNLREFVFKNIDGYFKIYSKHTPINLVRDLPQGFSALEPLVDLPIGINITRFQTLLALHRSYLTPGDSSSGWTAGAAAYYVGYLQPRTFLLKYNENGTITDAVDCALDPLSETKCTLKSFTVEKGIYQTSNFRVQPTESIVRFPNITNLCPFGEVFNATRFASVYAWNRKRISNCVADYSVLYNSASFSTFKCYGVSPTKLNDLCFTNVYADSFVIRGDEVRQIAPGQTGKIADYNYKLPDDFTGCVIAWNSNNLDSKVGGNYNYLYRLFRKSNLKPFERDISTEIYQAGSTPCNGVEGFNCYFPLQSYGFQPTNGVGYQPYRVVVLSFELLHAPATVCGPKKSTNLVKNKCVNFNFNGLTGTGVLTESNKKFLPFQQFGRDIADTTDAVRDPQTLEILDITPCSFGGVSVITPGTNTSNQVAVLYQGVNCTEVPVAIHADQLTPTWRVYSTGSNVFQTRAGCLIGAEHVNNSYECDIPIGAGICASYQTQTNSPRRARSVASQSIIAYTMSLGAENSVAYSNNSIAIPTNFTISVTTEILPVSMTKTSVDCTMYICGDSTECSNLLLQYGSFCTQLNRALTGIAVEQDKNTQEVFAQVKQIYKTPPIKDFGGFNFSQILPDPSKPSKRSFIEDLLFNKVTLADAGFIKQYGDCLGDIAARDLICAQKFNGLTVLPPLLTDEMIAQYTSALLAGTITSGWTFGAGAALQIPFAMQMAYRFNGIGVTQNVLYENQKLIANQFNSAIGKIQDSLSSTASALGKLQDVVNQNAQALNTLVKQLSSNFGAISSVLNDILSRLDPPEAEVQIDRLITGRLQSLQTYVTQQLIRAAEIRASANLAATKMSECVLGQSKRVDFCGKGYHLMSFPQSAPHGVVFLHVTYVPAQEKNFTTAPAICHDGKAHFPREGVFVSNGTHWFVTQRNFYEPQIITTDNTFVSGNCDVVIGIVNNTVYDPLQPELDSGGGGSDIIKLLNEQVNKEMQSSNLYMSMSSWCYTHSLDGAGLFLFDHAAEEYEHAKKLIIFLNENNVPVQLTSISAPEHKFEGLTQIFQKAYEHEQHISESINNIVDHAIKSKDHATFNFLQWYVAEQHEEEVLFKDILDKIELIGNENHGLYLADQYVKGIAKSRKS

SEQ ID NO: 8758 - protein, 1315 aa, Artificial Sequence
  SARS-CoV-2/Belgium/ULG-6939/2020__EPI_ISL_417020 spike protein (1-1147)(K986P_V987P) Ferritin construct
MFVFLVLLPLVSSQCVNLTTRTQLPPAYTNSFTRGVYYPDKVFRSSVLHSTQDLFLPFFSNVTWFHAIHVSGTNGTKRFDNPVLPFNDGVYFASTEKSNIIRGWIFGTTLDSKTQSLLIVNNATNVVIKVCEFQFCNDPFLGVYYHKNNKSWMESEFRVYSSANNCTFEYVSQPFLMDLEGKQGNFKNLREFVFKNIDGYFKIYSKHTPINLVRDLPQGFSALEPLVDLPIGINITRFQTLLALHRSYLTPGDSSSGWTAGAAAYYVGYLQPRTFLLKYNENGTITDAVDCALDPLSETKCTLKSFTVEKGIYQTSNFRVQPTESIVRFPNITNLCPFGEVFNATRFASVYAWNRKRISNCVADYSVLYNSASFSTFKCYGVSPTKLNDLCFTNVYADSFVIRGDEVRQIAPGQTGKIADYNYKLPDDFTGCVIAWNSNNLDSKVGGNYNYLYRLFRKSNLKPFERDISTEIYQAGSTPCNGVEGFNCYFPLQSYGFQPTNGVGYQPYRVVVLSFELLHAPATVCGPKKSTNLVKNKCVNFNFNGLTGTGVLTESNKKFLPFQQFGRDIADTTDAVRDPQTLEILDITPCSFGGVSVITPGTNTSNQVAVLYQGVNCTEVPVAIHADQLTPTWRVYSTGSNVFQTRAGCLIGAEHVNNSYECDIPIGAGICASYQTQTNSPRRARSVASQSIIAYTMSLGAENSVVYSNNSIAIPTNFTISVTTEILPVSMTKTSVDCTMYICGDSTECSNLLLQYGSFCTQLNRALTGIAVEQDKNTQEVFAQVKQIYKTPPIKDFGGFNFSQILPDPSKPSKRSFIEDLLFNKVTLADAGFIKQYGDCLGDIAARDLICAQKFNGLTVLPPLLTDEMIAQYTSALLAGTITSGWTFGAGAALQIPFAMQMAYRFNGIGVTQNVLYENQKLIANQFNSAIGKIQDSLSSTASALGKLQDVVNQNAQALNTLVKQLSSNFGAISSVLNDILSRLDPPEAEVQIDRLITGRLQSLQTYVTQQLIRAAEIRASANLAATKMSECVLGQSKRVDFCGKGYHLMSFPQSAPHGVVFLHVTYVPAQEKNFTTAPAICHDGKAHFPREGVFVSNGTHWFVTQRNFYEPQIITTDNTFVSGNCDVVIGIVNNTVYDPLQPELDSGGGGSDIIKLLNEQVNKEMQSSNLYMSMSSWCYTHSLDGAGLFLFDHAAEEYEHAKKLIIFLNENNVPVQLTSISAPEHKFEGLTQIFQKAYEHEQHISESINNIVDHAIKSKDHATFNFLQWYVAEQHEEEVLFKDILDKIELIGNENHGLYLADQYVKGIAKSRKS

SEQ ID NO: 8759 - protein, 1315 aa, Artificial Sequence
  SARS-CoV-2/France/HF2496/2020__EPI_ISL_418231 spike protein (1-1147)(K986P_V987P) Ferritin construct
MFVFLVLLPLVSSQCVNLTTRTQLPPAYTNSFTRGVYYPDKVFRSSVLHSTQDLFLPFFSNVTWFHAIHVSGTNGTKRFDNPVLPFNDGVYFASTEKSNIIRGWIFGTTLDSKTQSLLIVNNATNVVIKVCEFQFCNDPFLGVYYHKNNKSWMESEFRVYSSANNCTFEYVSQPFLMDLEGKQGNFKNLREFVFKNIDGYFKIYSKHTPINLVRDLPQGFSALEPLVDLPIGINITRFQTLLALHRSYLTPGDSSSGWTAGAAAYYVGYLQPRTFLLKYNENGTITDAVDCALDPLSETKCTLKSFTVEKGIYQTSNFRVQPTESIVRFPNITNLCPFGEVFNATRFASVYAWNRKRISNCVADYSVLYNSASFSTFKCYGVSPTKLNDLCFTNVYADSFVIRGDEVRQIAPGQTGKIADYNYKLPDDFTGCVIAWNSNNLDSKVGGNYNYLYRLFRKSNLKPFERDISTEIYQAGSTPCNGVEGFNCYFPLQSYGFQPTNGVGYQPYRVVVLSFELLHAPATVCGPKKSTNLVKNKCVNFNFNGLTGTGVLTESNKKFLPFQQFGRDIADTTDAVRDPQTLEILDITPCSFGGVSVITPGTNTSNQVAVLYQGVNCTEVPVAIHADQLTPTWRVYSTGSNVFQTRAGCLIGAEHVNNSYECDIPIGAGICASYQTQTNSPRRARSVASQSIIAYTMSLGAENSVAYSNNSIAIPTNFTISVTTEILPVSMTKTSVDCTMYICGDSTECSNLLLQYGSFCTQLNRALTGIAVEQDKNTQEVFAQVKQIYKTPPIKDFGGFNFSQILPDPSKPSKRSFIEDLLFNKVTLADAGFIKQYGDCLGDIVARDLICAQKFNGLTVLPPLLTDEMIAQYTSALLAGTITSGWTFGAGAALQIPFAMQMAYRFNGIGVTQNVLYENQKLIANQFNSAIGKIQDSLSSTASALGKLQDVVNQNAQALNTLVKQLSSNFGAISSVLNDILSRLDPPEAEVQIDRLITGRLQSLQTYVTQQLIRAAEIRASANLAATKMSECVLGQSKRVDFCGKGYHLMSFPQSAPHGVVFLHVTYVPAQEKNFTTAPAICHDGKAHFPREGVFVSNGTHWFVTQRNFYEPQIITTDNTFVSGNCDVVIGIVNNTVYDPLQPELDSGGGGSDIIKLLNEQVNKEMQSSNLYMSMSSWCYTHSLDGAGLFLFDHAAEEYEHAKKLIIFLNENNVPVQLTSISAPEHKFEGLTQIFQKAYEHEQHISESINNIVDHAIKSKDHATFNFLQWYVAEQHEEEVLFKDILDKIELIGNENHGLYLADQYVKGIAKSRKS

SEQ ID NO: 8760 - protein, 1315 aa, Artificial Sequence
  SARS-CoV-2/USA/WA-UW291/2020__EPI_ISL_418076 spike protein (1-1147)(K986P_V987P) Ferritin construct
MFVFLVLLPLVSSQCVNLTTRTQLPPAYTNSFTRGVYYPDKVFRSSVLHSTQDLFLPFFSNVTWFHAIHVSGTNGTKRFDNPVLPFNDGVYFASTEKSNIIRGWIFGTTLDSKTQSLLIVNNATNVVIKVCEFQFCNDPFLGVYYHKNNKSWMESEFRVYSSANNCTFEYVSQPFLMDLEGKQGNFKNLREFVFKNIDGYFKIYSKHTPINLVRDLPQGFSALEPLVDLPIGINITRFQTLLALHRSYLTPGDSSSGWTAGAAAYYVGYLQPRTFLLKYNENGTITDAVDCALDPLSETKCTLKSFTVEKGIYQTSNFRVQPTESIVRFPNITNLCPFGEVFNATRFASVYAWNRKRISNCVADYSVLYNSASFSTFKCYGVSPTKLNDLCFTNVYADSFVIRGDEVRQIAPGQTGKIADYNYKLPDDFTGCVIAWNSNNLDSKVGGNYNYLYRLFRKSNLKPFERDISTEIYQAGSTPCNGVEGFNCYFPLQSYGFQPTNGVGYQPYRVVVLSFELLHAPATVCGPKKSTNLVKNKCVNFNFNGLTGTGVLTESNKKFLPFQQFGRDIADTTDAVRDPQTLEILDITPCSFGGVSVITPGTNTSNQVAVLYQGVNCTEVPVAIHADQLTPTWRVYSTGSNVFQTRAGCLIGAEHVNNSYECDIPIGAGICASYQTQTNSPRRARSVASQSIIAYTMSLGAENSVAYSNNSIAIPTNFTISVTTEILPVSMTKTSVDCTMYICGDSTECSNLLLQYGSFCTQLNRALTGIAVEQDKNTQEVFAQVKQIYKTPPIKDFGGFNFSQILPDPSKPSKRSFIEDLLFNKVTLADAGFIKQYGDCLGDIAARDLICAQKFNGLTVLPPLLTDEMIAQYTSALLAGTITSGWTFGAGAALQIPFAMQMAYRFNGIGVTQNVLYENQKLIANQFNSAIGKIQYSLSSTASALGKLQDVVNQNAQALNTLVKQLSSNFGAISSVLNDILSRLDPPEAEVQIDRLITGRLQSLQTYVTQQLIRAAEIRASANLAATKMSECVLGQSKRVDFCGKGYHLMSFPQSAPHGVVFLHVTYVPAQEKNFTTAPAICHDGKAHFPREGVFVSNGTHWFVTQRNFYEPQIITTDNTFVSGNCDVVIGIVNNTVYDPLQPELDSGGGGSDIIKLLNEQVNKEMQSSNLYMSMSSWCYTHSLDGAGLFLFDHAAEEYEHAKKLIIFLNENNVPVQLTSISAPEHKFEGLTQIFQKAYEHEQHISESINNIVDHAIKSKDHATFNFLQWYVAEQHEEEVLFKDILDKIELIGNENHGLYLADQYVKGIAKSRKS

SEQ ID NO: 8761 - protein, 1315 aa, Artificial Sequence; identical to SEQ ID NO: 8724
  SARS-CoV-2/Portugal/PT0034/2020__EPI_ISL_418019 spike protein (1-1147)(K986P_V987P) Ferritin construct

SEQ ID NO: 8762 - protein, 1315 aa, Artificial Sequence; identical to SEQ ID NO: 8716
  SARS-CoV-2/Iceland/202/2020__EPI_ISL_417750 spike protein (1-1147)(K986P_V987P) Ferritin construct

SEQ ID NO: 8763 - protein, 1315 aa, Artificial Sequence
  SARS-CoV-2/USA/WA-UW261/2020__EPI_ISL_418046 spike protein (1-1147)(K986P_V987P) Ferritin construct
MFVFLVLLPLVSSQCVNLTTRTQLPPAYTNSFTRGVYYPDKVFRSSVLHSTQDLFLPFFSNVTWFHAIHVSGTNGTKRFDNPVLPFNDGVYFASTEKSNIIRGWIFGTTLDSKTQSLLIVNNATNVVIKVCEFQFCNDPFLGVYYHKNNKSWMESEFRVYSSANNCTFEYVSQPFLMDLEGKQGNFKNLREFVFKNIDGYFKIYSKHTPINLVRDLPQGFSALEPLVDLPIGINITRFQTLLALHRSYLTPGDSSSGWTAGAAAYYVGYLQPRTFLLKYNENGTITDAVDCALDPLSETKCTLKSFTVEKGIYQTSNFRVQPTESIVRFPNITNLCPFGEVFNATRFTSVYAWNRKRISNCVADYSVLYNSASFSTFKCYGVSPTKLNDLCFTNVYADSFVIRGDEVRQIAPGQTGKIADYNYKLPDDFTGCVIAWNSNNLDSKVGGNYNYLYRLFRKSNLKPFERDISTEIYQAGSTPCNGVEGFNCYFPLQSYGFQPTNGVGYQPYRVVVLSFELLHAPATVCGPKKSTNLVKNKCVNFNFNGLTGTGVLTESNKKFLPFQQFGRDIADTTDAVRDPQTLEILDITPCSFGGVSVITPGTNTSNQVAVLYQDVNCTEVPVAIHADQLTPTWRVYSTGSNVFQTRAGCLIGAEHVNNSYECDIPIGAGICASYQTQTNSPRRARSVASQSIIAYTMSLGAENSVAYSNNSIAIPTNFTISVTTEILPVSMTKTSVDCTMYICGDSTECSNLLLQYGSFCTQLNRALTGIAVEQDKNTQEVFAQVKQIYKTPPIKDFGGFNFSQILPDPSKPSKRSFIEDLLFNKVTLADAGFIKQYGDCLGDIAARDLICAQKFNGLTVLPPLLTDEMIAQYTSALLAGTITSGWTFGAGAALQIPFAMQMAYRFNGIGVTQNVLYENQKLIANQFNSAIGKIQDSLSSTASALGKLQDVVNQNAQALNTLVKQLSSNFGAISSVLNDILSRLDPPEAEVQIDRLITGRLQSLQTYVTQQLIRAAEIRASANLAATKMSECVLGQSKRVDFCGKGYHLMSFPQSAPHGVVFLHVTYVPAQEKNFTTAPAICHDGKAHFPREGVFVSNGTHWFVTQRNFYEPQIITTDNTFVSGNCDVVIGIVNNTVYDPLQPELDSGGGGSDIIKLLNEQVNKEMQSSNLYMSMSSWCYTHSLDGAGLFLFDHAAEEYEHAKKLIIFLNENNVPVQLTSISAPEHKFEGLTQIFQKAYEHEQHISESINNIVDHAIKSKDHATFNFLQWYVAEQHEEEVLFKDILDKIELIGNENHGLYLADQYVKGIAKSRKS

SEQ ID NO: 8764 - protein, 1315 aa, Artificial Sequence
  SARS-CoV-2/Portugal/PT0035/2020__EPI_ISL_418020 spike protein (1-1147)(K986P_V987P) Ferritin construct
MFVFLVLLPLVSSQCVNLTTRTQLPPAYTNSFTRGVYYPDKVFRSSVLHSTQDLFLPFFSNVTWFHAIHVSGTNGTKRFDNPVLPFNDGVYFASTEKSNIIRGWIFGTTLDSKTQSLLIVNNATNVVIKVCEFQFCNDPFLGVYYHKNNKSWMESEFRVYSSANNCTFEYVSQPFLMDLEGKQGNFKNLREFVFKNIDGYFKIYSKHTPINLVRDLPQGFSALEPLVDLPIGINITRFQTLLALHRSYLTPGDSSSGWTAGAAAYYVGYLQPRTFLLKYNENGTITDAVDCALDPLSETKCTLKSFTVEKGIYQTSNFRVQPTESIVRFPNITNLCPFGEVFNATRFASVYAWNRKRISNCVADYSVLYNSASFSTFKCYGVSPTKLNDLCFTNVYADSFVIRGDEVRQIAPGQTGKIADYNYKLPDDFTGCVIAWNSNNLDSKVGGNYNYLYRLFRKSNLKPFERDISTEIYQAGSTPCNGVEGFNCYFPLQSYGFQPTNGVGYQPYRVVVLSFELLHAPATVCGPKKSTNLVKNKCVNFNFNGLTGTGVLTESNKKFLPFQQFGRDIADTTDAVRDPQTLEILDITPCSFGGVSVITPGTNTSNQVAVLYQDVNCTEVPVAIHADQLTPTWRVYSTGSNVFQTRAGCLIGAEHVNNSYECDIPIGAGICASYQTQTNSPRRARSVASQSIIAYTMSLGAENSVAYSNNSIAIPTNFTISVTTEILPVSMTKTSVDCTMYICGDSTECSNLLLQYGSFCTQLNRALTGIAVEQDKNTQEVFAQVKQIYKTPPIKDFGGFNFSQILPDPSKPSKRSFIEDLLFNKVTLADAGFIKQYGDCLGDISARDLICAQKFNGLTVLPPLLTDEMIAQYTSALLAGTITSGWTFGAGAALQIPFAMQMAYRFNGIGVTQNVLYENQKLIANQFNSAIGKIQDSLSSTASALGKLQDVVNQNAQALNTLVKQLSSNFGAISSVLNDILSRLDPPEAEVQIDRLITGRLQSLQTYVTQQLIRAAEIRASANLAATKMSECVLGQSKRVDFCGKGYHLMSFPQSAPHGVVFLHVTYVPAQEKNFTTAPAICHDGKAHFPREGVFVSNGTHWFVTQRNFYEPQIITTDNTFVSGNCDVVIGIVNNTVYDPLQPELDSGGGGSDIIKLLNEQVNKEMQSSNLYMSMSSWCYTHSLDGAGLFLFDHAAEEYEHAKKLIIFLNENNVPVQLTSISAPEHKFEGLTQIFQKAYEHEQHISESINNIVDHAIKSKDHATFNFLQWYVAEQHEEEVLFKDILDKIELIGNENHGLYLADQYVKGIAKSRKS

SEQ ID NO: 8765 - protein, 1315 aa, Artificial Sequence
  SARS-CoV-2/USA/NY-NYUMC7/2020__EPI_ISL_418192 spike protein (1-1147)(K986P_V987P) Ferritin construct
MFVFLVLLPLVSSQCVNLTTRTQLPPAYTNSFTRGVYYPDKVFRSSVLHSTQDLFLPFFSNVTWFHAIHVSGTNGTKRFDNPVLPFNDGVYFASTEKSNIIRGWIFGTTLDSKTQSLLIVNNATNVVIKVCEFQFCNDPFLGVYHHKNNKSWMESEFRVYSSANNCTFEYVSQPFLMDLEGKQGNFKNLREFVFKNIDGYFKIYSKHTPINLVRDLPQGFSALEPLVDLPIGINITRFQTLLALHRSYLTPGDSSSGWTAGAAAYYVGYLQPRTFLLKYNENGTITDAVDCALDPLSETKCTLKSFTVEKGIYQTSNFRVQPTESIVRFPNITNLCPFGEVFNATRFASVYAWNRKRISNCVADYSVLYNSASFSTFKCYGVSPTKLNDLCFTNVYADSFVIRGDEVRQIAPGQTGKIADYNYKLPDDFTGCVIAWNSNNLDSKVGGNYNYLYRLFRKSNLKPFERDISTEIYQAGSTPCNGVEGFNCYFPLQSYGFQPTNGVGYQPYRVVVLSFELLHAPATVCGPKKSTNLVKNKCVNFNFNGLTGTGVLTESNKKFLPFQQFGRDIADTTDAVRDPQTLEILDITPCSFGGVSVITPGTNTSNQVAVLYQGVNCTEVPVAIHADQLTPTWRVYSTGSNVFQTRAGCLIGAEHVNNSYECDIPIGAGICASYQTQTNSPRRARSVASQSIIAYTMSLGAENSVAYSNNSIAIPTNFTISVTTEILPVSMTKTSVDCTMYICGDSTECSNLLLQYGSFCTQLNRALTGIAVEQDKNTQEVFAQVKQIYKTPPIKDFGGFNFSQILPDPSKPSKRSFIEDLLFNKVTLADAGFIKQYGDCLGDIAARDLICAQKFNGLTVLPPLLTDEMIAQYTSALLAGTITSGWTFGAGAALQIPFAMQMAYRFNGIGVTQNVLYENQKLIANQFNSAIGKIQDSLSSTASALGKLQDVVNQNAQALNTLVKQLSSNFGAISSVLNDILSRLDPPEAEVQIDRLITGRLQSLQTYVTQQLIRAAEIRASANLAATKMSECVLGQSKRVDFCGKGYHLMSFPQSAPHGVVFLHVTYVPAQEKNFTTAPAICHDGKAHFPREGVFVSNGTHWFVTQRNFYEPQIITTDNTFVSGNCDVVIGIVNNTVYDPLQPELDSGGGGSDIIKLLNEQVNKEMQSSNLYMSMSSWCYTHSLDGAGLFLFDHAAEEYEHAKKLIIFLNENNVPVQLTSISAPEHKFEGLTQIFQKAYEHEQHISESINNIVDHAIKSKDHATFNFLQWYVAEQHEEEVLFKDILDKIELIGNENHGLYLADQYVKGIAKSRKS

SEQ ID NO: 8766 - protein, 1315 aa, Artificial Sequence
  SARS-CoV-2/Iceland/189/2020__EPI_ISL_417709 spike protein (1-1147)(K986P_V987P) Ferritin construct
MFVFLVLLPLVSSQCVNLTTRTQLPPAYTNSFTRGVYYPDKVFRSSVLHSTQDLFLPFFSNVTWFHAIHVSGTNGTKRFDNPVLPFNDGVYFASTEKSNIIRGWIFGTTLDSKTQSLLIVNNATNVVIKVCEFQFCNDPFLGVYYHKNNKSWMESEFRVYSSANNCTFEYVSQPFLMDLEGKQGNFKNLREFVFKNIDGYFKIYSKHTPINLVRDLPQGFSALEPLVDLPIGINITRFQTLLALHRSYLTPGDSSSGWTAGAAAYYVGYLQPRTFLLKYNENGTITDAVDCALDPLSETKCTLKSFTVEKGIYQTSNFRVQPTESIVRFPNITNLCPFGEVFNATRFASVYAWNRKRISNCVADYSVLYNSASFSTFKCYGVSPTKLNDLCFTNVYADSFVIRGDEVRQIAPGQTGKIADYNYKLPDDFTGCVIAWNSNNLDSKVGGNYNYLYRLFRKSNLKPFERDISTEIYQAGSTPCNGVEGFNCYFPLQSYGFQPTNGVGYQPYRVVVLSFELLHAPATVCGPKKSTNLVKNKCVNFNFNGLTGTGVLTESNKKFLPFQQFGRDIADTTDAVRDPQTLEILDITPCSFGGVSVITPGTNTSNQVAVLYQGVNCTEVPVAIHADQLTPTWRVYSTGSNVFQTRAGCLIGAEHVNNSYECDIPIGAGICASYQTQTNSPRRARSVASQSIIAYTMSLGAENSVAYSNNSIAIPTNFTISVTTEILPVSMTKTSVDCTMYICGDSTECSNLLLQYGSFCTQLNRALTGIAVEQDKNTQEVFAQVKQIYKTPPIKDFGGFNFSQILPDPSKPSKRSFIEDLLFNKVTLADAGFTKQYGDCLGDIAARDLICAQKFNGLTVLPPLLTDEMIAQYTSALLAGTITSGWTFGAGAALQIPFAMQMAYRFNGIGVTQNVLYENQKLIANQFNSAIGKIQDSLSSTASALGKLQDVVNQNAQALNTLVKQLSSNFGAISSVLNDILSRLDPPEAEVQIDRLITGRLQSLQTYVTQQLIRAAEIRASANLAATKMSECVLGQSKRVDFCGKGYHLMSFPQSAPHGVVFLHVTYVPAQEKNFTTAPAICHDGKAHFPREGVFVSNGTHWFVTQRNFYEPQIITTDNTFVSGNCDVVIGIVNNTVYDPLQPELDSGGGGSDIIKLLNEQVNKEMQSSNLYMSMSSWCYTHSLDGAGLFLFDHAAEEYEHAKKLIIFLNENNVPVQLTSISAPEHKFEGLTQIFQKAYEHEQHISESINNIVDHAIKSKDHATFNFLQWYVAEQHEEEVLFKDILDKIELIGNENHGLYLADQYVKGIAKSRKS

SEQ ID NO: 8767 - protein, 1315 aa, Artificial Sequence
  SARS-CoV-2/Australia/NSW56/2020__EPI_ISL_417408 spike protein (1-1147)(K986P_V987P) Ferritin construct
MFVFLVLLPLVSSQCVNLTTRTQLPPAYTNSFTRGVYYPDKVFRSSVLHSTQDLFLPFFSNVTWFHAIHVSGTNGTKRFDNPVLPFNDGVYFASTEKSNIIRGWIFGTTLDSKTQSLLIVNNATNVVIKVCEFQFCNDPFLGVYYHKNNKSWMESEFRVYSSANNCTFEYVSQPFLMDLEGKQGNFKNLREFVFKNIDGYFKIYSKHTPINLVRDLPQGFSALEPLVDLPIGINITRFQTLLALHRSYLTPGDSSSGWTAGAAAYYVGYLQPRTFLLKYNENGTITDAVDCALDPLSETKCTLKSFTVEKGIYQTSNFRVQPTESIVRFPNITNLCPFGEVFNATRFASVYAWNRKRISNCVADYSVLYNSASFSTFKCYGVSPTKLNDLCFTNVYADSFVIRGDEVRQIAPGQTGKIADYNYKLPDDFTGCVIAWNSNNLDSKVGGNYNYLYRLFRKSNLKPFERDISTEIYQAGSTPCNGVEGFNCYFPLQSYGFQPTNGVGYQPYRVVVLSFELLHAPATVCGPKKSTNLVKNKCVNFNFNGLTGTGVLTESNKKFLPFQQFGRDIADTTDAVRDPQTLEILDITPCSFGGVSVITPGTNTSNQVAVLYQDVNCTEVPVAIHADQLTPTWRVYSTGSNVFQTRAGCLIGAEHVNNSYECDIPIGAGICASYQTQTNSPRRARSVASQSIIAYTMSLGAENSVAYSNNSIAIPTNFTISVTTEILPVSMTKTSVDCTMYICGDSTECSNLLLQYGSFCTQLNRALTGIAVEQDKNTQEVFAQVKQIYKTPPIKDFGGFNFSQILPDSSKPSKRSFIEDLLFNKVTLADAGFIKQYGDCLGDIAARDLICAQKFNGLTVLPPLLTDEMIAQYTSALLAGTITSGWTFGAGAALQIPFAMQMAYRFNGIGVTQNVLYENQKLIANQFNSAIGKIQDSLSSTASALGKLQDVVNQNAQALNTLVKQLSSNFGAISSVLNDILSRLDPPEAEVQIDRLITGRLQSLQTYVTQQLIRAAEIRASANLAATKMSECVLGQSKRVDFCGKGYHLMSFPQSAPHGVVFLHVTYVPAQEKNFTTAPAICHDGKAHFPREGVFVSNGTHWFVTQRNFYEPQIITTDNTFVSGNCDVVIGIVNNTVYDPLQPELDSGGGGSDIIKLLNEQVNKEMQSSNLYMSMSSWCYTHSLDGAGLFLFDHAAEEYEHAKKLIIFLNENNVPVQLTSISAPEHKFEGLTQIFQKAYEHEQHISESINNIVDHAIKSKDHATFNFLQWYVAEQHEEEVLFKDILDKIELIGNENHGLYLADQYVKGIAKSRKS

SEQ ID NO: 8768 - protein, 1315 aa, Artificial Sequence
  SARS-CoV-2/Iceland/280/2020__EPI_ISL_417608 spike protein (1-1147)(K986P_V987P) Ferritin construct
MFVFLVLLPLVSSQCVNLTTRTQLPPAYTNSFTRGVYYPDKVFRSSVLHSTQDLFLPFFSNVTWFHAIHVSGTNGTKRFDNPVLPFNDGVYFASTEKSNIIRGWIFGTTLDSKTQSLLIVNNATNVVIKVCEFQFCNDPFLGVYYHKNNKSWMESEFRVYSSANNCTFEYVSQPFLMDLEGKQGNFKNLREFVFKNIDGYFKIYSKHTPINLVRDLPQGFSALEPLVDLPIGINITRFQTLLALHRSYLTPGDSSSGWTAGAAAYYVGYLQPRTFLLKYNENGTITDAVDCALDPLSETKCTLKSFTVEKGIYQTSNFRVQPTESIVRFPNITNLCPFGEVFNATRFASVYAWNRKRISNCVADYSVLYNSASFSTFKCYGVSPTKLNDLCFTNVYADSFVIRGDEVRQIAPGQTGKIADYNYKLPDDFTGCVIAWNSNNLDSKVGGNYNYLYRLFRKSNLKPFERDISTEIYQAGSTPCNGVEGFNCYFPLQSYGFQPTNGVGYQPYRVVVLSFELLHAPATVCGPKKSTNLVKNKCVNFNFNGLTGTGVLTESNKKFLPFQQFGRDIADTTDAVRDPQTLEILDITPCSFGGVSVITPGTNTSNQVAVLYQGVNCTEVPVAIHADQLTPTWRVYSTGSNVFQTRAGCLIGAEHVNNSYECDIPIGAGICASYHTQTNSPRRARSVASQSIIAYTMSLGAENSVAYSNNSIAIPTNFTISVTTEILPVSMTKTSVDCTMYICGDSTECSNLLLQYGSFCTQLNRALTGIAVEQDKNTQEVFAQVKQIYKTPPIKDFGGFNFSQILPDPSKPSKRSFIEDLLFNKVTLADAGFIKQYGDCLGDIAARDLICAQKFNGLTVLPPLLTDEMIAQYTSALLAGTITSGWTFGAGAALQIPFAMQMAYRFNGIGVTQNVLYENQKLIANQFNSAIGKIQDSLSSTASALGKLQDVVNQNAQALNTLVKQLSSNFGAISSVLNDILSRLDPPEAEVQIDRLITGRLQSLQTYVTQQLIRAAEIRASANLAATKMSECVLGQSKRVDFCGKGYHLMSFPQSAPHGVVFLHVTYVPAQEKNFTTAPAICHDGKAHFPREGVFVSNGTHWFVTQRNFYEPQIITTDNTFVSGNCDVVIGIVNNTVYDPLQPELDSGGGGSDIIKLLNEQVNKEMQSSNLYMSMSSWCYTHSLDGAGLFLFDHAAEEYEHAKKLIIFLNENNVPVQLTSISAPEHKFEGLTQIFQKAYEHEQHISESINNIVDHAIKSKDHATFNFLQWYVAEQHEEEVLFKDILDKIELIGNENHGLYLADQYVKGIAKSRKS

SEQ ID NO: 8769 - protein, 1315 aa, Artificial Sequence; identical to SEQ ID NO: 8724
  SARS-CoV-2/Iceland/247/2020__EPI_ISL_417575 spike protein (1-1147)(K986P_V987P) Ferritin construct

SEQ ID NO: 8770 - protein, 1315 aa, Artificial Sequence
  SARS-CoV-2/Iceland/238/2020__EPI_ISL_417566 spike protein (1-1147)(K986P_V987P) Ferritin construct
MFVFLVLLPLVSSQCVNLTTRTQLPPAYTNSFTRGVYYPDKVFRSSVLHSTQDLFLPFFSNVTWFHAIHVSGTNGTKRFDNPVLPFNDGVYFASTEKSNIIRGWIFGTTLDSKTQSLLIVNNATNVVIKVCEFQFCNDPFLGVYYHKNNKSWMESEFRVYSSANNCTFEYVSQPFLMDLEGKQGNFKNLREFVFKNIDGYFKIYSKHTPINLVRDLPQGFSALEPLVDLPIGINITRFQTLLALHRSYLTPGDSSSGWTAGAAAYYVGYLQPRTFLLKYNENGTITDAVDCALDPLSETKCTLKSFTVEKGIYQTSNFRVQPTESIVRFPNITNLCPFGEVFNATRFASVYAWNRKRISNCVADYSVLYNSASFSTFKCYGVSPTKLNDLCFTNVYADSFVIRGDEVRQIAPGQTGKIADYNYKLPDDFTGCVIAWNSNNLDSKVGGNYNYLYRLFRKSNLKPFERDISTEIYQAGSTPCNGVEGFNCYFPLQSYGFQPTNGVGYQPYRVVVLSFELLHAPATVCGPKKSTNLVKNKCVNFNFNGLTGTGVLTESNKKFLPFQQFGRDIADTTDAVRDPQTLEILDITPCSFGGVSVITPGTNTSNQVAVLYQGVNCTEVPVAIHADQLTPTWRVYSTGSNVFQTRAGCLIGAEHVNNSYECDIPIGAGICASYQTQTNSPRRARSVASQSIIAYTMSLGAENSVAYSNNSIAIPTNFTISVTTEILPVSMTKTSVDCTMYICGDSTECSNLLLQYGSFCTQLNRALTGIAVEQDKNTQEVFAQVKQIYKTPPIKDFGGFNFSQILPDPSKPSKRSFIEDLLFNKVTLADVGFIKQYGDCLGDIAARDLICAQKFNGLTVLPPLLTDEMIAQYTSALLAGTITSGWTFGAGAALQIPFAMQMAYRFNGIGVTQNVLYENQKLIANQFNSAIGKIQDSLSSTASALGKLQDVVNQNAQALNTLVKQLSSNFGAISSVLNDILSRLDPPEAEVQIDRLITGRLQSLQTYVTQQLIRAAEIRASANLAATKMSECVLGQSKRVDFCGKGYHLMSFPQSAPHGVVFLHVTYVPAQEKNFTTAPAICHDGKAHFPREGVFVSNGTHWFVTQRNFYEPQIITTDNTFVSGNCDVVIGIVNNTVYDPLQPELDSGGGGSDIIKLLNEQVNKEMQSSNLYMSMSSWCYTHSLDGAGLFLFDHAAEEYEHAKKLIIFLNENNVPVQLTSISAPEHKFEGLTQIFQKAYEHEQHISESINNIVDHAIKSKDHATFNFLQWYVAEQHEEEVLFKDILDKIELIGNENHGLYLADQYVKGIAKSRKS

SEQ ID NO: 8771 - protein, 1315 aa, Artificial Sequence
  SARS-CoV-2/Greece/16/2020__EPI_ISL_418265 spike protein (1-1147)(K986P_V987P) Ferritin construct
MFVFLVLLPLVSSQCVNLTTRTQLPPAYTNSFTRGVYYPDKVFRSSVLHSTQDLFLPFFSNVTWFHAIHVSGTNGTKRFDNPVLPFNDGVYFASTEKSNIIRGWIFGTTLDSKTQSLLIVNNATNVVIKVCEFQFCNDPFLGVYYHKNNKSWMESEFRVYSSANNCTFEYVSQPFLMDLEGKQGNFKNLREFVFKNVDGYFKIYSKHTPINLVRDLPQGFSALEPLVDLPIGINITRFQTLLALHRSYLTPGDSSSGWTAGAAAYYVGYLQPRTFLLKYNENGTITDAVDCALDPLSETKCTLKSFTVEKGIYQTSNFRVQPTESIVRFPNITNLCPFGEVFNATRFASVYAWNRKRISNCVADYSVLYNSASFSTFKCYGVSPTKLNDLCFTNVYADSFVIRGDEVRQIAPGQTGKIADYNYKLPDDFTGCVIAWNSNNLDSKVGGNYNYLYRLFRKSNLKPFERDISTEIYQAGSTPCNGVEGFNCYFPLQSYGFQPTNGVGYQPYRVVVLSFELLHAPATVCGPKKSTNLVKNKCVNFNFNGLTGTGVLTESNKKFLPFQQFGRDIADTTDAVRDPQTLEILDITPCSFGGVSVITPGTNTSNQVAVLYQDVNCTEVPVAIHADQLTPTWRVYSTGSNVFQTRAGCLIGAEHVNNSYECDIPIGAGICASYQTQTNSPRRARSVASQSIIAYTMSLGAENSVAYSNNSIAIPTNFTISVTTEILPVSMTKTSVDCTMYICGDSTECSNLLLQYGSFCTQLNRALTGIAVEQDKNTQEVFAQVKQIYKTPPIKDFGGFNFSQILPDPSKPSKRSFIEDLLFNKVTLADAGFIKQYGDCLGDIAARDLICAQKFNGLTVLPPLLTDEMIAQYTSALLAGTITSGWTFGAGAALQIPFAMQMAYRFNGIGVTQNVLYENQKLIANQFNSAIGKIQDSLSSTASALGKLQDVVNQNAQALNTLVKQLSSNFGAISSVLNDILSRLDPPEAEVQIDRLITGRLQSLQTYVTQQLIRAAEIRASANLAATKMSECVLGQSKRVDFCGKGYHLMSFPQSAPHGVVFLHVTYVPAQEKNFTTAPAICHDGKAHFPREGVFVSNGTHWFVTQRNFYEPQIITTDNTFVSGNCDVVIGIVNNTVYDPLQPELDSGGGGSDIIKLLNEQVNKEMQSSNLYMSMSSWCYTHSLDGAGLFLFDHAAEEYEHAKKLIIFLNENNVPVQLTSISAPEHKFEGLTQIFQKAYEHEQHISESINNIVDHAIKSKDHATFNFLQWYVAEQHEEEVLFKDILDKIELIGNENHGLYLADQYVKGIAKSRKS

SEQ ID NO: 8772 - protein, 1315 aa, Artificial Sequence
  SARS-CoV-2/Iceland/319/2020__EPI_ISL_417648 spike protein (1-1147)(K986P_V987P) Ferritin construct
MFVFLVLLPLVSSQCVNLTTRTQLPPAYTNSFTRGVYYPDKVFRSSVLHSTQDLFLPFFSNVTWFHAIHVSGTNGTKRFDNPVLPFNDGVYFASTEKSNIIRGWIFGTTLDSKTQSLLIVNNATNVVIKVCEFQFCNDPFLGVYYHKNNKSWMESEFRVYSSANNCTFEYVSQPFLIDLEGKQGNFKNLREFVFKNIDGYFKIYSKHTPINLVRDLPQGFSALEPLVDLPIGINITRFQTLLALHRSYLTPGDSSSGWTAGAAAYYVGYLQPRTFLLKYNENGTITDAVDCALDPLSETKCTLKSFTVEKGIYQTSNFRVQPTESIVRFPNITNLCPFGEVFNATRFASVYAWNRKRISNCVADYSVLYNSASFSTFKCYGVSPTKLNDLCFTNVYADSFVIRGDEVRQIAPGQTGKIADYNYKLPDDFTGCVIAWNSNNLDSKVGGNYNYLYRLFRKSNLKPFERDISTEIYQAGSTPCNGVEGFNCYFPLQSYGFQPTNGVGYQPYRVVVLSFELLHAPATVCGPKKSTNLVKNKCVNFNFNGLTGTGVLTESNKKFLPFQQFGRDIADTTDAVRDPQTLEILDITPCSFGGVSVITPGTNTSNQVAVLYQGVNCTEVPVAIHADQLTPTWRVYSTGSNVFQTRAGCLIGAEHVNNSYECDIPIGAGICASYQTQTNSPRRARSVASQSIIAYTMSLGAENSVAYSNNSIAIPTNFTISVTTEILPVSMTKTSVDCTMYICGDSTECSNLLLQYGSFCTQLNRALTGIAVEQDKNTQEVFAQVKQIYKTPPIKDFGGFNFSQILPDPSKPSKRSFIEDLLFNKVTLADAGFIKQYGDCLGDIAARDLICAQKFNGLTVLPPLLTDEMIAQYTSALLAGTITSGWTFGAGAALQIPFAMQMAYRFNGIGVTQNVLYENQKLIANQFNSAIGKIQDSLSSTASALGKLQDVVNQNAQALNTLVKQLSSNFGAISSVLNDILSRLDPPEAEVQIDRLITGRLQSLQTYVTQQLIRAAEIRASANLAATKMSECVLGQSKRVDFCGKGYHLMSFPQSAPHGVVFLHVTYVPAQEKNFTTAPAICHDGKAHFPREGVFVSNGTHWFVTQRNFYEPQIITTDNTFVSGNCDVVIGIVNNTVYDPLQPELDSGGGGSDIIKLLNEQVNKEMQSSNLYMSMSSWCYTHSLDGAGLFLFDHAAEEYEHAKKLIIFLNENNVPVQLTSISAPEHKFEGLTQIFQKAYEHEQHISESINNIVDHAIKSKDHATFNFLQWYVAEQHEEEVLFKDILDKIELIGNENHGLYLADQYVKGIAKSRKS

SEQ ID NO: 8773 - protein, 1315 aa, Artificial Sequence
  SARS-CoV-2/Congo/94/2020__EPI_ISL_417947 spike protein (1-1147)(K986P_V987P) Ferritin construct
MFVFLVLLPLVSSQCVNLTTRTQLPPAYTNSFTRGVYYPDKVFRSSVLHSTQDLFLPFFSNVTWFHAIHVSGTNGTKRFDNPVLPFNDGVYFASTEKSNIIRGWIFGTTLDSKTQSLLIVNNATNVVIKVCEFQFCNDPFLGVYYHKNNKSWMESEFRVYSSANNCTFEYVSQPFLMDLEGKQGNFKNLREFVFKNIDGYFKIYSKHTPINLVRDLPQGFSALEPLVDLPIGINITRFQTLLALHRSYLTPGDSSSGWTAGAAAYYVGYLQPRTFLLKYNENGTITDAVDCALDPLSETKCTLKSFTVEKGIYQTSNFRVQPTESIVRFPNITNLCPFGEVFNATRFASVYAWNRKRISNCVADYSVLYNSASFSTFKCYGVSPTKLNDLCFTNVYADSFVIRGDEVRQIAPGQTGKIADYNYKLPDDFTGCVIAWNSNNLDSKVGGNYNYLYRLFRKSNLKPFERDISTEIYQAGSTPCNGVEGFNCYFPLQSYGFQPTNGVGYQPYRVVVLSFELLHAPATVCGPKKSTNLVKNKCVNFNFNGLTGTGVLTESNKKFLPFQQFGRDIADTTDAVRDPQTLEILDITPCSFGGVSVITPGTNTSNQVAVLYQGVNCTEVPVAIHADQLTPTWRVYSTGSNVFQTRAGCLIGAEHVNNSYECDIPIGAGICASYQTQTNSPRRARSVASQSIIAYTMSLGAENSVAYSNNSIAIPTNFTISVTTEILPVSMTKTSVDCTMYICGDSTECSNLLLQYGSFCTQLNRALTGIAVEQDKNTQEVFAQVKQIYKTPPIKDFGGFNFSQILPDPSKPSKRSFIEDILFNKVTLADAGFIKQYGDCLGDIAARDLICAQKFNGLTVLPPLLTDEMIAQYTSALLAGTITSGWTFGAGAALQIPFAMQMAYRFNGIGVTQNVLYENQKLIANQFNSAIGKIQDSLSSTASALGKLQDVVNQNAQALNTLVKQLSSNFGAISSVLNDILSRLDPPEAEVQIDRLITGRLQSLQTYVTQQLIRAAEIRASANLAATKMSECVLGQSKRVDFCGKGYHLMSFPQSAPHGVVFLHVTYVPAQEKNFTTAPAICHDGKAHFPREGVFVSNGTHWFVTQRNFYEPQIITTDNTFVSGNCDVVIGIVNNTVYDPLQPELDSGGGGSDIIKLLNEQVNKEMQSSNLYMSMSSWCYTHSLDGAGLFLFDHAAEEYEHAKKLIIFLNENNVPVQLTSISAPEHKFEGLTQIFQKAYEHEQHISESINNIVDHAIKSKDHATFNFLQWYVAEQHEEEVLFKDILDKIELIGNENHGLYLADQYVKGIAKSRKS

SEQ ID NO: 8774 - protein, 1315 aa, Artificial Sequence
  SARS-CoV-2/Congo/158/2020__EPI_ISL_417950 spike protein (1-1147)(K986P_V987P) Ferritin construct
MFVFLVLLPLVSSQCVNLTTRTQLPPAYTNSFTRGVYYPDKVFRSSVLHSTQDLFLPFFSNVTWFHAIHVSGTNGTKRFDNPVLPFNDGVYFASTEKSNIIRGWIFGTTLDSKTQSLLIVNNATNVVIKVCEFQFCNDPFLGVYYHKNNKSWMESEFRVYSSANNCTFEYVSQPFLMDLEGKQGNFKNLREFVFKNIDGYFKIYSKHTPINLVRDLPQGFSALEPLVDLPIGINITRFQTLLALHRSYLTPGDSSSGWTAGAAAYYVGYLQPRTFLLKYNENGTITDAVDCALDPLSETKCTLKSFTVEKGIYQTSNFRVQPTESIVRFPNITNLCPFGEVFNATRFASVYAWNRKRISNCVADYSVLYNSASFSTFKCYGVSPTKLNDLCFTNVYADSFVIRGDEVRQIAPGQTGKIADYNYKLPDDFTGCVIAWNSNNLDSKVGGNYNYLYRLFRKSNLKPFERDISTEIYQAGSTPCNGVEGFNCYFPLQSYGFQPTNGVGYQPYRVVVLSFELLHAPATVCGPKKSTNLVKNKCVNFNFNGLTGTGVLTESNKKFLPFQQFGRDIADTTDAVRDPQTLEILDITPCSFGGVSVITPGTNTSNQVAVLYQDVNCTEVPVAIHADQLTPTWRVYSTGSNVFQTRAGCLIGAEHVNNSYECDIPIGAGICASYQTQTNSPRRARSVASQSIIAYTMSLGAENSVAYSNNSIAIPTNFTISVTTEILPVSMTKTSVDCTMYICGDSTECSNLLLQYGSFCTQLNRALTGIAVEQDKNTQEVFAQVKQIYKTPPIKDFGGFNFSQILPDPSKPSKRSFIEDLLFNKVTLADAGFIKQYGDCLGDIAARDLICAQKFNGLTVLPPLLTDEMIAQYTSALLAGTITSGWTFGAGAALQIPFAMQMAYRFNGIGVTQNVLYENQKLIANQFNSAIGKIQDSLSSTASALGKLQDVVNQNAQALNTLVKQLSSNFGAISSVLNDILSRLDPPEAEVQIDRLITGRLQSLQTYVTQQLIRAAEIRASANLAATKMSECVLGQSKRVDFCGKGYHLMSFPQSAPHGVVFLHVTYVPAQEKNFTTAPAICHDGKAHFPREGVFVSNGTHWFVTQRNFYEPQIITTDNTFLSGNCDVVIGIVNNTVYDPLQPELDSGGGGSDIIKLLNEQVNKEMQSSNLYMSMSSWCYTHSLDGAGLFLFDHAAEEYEHAKKLIIFLNENNVPVQLTSISAPEHKFEGLTQIFQKAYEHEQHISESINNIVDHAIKSKDHATFNFLQWYVAEQHEEEVLFKDILDKIELIGNENHGLYLADQYVKGIAKSRKS

SEQ ID NO: 8775 - protein, 1315 aa, Artificial Sequence
  SARS-CoV-2/USA/UT-00034/2020__EPI_ISL_417977 spike protein (1-1147)(K986P_V987P) Ferritin construct
MFVFLVLLPLVSSQCVNLTTRTQLPPAYTNSFTRGVYYPDKVFRSSVLHSTQDLFLPFFSNVTWFHAIHVSGTNGTKRFDNPVLPFNDGVYFASTEKSNIIRGWIFGTTLDSKTQSLLIVNNATNVVIKVCEFQFCNDPFLGVYYYKNNKSWMESEFRVYSSANNCTFEYVSQPFLMDLEGKQGNFKNLREFVFKNIDGYFKIYSKHTPINLVRDLPQGFSALEPLVDLPIGINITRFQTLLALHRSYLTPGDSSSGWTAGAAAYYVGYLQPRTFLLKYNENGTITDAVDCALDPLSETKCTLKSFTVEKGIYQTSNFRVQPTESIVRFPNITNLCPFGEVFNATRFASVYAWNRKRISNCVADYSVLYNSASFSTFKCYGVSPTKLNDLCFTNVYADSFVIRGDEVRQIAPGQTGKIADYNYKLPDDFTGCVIAWNSNNLDSKVGGNYNYLYRLFRKSNLKPFERDISTEIYQAGSTPCNGVEGFNCYFPLQSYGFQPTNGVGYQPYRVVVLSFELLHAPATVCGPKKSTNLVKNKCVNFNFNGLTGTGVLTESNKKFLPFQQFGRDIADTTDAVRDPQTLEILDITPCSFGGVSVITPGTNTSNQVAVLYQGVNCTEVPVAIHADQLTPTWRVYSTGSNVFQTRAGCLIGAEHVNNSYECDIPIGAGICASYQTQTNSPRRARSVASQSIIAYTMSLGAENSVAYSNNSIAIPTNFTISVTTEILPVSMTKTSVDCTMYICGDSTECSNLLLQYGSFCTQLNRALTGIAVEQDKNTQEVFAQVKQIYKTPPIKDFGGFNFSQILPDPSKPSKRSFIEDLLFNKVTLADAGFIKQYGDCLGDIAARDLICAQKFNGLTVLPPLLTDEMIAQYTSALLAGTITSGWTFGAGAALQIPFAMQMAYRFNGIGVTQNVLYENQKLIANQFNSAIGKIQDSLSSTASALGKLQDVVNQNAQALNTLVKQLSSNFGAISSVLNDILSRLDPPEAEVQIDRLITGRLQSLQTYVTQQLIRAAEIRASANLAATKMSECVLGQSKRVDFCGKGYHLMSFPQSAPHGVVFLHVTYVPAQEKNFTTAPAICHDGKAHFPREGVFVSNGTHWFVTQRNFYEPQIITTDNTFVSGNCDVVIGIVNNTVYDPLQPELDSGGGGSDIIKLLNEQVNKEMQSSNLYMSMSSWCYTHSLDGAGLFLFDHAAEEYEHAKKLIIFLNENNVPVQLTSISAPEHKFEGLTQIFQKAYEHEQHISESINNIVDHAIKSKDHATFNFLQWYVAEQHEEEVLFKDILDKIELIGNENHGLYLADQYVKGIAKSRKS

SEQ ID NO: 8776 - protein, 1315 aa, Artificial Sequence
  SARS-CoV-2/USA/UT-00033/2020__EPI_ISL_417976 spike protein (1-1147)(K986P_V987P) Ferritin construct
MFVFLVLLPLVSSQCVNLTTRTQLPPAYTNSFTRGVYYPDKVFRSSVLHSTQDLFLPFFSNVTWFHAIHVSGTNGTKRFDNPVLPFNDGVYFASTEKSNIIRGWIFGTTLDSKTQSLLIVNNATNVVIKVCEFQFCNDPFLGVYYHKNNKSWMESEFRVYSSANNCTFEYVSQPFLMDLEGKQGNFKNLREFVFKNIDGYFKIYSKHTPINLVRDLPQGFSALEPLVDLPIGINITRFQTLLALHRSYLTPGDSSSGLTAGAAAYYVGYLQPRTFLLKYNENGTITDAVDCALDPLSETKCTLKSFTVEKGIYQTSNFRVQPTESIVRFPNITNLCPFGEVFNATRFASVYAWNRKRISNCVADYSVLYNSASFSTFKCYGVSPTKLNDLCFTNVYADSFVIRGDEVRQIAPGQTGKIADYNYKLPDDFTGCVIAWNSNNLDSKVGGNYNYLYRLFRKSNLKPFERDISTEIYQAGSTPCNGVEGFNCYFPLQSYGFQPTNGVGYQPYRVVVLSFELLHAPATVCGPKKSTNLVKNKCVNFNFNGLTGTGVLTESNKKFLPFQQFGRDIADTTDAVRDPQTLEILDITPCSFGGVSVITPGTNTSNQVAVLYQGVNCTEVPVAIHADQLTPTWRVYSTGSNVFQTRAGCLIGAEHVNNSYECDIPIGAGICASYQTQTNSPRRARSVASQSIIAYTMSLGAENSVAYSNNSIAIPTNFTISVTTEILPVSMTKTSVDCTMYICGDSTECSNLLLQYGSFCTQLNRALTGIAVEQDKNTQEVFAQVKQIYKTPPIKDFGGFNFSQILPDPSKPSKRSFIEDLLFNKVTLADAGFIKQYGDCLGDIAARDLICAQKFNGLTVLPPLLTDEMIAQYTSALLAGTITSGWTFGAGAALQIPFAMQMAYRFNGIGVTQNVLYENQKLIANQFNSAIGKIQDSLSSTASALGKLQDVVNQNAQALNTLVKQLSSNFGAISSVLNDILSRLDPPEAEVQIDRLITGRLQSLQTYVTQQLIRAAEIRASANLAATKMSECVLGQSKRVDFCGKGYHLMSFPQSAPHGVVFLHVTYVPAQEKNFTTAPAICHDGKAHFPREGVFVSNGTHWFVTQRNFYEPQIITTDNTFVSGNCDVVIGIVNNTVYDPLQPELDSGGGGSDIIKLLNEQVNKEMQSSNLYMSMSSWCYTHSLDGAGLFLFDHAAEEYEHAKKLIIFLNENNVPVQLTSISAPEHKFEGLTQIFQKAYEHEQHISESINNIVDHAIKSKDHATFNFLQWYVAEQHEEEVLFKDILDKIELIGNENHGLYLADQYVKGIAKSRKS

SEQ ID NO: 8777 - protein, 1315 aa, Artificial Sequence
  SARS-CoV-2/USA/WI-13/2020__EPI_ISL_417516 spike protein (1-1147)(K986P_V987P) Ferritin construct
MFVFLVLLPLVSSQCVNLTTRTQLPPAYTNSFTRGVYYPDKVFRSSVLHSTQDLFLPFFSNVTWFHAIHVSGTNGTKRFDNPVLPFNDGVYFASTEKSNIIRGWIFGTTLDSKTQSLLIVNNATNVVIKVCEFQFCNDPFLGVYYHKNNKSWMESEFRVYSSANNCTFEYVSQPFLMDLEGKQGNFKNLREFVFKNIDGYFKIYSKHTPINLVRDLPQGFSALEPLVDLPIGINITRFQTLLALHRSYLTPGDSSSGWTAGAAAYYVGYLQPRTFLLKYNENGTITDAVDCALDPLSETKCTLKSFTVEKGIYQTSNFRVLPTESIVRFPNITNLCPFGEVFNATRFASVYAWNRKRISNCVADYSVLYNSASFSTFKCYGVSPTKLNDLCFTNVYADSFVIRGDEVRQIAPGQTGKIADYNYKLPDDFTGCVIAWNSNNLDSKVGGNYNYLYRLFRKSNLKPFERDISTEIYQAGSTPCNGVEGFNCYFPLQSYGFQPTNGVGYQPYRVVVLSFELLHAPATVCGPKKSTNLVKNKCVNFNFNGLTGTGVLTESNKKFLPFQQFGRDIADTTDAVRDPQTLEILDITPCSFGGVSVITPGTNTSNQVAVLYQGVNCTEVPVAIHADQLTPTWRVYSTGSNVFQTRAGCLIGAEHVNNSYECDIPIGAGICASYQTQTNSPRRARSVASQSIIAYTMSLGAENSVAYSNNSIAIPTNFTISVTTEILPVSMTKTSVDCTMYICGDSTECSNLLLQYGSFCTQLNRALTGIAVEQDKNTQEVFAQVKQIYKTPPIKDFGGFNFSQILPDPSKPSKRSFIEDLLFNKVTLADAGFIKQYGDCLGDIAARDLICAQKFNGLTVLPPLLTDEMIAQYTSALLAGTITSGWTFGAGAALQIPFAMQMAYRFNGIGVTQNVLYENQKLIANQFNSAIGKIQDSLSSTASALGKLQDVVNQNAQALNTLVKQLSSNFGAISSVLNDILSRLDPPEAEVQIDRLITGRLQSLQTYVTQQLIRAAEIRASANLAATKMSECVLGQSKRVDFCGKGYHLMSFPQSAPHGVVFLHVTYVPAQEKNFTTAPAICHDGKAHFPREGVFVSNGTHWFVTQRNFYEPQIITTDNTFVSGNCDVVIGIVNNTVYDPLQPELDSGGGGSDIIKLLNEQVNKEMQSSNLYMSMSSWCYTHSLDGAGLFLFDHAAEEYEHAKKLIIFLNENNVPVQLTSISAPEHKFEGLTQIFQKAYEHEQHISESINNIVDHAIKSKDHATFNFLQWYVAEQHEEEVLFKDILDKIELIGNENHGLYLADQYVKGIAKSRKS

SEQ ID NO: 8778 - protein, 1314 aa, Artificial Sequence
  SARS-CoV-2/India/1-27/2020__EPI_ISL_413522 spike protein (1-1146)(K985P_V986P) Ferritin construct
MFVFLVLLPLVSSQCVNLTTRTQLPPAYTNSFTRGVYYPDKVFRSSVLHSTQDLFLPFFSNVTWFHAIHVSGTNGTKRFDNPVLPFNDGVYFASTEKSNIIRGWIFGTTLDSKTQSLLIVNNATNVVIKVCEFQFCNDPFLGVYHKNNKSWMESEFRVYSSANNCTFEYVSQPFLMDLEGKQGNFKNLREFVFKNIDGYFKIYSKHTPINLVRDLPQGFSALEPLVDLPIGINITRFQTLLALHRSYLTPGDSSSGWTAGAAAYYVGYLQPRTFLLKYNENGTITDAVDCALDPLSETKCTLKSFTVEKGIYQTSNFRVQPTESIVRFPNITNLCPFGEVFNATRFASVYAWNRKRISNCVADYSVLYNSASFSTFKCYGVSPTKLNDLCFTNVYADSFVIRGDEVIQIAPGQTGKIADYNYKLPDDFTGCVIAWNSNNLDSKVGGNYNYLYRLFRKSNLKPFERDISTEIYQAGSTPCNGVEGFNCYFPLQSYGFQPTNGVGYQPYRVVVLSFELLHAPATVCGPKKSTNLVKNKCVNFNFNGLTGTGVLTESNKKFLPFQQFGRDIADTTDAVRDPQTLEILDITPCSFGGVSVITPGTNTSNQVAVLYQDVNCTEVPVAIHADQLTPTWRVYSTGSNVFQTRAGCLIGAEHVNNSYECDIPIGAGICASYQTQTNSPRRARSVASQSIIAYTMSLGAENSVAYSNNSIAIPTNFTISVTTEILPVSMTKTSVDCTMYICGDSTECSNLLLQYGSFCTQLNRALTGIAVEQDKNTQEVFAQVKQIYKTPPIKDFGGFNFSQILPDPSKPSKRSFIEDLLFNKVTLADAGFIKQYGDCLGDIAARDLICAQKFNGLTVLPPLLTDEMIAQYTSALLAGTITSGWTFGAGAALQIPFAMQMAYRFNGIGVTQNVLYENQKLIANQFNSAIGKIQDSLSSTASALGKLQDVVNQNAQALNTLVKQLSSNFGAISSVLNDILSRLDPPEAEVQIDRLITGRLQSLQTYVTQQLIRAAEIRASANLAATKMSECVLGQSKRVDFCGKGYHLMSFPQSAPHGVVFLHVTYVPAQEKNFTTAPAICHDGKAHFPREGVFVSNGTHWFVTQRNFYEPQIITTDNTFVSGNCDVVIGIVNNTVYDPLQPELDSGGGGSDIIKLLNEQVNKEMQSSNLYMSMSSWCYTHSLDGAGLFLFDHAAEEYEHAKKLIIFLNENNVPVQLTSISAPEHKFEGLTQIFQKAYEHEQHISESINNIVDHAIKSKDHATFNFLQWYVAEQHEEEVLFKDILDKIELIGNENHGLYLADQYVKGIAKSRKS

SEQ ID NO: 8779 - protein, 1309 aa, Artificial Sequence
  SARS-CoV-2/pangolin/Guangxi/P4L/2017__EPI_ISL_410538 spike protein (1-1141)(K980P_V981P) Ferritin construct
MFVFLFVLPLVSSQCVNLTTRTGIPPGYTNSSTRGVYYPDKVFRSSILHLTQDLFLPFFSNVTWFNTINYQGGFKKFDNPVLPFNDGVYFASTEKSNIIRGWIFGTTLDARTQSLLIVNNATNVVIKVCEFQFCTDPFLGVYYHNNNKTWVENEFRVYSSANNCTFEYISQPFLMDLEGKQGNFKNLREFVFKNVDGYFKIYSKHTPIDLVRDLPRGFAALEPLVDLPIGINITRFQTLLALHRSYLTPGNLESGWTTGAAAYYVGYLQQRTFLLSYNQNGTITDAVDCSLDPLSETKCTLKSLTVEKGIYQTSNFRVQPTISIVRFPNITNLCPFGEVFNASKFASVYAWNRKRISNCVADYSVLYNSTSFSTFKCYGVSPTKLNDLCFTNVYADSFVVKGDEVRQIAPGQTGVIADYNYKLPDDFTGCVIAWNSVKQDALTGGNYGYLYRLFRKSKLKPFERDISTEIYQAGSTPCNGQVGLNCYYPLERYGFHPTTGVNYQPFRVVVLSFELLNGPATVCGPKLSTTLVKDKCVNFNFNGLTGTGVLTTSKKQFLPFQQFGRDISDTTDAVRDPQTLEILDITPCSFGGVSVITPGTNTSNQVAVLYQDVNCTEVPMAIHAEQLTPAWRVYSAGANVFQTRAGCLVGAEHVNNSYECDIPVGAGICASYHSMSSLRSVNQRSIIAYTMSLGAENSVAYSNNSIAIPTNFTISVTTEILPVSMTKTSVDCTMYICGDSIECSNLLLQYGSFCTQLNRALTGIAVEQDKNTQEVFAQVKQIYKTPPIKDFGGFNFSQILPDPSKPSKRSFIEDLLFNKVTLADAGFIKQYGDCLGDIAARDLICAQKFNGLTVLPPLLTDEMIAQYTSALLAGTITSGWTFGAGAALQIPFAMQMAYRFNGIGVTQNVLYENQKLIANQFNSAIGKIQDSLSSTASALGKLQDVVNQNAQALNTLVKQLSSNFGAISSVLNDILSRLDPPEAEVQIDRLITGRLQSLQTYVTQQLIRAAEIRASANLAATKMSECVLGQSKRVDFCGKGYHLMSFPQSAPHGVVFLHVTYVPAQEKNFTTAPAICHEGKAHFPREGVFVSNGTHWFITQRNFYEPQIITTDNTFVSGSCDVVIGIVNNTVYDPLQPELDSGGGGSDIIKLLNEQVNKEMQSSNLYMSMSSWCYTHSLDGAGLFLFDHAAEEYEHAKKLIIFLNENNVPVQLTSISAPEHKFEGLTQIFQKAYEHEQHISESINNIVDHAIKSKDHATFNFLQWYVAEQHEEEVLFKDILDKIELIGNENHGLYLADQYVKGIAKSRKS

SEQ ID NO: 8780 - protein, 1309 aa, Artificial Sequence
  SARS-CoV-2/pangolin/Guangxi/P5L/2017__EPI_ISL_410540 spike protein (1-1141)(K980P_V981P) Ferritin construct
MFVFLFVLPLVSSQCVNLTTRTGIPPGYTNSSTRGVYYPDKVFRSSILHLTQDLFLPFFSNVTWFNTINYQGGFKKFDNPVLPFNDGVYFASTEKSNIIRGWIFGTTLDARTQSLLIVNNATNVVIKVCEFQFCTDPFLGVYYHNNNKTWVENEFRVYSSANNCTFEYISQPFLMDLEGKQGNFKNLREFVFKNVDGYFKIYSKHTPIDLVRDLPRGFAALEPLVDLPIGINITRFQTLLALHRSYLTPGKLESGWTTGAAAYYVGYLQQRTFLLSYNQNGTITDAVDCSLDPLSETKCTLKSLTVEKGIYQTSNFRVQPTISIVRFPNITNLCPFGEVFNASKFASVYAWNRKRISNCVADYSVLYNSTSFSTFKCYGVSPTKLNDLCFTNVYADSFVVKGDEVRQIAPGQTGVIADYNYKLPDDFTGCVIAWNSVKQDALTGGNYGYLYRLFRKSKLKPFERDISTEIYQAGSTPCNGQVGLNCYYPLERYGFHPTTGVNYQPFRVVVLSFELLNGPATVCGPKLSTTLVKDKCVNFNFNGLTGTGVLTTSKKQFLPFQQFGRDISDTTDAVRDPQTLEILDITPCSFGGVSVITPGTNTSNQVAVLYQDVNCTEVPMAIHAEQLTPAWRVYSAGANVFQTRAGCLVGAEHVNNSYECDIPVGAGICASYHSMSSFRSVNQRSIIAYTMSLGAENSVAYSNNSIAIPTNFTISVTTEILPVSMTKTSVDCTMYICGDSIECSNLLLQYGSFCTQLNRALTGIAVEQDKNTQEVFAQVKQIYKTPPIKDFGGFNFSQILPDPSKPSKRSFIEDLLFNKVTLADAGFIKQYGDCLGDIAARDLICAQKFNGLTVLPPLLTDEMIAQYTSALLAGTITSGWTFGAGAALQIPFAMQMAYRFNGIGVTQNVLYENQKLIANQFNSAIGKIQDSLSSTASALGKLQDVVNQNAQALNTLVKQLSSNFGAISSVLNDILSRLDPPEAEVQIDRLITGRLQSLQTYVTQQLIRAAEIRASANLAATKMSECVLGQSKRVDFCGKGYHLMSFPQSAPHGVVFLHVTYVPAQEKNFTTAPAICHEGKAHFPREGVFVSNGTHWFITQRNFYEPQIITTDNTFVSGSCDVVIGIVNNTVYDPLQPELDSGGGGSDIIKLLNEQVNKEMQSSNLYMSMSSWCYTHSLDGAGLFLFDHAAEEYEHAKKLIIFLNENNVPVQLTSISAPEHKFEGLTQIFQKAYEHEQHISESINNIVDHAIKSKDHATFNFLQWYVAEQHEEEVLFKDILDKIELIGNENHGLYLADQYVKGIAKSRKS

SEQ ID NO: 8781 - protein, 1309 aa, Artificial Sequence
  SARS-CoV-2/pangolin/Guangxi/P5E/2017__EPI_ISL_410541 spike protein (1-1141)(K980P_V981P) Ferritin construct
MFVFLFVLPLVSSQCVNLTTRTGIPPGYTNSSTRGVYYPDKVFRSSILHLTQDLFLPFFSNVTWFNTITYQGGSKKFDNPVLPFNDGVYFASTEKSNIIRGWIFGTTLDARTQSLLIVNNATNVVIKVCEFQFCTDPFLGVYYHNNNKTWVENEFRVYSSANNCTFEYISQPFLMDLEGKQGNFKNLREFVFKNVDGYFKIYSKHTPIDLVRDLPRGFAALEPLVDLPIGINITRFQTLLALHRSYLTPGKLESGWTTGAAAYYVGYLQQRTFLLSYNQNGTITDAVDCSLDPLSETKCTLKSLTVEKGIYQTSNFRVQPTISIVRFPNITNLCPFGEVFNASKFASVYAWNRKRISNCVADYSVLYNSTSFSTFKCYGVSPTKLNDLCFTNVYADSFVVKGDEVRQIAPGQTGVIADYNYKLPDDFTGCVIAWNSVKQDALTGDNYGYLYRLFRKSKLKPFERDISTEIYQAGSTPCNGQVGLNCYYPLERYGFHPTTGVNYQPFRVVVLSFELLNGPATVCGPKLSTTLVKDKCVNFNFNGLTGTGVLTTSKKQFLPFQQFGRDISDTTDAVRDPQTLEILDITPCSFGGVSVITPGTNTSNQVAVLYQDVNCTEVPMAIHAEQLTPAWRVYSAGANVFQTRAGCLVGAEHVNNSYECDIPVGAGICASYHSMSSFRSVNQRSIIAYTMSLGAENSVAYSNNSIAIPTNFTISVTTEILPVSMTKTSVDCTMYICGDSIECSNLLLQYGSFCTQLNRALTGIAVEQDKNTQEVFAQVKQIYKTPPIKDFGGFNFSQILPDPSKPSKRSFIEDLLFNKVTLADAGFIKQYGDCLGDIAARDLICAQKFNGLTVLPPLLTDEMIAQYTSALLAGTITSGWTFGAGAALQIPFAMQMAYRFNGIGVTQNVLYENQKLIANQFNSAIGKIQDSLSSTASALGKLQDVVNQNAQALNTLVKQLSSNFGAISSVLNDILSRLDPPEAEVQIDRLITGRLQSLQTYVTQQLIRAAEIRASANLAATKMSECVLGQSKRVDFCGKGYHLMSFPQSAPHGVVFLHVTYVPAQEKNFTTAPAICHEGKAHFPREGVFVSNGTHWFITQRNFYEPQIITTDNTFVSGSCDVVIGIVNNTVYDPLQPELDSGGGGSDIIKLLNEQVNKEMQSSNLYMSMSSWCYTHSLDGAGLFLFDHAAEEYEHAKKLIIFLNENNVPVQLTSISAPEHKFEGLTQIFQKAYEHEQHISESINNIVDHAIKSKDHATFNFLQWYVAEQHEEEVLFKDILDKIELIGNENHGLYLADQYVKGIAKSRKS

SEQ ID NO: 8782 - protein, 1307 aa, Artificial Sequence
  SARS-CoV-2/pangolin/Guangxi/P1E/2017__EPI_ISL_410539 spike protein (1-1139)(K978P_V979P) Ferritin construct
MFVFLFVLPLVSSQCVNLTTRTGIQPGYTNSSTRGVYYPDKVFRSSILHLTQDLFLPFFSNVTWFNTINYQGGFKKFDNPVLPFNDGVYFASTEKSNIIRGWIFGTTLDARTQSLLIVNNATNVVIKVCEFQFCTDPFLGVYYHNNNKTWVENEFRVYSSANNCTFEYISQPFLMDLEGKQGNFKNLREFVFKNVDGYFKIYSKHTPIDLVRDLPRGFAALEPLVDLPIGINITRFQTLLALHRSYLTPGKLESGWTTGAAAYYVGYLQQRTFLLSYNQNGTITDAVDCSLDPLSETKCTLKSLTVEKGIYQTSNFRVQPTISIVRFPNITNLCPFGEVFNASKFASVYAWNRKRISNCVADYSVLYNSTSFSTFKCYGVSPTKLNDLCFTNVYADSFVVKGDEVRQIAPGQTGVIADYNYKLPDDFTGCVIAWNSVKQDALTGGNYLYRLFRKSKLKPFERDISTEIYQAGSTPCNGQVGLNCYYPLERYGFHPTTGVNYQPFRVVVLSFELLNGPATVCGPKLSTTLVKDKCVNFNFNGLTGTGVLTTSKKQFLPFQQFGRDISDTTDAVRDPQTLEILDITPCSFGGVSVITPGTNTSNQVAVLYQDVNCTEVPMAIHAEQLTPAWRVYSAGANVFQTRAGCLVGAEHVNNSYECDIPVGAGICASYHSMSSLRSVNQRSIIAYTMSLGAENSVAYSNNSIAIPTNFTISVTTEILPVSMTKTSVDCTMYICGDSIECSNLLLQYGSFCTQLNRALTGIAVEQDKNTQEVFAQVKQIYKTPPIKDFGGFNFSQILPDPSKPSKRSFIEDLLFNKVTLADAGFIKQYGDCLGDIAARDLICAQKFNGLTVLPPLLTDEMIAQYTSALLAGTITSGWTFGAGAALQIPFAMQMAYRFNGIGVTQNVLYENQKLIANQFNSAIGKIQDSLSSTASALGKLQDVVNQNAQALNTLVKQLSSNFGAISSVLNDILSRLDPPEAEVQIDRLITGRLQSLQTYVTQQLIRAAEIRASANLAATKMSECVLGQSKRVDFCGKGYHLMSFPQSAPHGVVFLHVTYVPAQEKNFTTAPAICHEGKAHFPREGVFVSNGTHWFITQRNFYEPQIITTDNTFVSGSCDVVIGIVNNTVYDPLQPELDSGGGGSDIIKLLNEQVNKEMQSSNLYMSMSSWCYTHSLDGAGLFLFDHAAEEYEHAKKLIIFLNENNVPVQLTSISAPEHKFEGLTQIFQKAYEHEQHISESINNIVDHAIKSKDHATFNFLQWYVAEQHEEEVLFKDILDKIELIGNENHGLYLADQYVKGIAKSRKS

SEQ ID NO: 8783 - protein, 1315 aa, Artificial Sequence
  SARS-CoV-2/Wuhan/WIV05/2019__EPI_ISL_402128 spike protein (1-1147)(K986P_V987P_T887W_A1020W) Ferritin construct
MFVFLVLLPLVSSQCVNLTTRTQLPPAYTNSFTRGVYYPDKVFRSSVLHSTQDLFLPFFSNVTWFHAIHVSGTNGTKRFDNPVLPFNDGVYFASTEKSNIIRGWIFGTTLDSKTQSLLIVNNATNVVIKVCEFQFCNDPFLGVYYHKNNKSWMESEFRVYSSANNCTFEYVSQPFLMDLEGKQGNFKNLREFVFKNIDGYFKIYSKHTPINLVRDLPQGFSALEPLVDLPIGINITRFQTLLALHRSYLTPGDSSSGWTAGAAAYYVGYLQPRTFLLKYNENGTITDAVDCALDPLSETKCTLKSFTVEKGIYQTSNFRVQPTESIVRFPNITNLCPFGEVFNATRFASVYAWNRKRISNCVADYSVLYNSASFSTFKCYGVSPTKLNDLCFTNVYADSFVIRGDEVRQIAPGQTGKIADYNYKLPDDFTGCVIAWNSNNLDSKVGGNYNYLYRLFRKSNLKPFERDISTEIYQAGSTPCNGVEGFNCYFPLQSYGFQPTNGVGYQPYRVVVLSFELLHAPATVCGPKKSTNLVKNKCVNFNFNGLTGTGVLTESNKKFLPFQQFGRDIADTTDAVRDPQTLEILDITPCSFGGVSVITPGTNTSNQVAVLYQDVNCTEVPVAIHADQLTPTWRVYSTGSNVFQTRAGCLIGAEHVNNSYECDIPIGAGICASYQTQTNSPRRARSVASQSIIAYTMSLGAENSVAYSNNSIAIPTNFTISVTTEILPVSMTKTSVDCTMYICGDSTECSNLLLQYGSFCTQLNRALTGIAVEQDKNTQEVFAQVKQIYKTPPIKDFGGFNFSQILPDPSKPSKRSFIEDLLFNKVTLADAGFIKQYGDCLGDIAARDLICAQKFNGLTVLPPLLTDEMIAQYTSALLAGTITSGWWFGAGAALQIPFAMQMAYRFNGIGVTQNVLYENQKLIANQFNSAIGKIQDSLSSTASALGKLQDVVNQNAQALNTLVKQLSSNFGAISSVLNDILSRLDPPEAEVQIDRLITGRLQSLQTYVTQQLIRAAEIRWSANLAATKMSECVLGQSKRVDFCGKGYHLMSFPQSAPHGVVFLHVTYVPAQEKNFTTAPAICHDGKAHFPREGVFVSNGTHWFVTQRNFYEPQIITTDNTFVSGNCDVVIGIVNNTVYDPLQPELDSGGGGSDIIKLLNEQVNKEMQSSNLYMSMSSWCYTHSLDGAGLFLFDHAAEEYEHAKKLIIFLNENNVPVQLTSISAPEHKFEGLTQIFQKAYEHEQHISESINNIVDHAIKSKDHATFNFLQWYVAEQHEEEVLFKDILDKIELIGNENHGLYLADQYVKGIAKSRKS

SEQ ID NO: 8784 - protein, 1311 aa, Artificial Sequence
  SARS-CoV-2/bat/Yunnan/RaTG13/2013__EPI_ISL_402131 spike protein (1-1143)(K982P_V983P_T883W_A1016W) Ferritin construct
MFVFLVLLPLVSSQCVNLTTRTQLPPAYTNSSTRGVYYPDKVFRSSVLHLTQDLFLPFFSNVTWFHAIHVSGTNGIKRFDNPVLPFNDGVYFASTEKSNIIRGWIFGTTLDSKTQSLLIVNNATNVVIKVCEFQFCNDPFLGVYYHKNNKSWMESEFRVYSSANNCTFEYVSQPFLMDLEGKQGNFKNLREFVFKNIDGYFKIYSKHTPINLVRDLPPGFSALEPLVDLPIGINITRFQTLLALHRSYLTPGDSSSGWTAGAAAYYVGYLQPRTFLLKYNENGTITDAVDCALDPLSETKCTLKSFTVEKGIYQTSNFRVQPTDSIVRFPNITNLCPFGEVFNATTFASVYAWNRKRISNCVADYSVLYNSTSFSTFKCYGVSPTKLNDLCFTNVYADSFVITGDEVRQIAPGQTGKIADYNYKLPDDFTGCVIAWNSKHIDAKEGGNFNYLYRLFRKANLKPFERDISTEIYQAGSKPCNGQTGLNCYYPLYRYGFYPTDGVGHQPYRVVVLSFELLNAPATVCGPKKSTNLVKNKCVNFNFNGLTGTGVLTESNKKFLPFQQFGRDIADTTDAVRDPQTLEILDITPCSFGGVSVITPGTNASNQVAVLYQDVNCTEVPVAIHADQLTPTWRVYSTGSNVFQTRAGCLIGAEHVNNSYECDIPIGAGICASYQTQTNSRSVASQSIIAYTMSLGAENSVAYSNNSIAIPTNFTISVTTEILPVSMTKTSVDCTMYICGDSTECSNLLLQYGSFCTQLNRALTGIAVEQDKNTQEVFAQVKQIYKTPPIKDFGGFNFSQILPDPSKPSKRSFIEDLLFNKVTLADAGFIKQYGDCLGDIAARDLICAQKFNGLTVLPPLLTDEMIAQYTSALLAGTITSGWWFGAGAALQIPFAMQMAYRFNGIGVTQNVLYENQKLIANQFNSAIGKIQDSLSSTASALGKLQDVVNQNAQALNTLVKQLSSNFGAISSVLNDILSRLDPPEAEVQIDRLITGRLQSLQTYVTQQLIRAAEIRWSANLAATKMSECVLGQSKRVDFCGKGYHLMSFPQSAPHGVVFLHVTYVPAQEKNFTTAPAICHDGKAHFPREGVFVSNGTHWFVTQRNFYEPQIITTDNTFVSGSCDVVIGIVNNTVYDPLQPELDSGGGGSDIIKLLNEQVNKEMQSSNLYMSMSSWCYTHSLDGAGLFLFDHAAEEYEHAKKLIIFLNENNVPVQLTSISAPEHKFEGLTQIFQKAYEHEQHISESINNIVDHAIKSKDHATFNFLQWYVAEQHEEEVLFKDILDKIELIGNENHGLYLADQYVKGIAKSRKS

SEQ ID NO: 8785 - protein, 1315 aa, Artificial Sequence
  SARS-CoV-2/Wuhan/HBCDC-HB-01/2019__EPI_ISL_402132 spike protein (1-1147)(K986P_V987P_T887W_A1020W) Ferritin construct
MFVFLVLLPLVSSQCVNLTTRTQLPPAYTNSITRGVYYPDKVFRSSVLHSTQDLFLPFFSNVTWFHAIHVSGTNGTKRFDNPVLPFNDGVYFASTEKSNIIRGWIFGTTLDSKTQSLLIVNNATNVVIKVCEFQFCNDPFLGVYYHKNNKSWMESEFRVYSSANNCTFEYVSQPFLMDLEGKQGNFKNLREFVFKNIDGYFKIYSKHTPINLVRDLPQGFSALEPLVDLPIGINITRFQTLLALHRSYLTPGDSSSGWTAGAAAYYVGYLQPRTFLLKYNENGTITDAVDCALDPLSETKCTLKSFTVEKGIYQTSNFRVQPTESIVRFPNITNLCPFGEVFNATRFASVYAWNRKRISNCVADYSVLYNSASFSTFKCYGVSPTKLNDLCFTNVYADSFVIRGDEVRQIAPGQTGKIADYNYKLPDDFTGCVIAWNSNNLDSKVGGNYNYLYRLFRKSNLKPFERDISTEIYQAGSTPCNGVEGFNCYFPLQSYGFQPTNGVGYQPYRVVVLSFELLHAPATVCGPKKSTNLVKNKCVNFNFNGLTGTGVLTESNKKFLPFQQFGRDIADTTDAVRDPQTLEILDITPCSFGGVSVITPGTNTSNQVAVLYQDVNCTEVPVAIHADQLTPTWRVYSTGSNVFQTRAGCLIGAEHVNNSYECDIPIGAGICASYQTQTNSPRRARSVASQSIIAYTMSLGAENSVAYSNNSIAIPTNFTISVTTEILPVSMTKTSVDCTMYICGDSTECSNLLLQYGSFCTQLNRALTGIAVEQDKNTQEVFAQVKQIYKTPPIKDFGGFNFSQILPDPSKPSKRSFIEDLLFNKVTLADAGFIKQYGDCLGDIAARDLICAQKFNGLTVLPPLLTDEMIAQYTSALLAGTITSGWWFGAGAALQIPFAMQMAYRFNGIGVTQNVLYENQKLIANQFNSAIGKIQDSLSSTASALGKLQDVVNQNAQALNTLVKQLSSNFGAISSVLNDILSRLDPPEAEVQIDRLITGRLQSLQTYVTQQLIRAAEIRWSANLAATKMSECVLGQSKRVDFCGKGYHLMSFPQSAPHGVVFLHVTYVPAQEKNFTTAPAICHDGKAHFPREGVFVSNGTHWFVTQRNFYEPQIITTDNTFVSGNCDVVIGIVNNTVYDPLQPELDSGGGGSDIIKLLNEQVNKEMQSSNLYMSMSSWCYTHSLDGAGLFLFDHAAEEYEHAKKLIIFLNENNVPVQLTSISAPEHKFEGLTQIFQKAYEHEQHISESINNIVDHAIKSKDHATFNFLQWYVAEQHEEEVLFKDILDKIELIGNENHGLYLADQYVKGIAKSRKS

SEQ ID NO: 8786 - protein, 1315 aa, Artificial Sequence
  SARS-CoV-2/Guangdong/20SF028/2020__EPI_ISL_403936 spike protein (1-1147)(K986P_V987P_T887W_A1020W) Ferritin construct
MFVFLVLLPLVSSQCVNLTTRTQLPPAYTNSFTRGVYYPDKVFRSSVLYSTQDLFLPFFSNVTWFHAIHVSGTNGTKRFDNPVLPFNDGVYFASTEKSNIIRGWIFGTTLDSKTQSLLIVNNATNVVIKVCEFQFCNDPFLGVYYHKNNKSWMESEFRVYSSANNCTFEYVSQPFLMDLEGKQGNFKNLREFVFKNIDGYFKIYSKHTPINLVRDLPQGFSALEPLVDLPIGINITRFQTLLALHRSYLTPGDSSSGWTAGAAAYYVGYLQPRTFLLKYNENGTITDAVDCALDPLSETKCTLKSFTVEKGIYQTSNFRVQPTESIVRFPNITNLCPFGEVFNATRFASVYAWNRKRISNCVADYSVLYNSASFSTFKCYGVSPTKLNDLCFTNVYADSFVIRGDEVRQIAPGQTGKIADYNYKLPDDFTGCVIAWNSNNLDSKVGGNYNYLYRLFRKSNLKPFERDISTEIYQAGSTPCNGVEGFNCYFPLQSYGFQPTNGVGYQPYRVVVLSFELLHAPATVCGPKKSTNLVKNKCVNFNFNGLTGTGVLTESNKKFLPFQQFGRDIADTTDAVRDPQTLEILDITPCSFGGVSVITPGTNTSNQVAVLYQDVNCTEVPVAIHADQLTPTWRVYSTGSNVFQTRAGCLIGAEHVNNSYECDIPIGAGICASYQTQTNSPRRARSVASQSIIAYTMSLGAENSVAYSNNSIAIPTNFTISVTTEILPVSMTKTSVDCTMYICGDSTECSNLLLQYGSFCTQLNRALTGIAVEQDKNTQEVFAQVKQIYKTPPIKDFGGFNFSQILPDPSKPSKRSFIEDLLFNKVTLADAGFIKQYGDCLGDIAARDLICAQKFNGLTVLPPLLTDEMIAQYTSALLAGTITSGWWFGAGAALQIPFAMQMAYRFNGIGVTQNVLYENQKLIANQFNSAIGKIQDSLSSTASALGKLQDVVNQNAQALNTLVKQLSSNFGAISSVLNDILSRLDPPEAEVQIDRLITGRLQSLQTYVTQQLIRAAEIRWSANLAATKMSECVLGQSKRVDFCGKGYHLMSFPQSAPHGVVFLHVTYVPAQEKNFTTAPAICHDGKAHFPREGVFVSNGTHWFVTQRNFYEPQIITTDNTFVSGNCDVVIGIVNNTVYDPLQPELDSGGGGSDIIKLLNEQVNKEMQSSNLYMSMSSWCYTHSLDGAGLFLFDHAAEEYEHAKKLIIFLNENNVPVQLTSISAPEHKFEGLTQIFQKAYEHEQHISESINNIVDHAIKSKDHATFNFLQWYVAEQHEEEVLFKDILDKIELIGNENHGLYLADQYVKGIAKSRKS

SEQ ID NO: 8787 - protein, 1315 aa, Artificial Sequence
  SARS-CoV-2/Shenzhen/SZTH-001/2020__EPI_ISL_406592 spike protein (1-1147)(K986P_V987P_T887W_A1020W) Ferritin construct
MFVFLVLLPLVSSQCVNLTTRTQLPPAYTNSFTRGVYYPDKVFRSSVLHSTQDLFLPFFSNVTWFHAIHVSGTNGTKRFDNPVLPFNDGVYFASTEKSNIIRGWIFGTTLDSKTQSLLIVNNATNVVIKVCEFQFCNDPFLGVYYHKNNKSWMESEFRVYSSANNCTFEYVSQPFLMDLEGKQGNFKNLREFVFKNIDGYFKIYSKHTPINLVRDLPQGFSALEPLVDLPIGINITRFQTLLALHRSYLTPGDSSSGWTAGAAAYYVGYLQPRTFLLKYNENGTITDAVDCALDPLSETKCTLKSFTVEKGIYQTSNFRVQPTESIVRFPNITNLCPFGEVFNATRFASVYAWNRKRISNCVADYSVLYNSASFSTFKCYGVSPTKLNDLCFTNVYADSFVIRGDEVRQIAPGQTGKIADYNYKLPDDFTGCVIAWNSNNLDSKVGGNYNYLYRLFRKSNLKPFERDISTEIYQAGSTPCNGVEGFNCYFPLQSYGFQPTNGVGYQPYRVVVLSFELLHAPATVCGPKKSTNLVKNKCVNFNFNGLTGTGVLTESNKKFLPFQQFGRDIADTTDAVRDPQTLEILDITPCSFGGVSVITPGTNTSNQVAVLYQDVNCTEVPVAIHADQLTPTWRVYSTGSNVFQTRAGCLIGAEHVNNSYECDIPIGAGICASYQTQTNSPRRARSVASQSIIAYTMSLGAENSVAYSNNSIAIPTNFTISVTTEILPVSMTKTSVDCTMYICGDSTECSNLLLQYGSFCTQLNRALTGIAVEQDKNTQEVFAQVKQIYKTPPIKDFGGFNFSQILPDPSKPSKRSFIEDLLFNKVTLADAGFIKQYGDCLGDIAARDLICAQKFNGLTVLPPLLTDEMIAQYTSALLAGTITSGWWFGAGAALQIPFAMQMAYRFNGIGVTQNVLYENQKLIANQFNSAIGKIQDSLSSTASALGKLQDVVNQNAQALNTLVKQLSSNFGAISSVLNDILSRLDPPEAEVQIDRLITGRLQSLQTYVTQQLIRAAEIRWSANLAATKMSECVLGQSKRVDFCGKGYHLMSFPQSAPHGVVFLHVTYVPAQEKNFTTAPAICHDGKAHFPREGVFVSNGTHWFVTQRNFYEPQIITTDNTFVSGNCDVLIGIVNNTVYDPLQPELDSGGGGSDIIKLLNEQVNKEMQSSNLYMSMSSWCYTHSLDGAGLFLFDHAAEEYEHAKKLIIFLNENNVPVQLTSISAPEHKFEGLTQIFQKAYEHEQHISESINNIVDHAIKSKDHATFNFLQWYVAEQHEEEVLFKDILDKIELIGNENHGLYLADQYVKGIAKSRKS

SEQ ID NO: 8788 - protein, 1315 aa, Artificial Sequence
  SARS-CoV-2/Shenzhen/SZTH-004/2020__EPI_ISL_406595 spike protein (1-1147)(K986P_V987P_T887W_A1020W) Ferritin construct
MFVFLVLLPLVSSQCVNLTTRTQLPPAYTNSFTRGVYYPDKVFRSSVLHSTQDLFLPFFSNVTWFHAIHVSGTNGTKRFDNPVLPFNDGVYFASTEKSNIIRGWIFGTTLDSKTQSLLIVNNATNVVIKVCEFQFCNDPFLGVYYHKNNKSWMESEFRVYSSANNCTFEYVSQPFLMDLEGKQGNFKNLREFVFKNIDGYFKIYSKHTPINLVRDLPQGFSALEPLVDLPIGINITRFQTLLALHRSYLTPGDSSSGWTAGAAAYYVGYLQPRTFLLKYNENGTITDAVDCALDPLSETKCTLKSFTVEKGIYQTSNFRVQPTESIVRFPNITNLCPFGEVFNATRFASVYAWDRKRISNCVAYYSVLYNSASFSTFKCYGVSPTKLNDLCFTNVYADSFVIRGDEVRQIAPGQTGKIADYNYKLPDDFTGCVIAWNSNNLDSKVGGNYNYLYRLFRKSNLKPFERDISTEIYQAGSTPCNGVEGFNCYFPLQSYGFQPTNGVGYQPYRVVVLSFELLHAPATVCGPKKSTNLVKNKCVNFNFNGLTGTGVLTESNKKFLPFQQFGRDIADTTDAVRDPQTLEILDITPCSFGGVSVITPGTNTSNQVAVLYQDVNCTEVPVAIHADQLTPTWRVYSTGSNVFQTRAGCLIGAEHVNNSYECDIPIGAGICASYQTQTNSPRRARSVASQSIIAYTMSLGAENSVAYSNNSIAIPTNFTISVTTEILPVSMTKTSVDCTMYICGDSTECSNLLLQYGSFCTQLNRALTGIAVEQDKNTQEVFAQVKQIYKTPPIKDFGGFNFSQILPDPSKPSKRSFIEDLLFNKVTLADAGFIKQYGDCLGDIAARDLICAQKFNGLTVLPPLLTDEMIAQYTSALLAGTITSGWWFGAGAALQIPFAMQMAYRFNGIGVTQNVLYENQKLIANQFNSAIGKIQDSLSSTASALGKLQDVVNQNAQALNTLVKQLSSNFGAISSVLNDILSRLDPPEAEVQIDRLITGRLQSLQTYVTQQLIRAAEIRWSANLAATKMSECVLGQSKRVDFCGKGYHLMSFPQSAPHGVVFLHVTYVPAQEKNFTTAPAICHDGKAHFPREGVFVSNGTHWFVTQRNFYEPQIITTDNTFVSGNCDVVIGIVNNTVYDPLQPELDSGGGGSDIIKLLNEQVNKEMQSSNLYMSMSSWCYTHSLDGAGLFLFDHAAEEYEHAKKLIIFLNENNVPVQLTSISAPEHKFEGLTQIFQKAYEHEQHISESINNIVDHAIKSKDHATFNFLQWYVAEQHEEEVLFKDILDKIELIGNENHGLYLADQYVKGIAKSRKS

SEQ ID NO: 8789 - protein, 1315 aa, Artificial Sequence
  SARS-CoV-2/France/IDF0372/2020__EPI_ISL_406596 spike protein (1-1147)(K986P_V987P_T887W_A1020W) Ferritin construct
MFVFLVLLPLVSSQCVNLTTRTQLPPAYTNSFTRGVYYPDKVFRSSVLHSTQDLFLPFFSNVTWFHAIHVSGTNGTKRFDNPVLPFNDGVYFASTEKSNIIRGWIFGTTLDSKTQSLLIVNNATNVVIKVCEFQFCNDPFLGVYYHKNNKSWMESEFRVYSSANNCTFEYVSQPFLMDLEGKQGNFKNLREFVFKNIDGYFKIYSKHTPINLVRDLPQGFSALEPLVDLPIGINITRFQTLLALHRSYLTPGDSSSGWTAGAAAYYVGYLQPRTFLLKYNENGTITDAVDCALDPLSETKCTLKSFTVEKGIYQTSNFRVQPTESIVRFPNITNLCPFGEVFNATRFASVYAWNRKRISNCVADYSFLYNSASFSTFKCYGVSPTKLNDLCFTNVYADSFVIRGDEVRQIAPGQTGKIADYNYKLPDDFTGCVIAWNSNNLDSKVGGNYNYLYRLFRKSNLKPFERDISTEIYQAGSTPCNGVEGFNCYFPLQSYGFQPTNGVGYQPYRVVVLSFELLHAPATVCGPKKSTNLVKNKCVNFNFNGLTGTGVLTESNKKFLPFQQFGRDIADTTDAVRDPQTLEILDITPCSFGGVSVITPGTNTSNQVAVLYQDVNCTEVPVAIHADQLTPTWRVYSTGSNVFQTRAGCLIGAEHVNNSYECDIPIGAGICASYQTQTNSPRRARSVASQSIIAYTMSLGAENSVAYSNNSIAIPTNFTISVTTEILPVSMTKTSVDCTMYICGDSTECSNLLLQYGSFCTQLNRALTGIAVEQDKNTQEVFAQVKQIYKTPPIKDFGGFNFSQILPDPSKPSKRSFIEDLLFNKVTLADAGFIKQYGDCLGDIAARDLICAQKFNGLTVLPPLLTDEMIAQYTSALLAGTITSGWWFGAGAALQIPFAMQMAYRFNGIGVTQNVLYENQKLIANQFNSAIGKIQDSLSSTASALGKLQDVVNQNAQALNTLVKQLSSNFGAISSVLNDILSRLDPPEAEVQIDRLITGRLQSLQTYVTQQLIRAAEIRWSANLAATKMSECVLGQSKRVDFCGKGYHLMSFPQSAPHGVVFLHVTYVPAQEKNFTTAPAICHDGKAHFPREGVFVSNGTHWFVTQRNFYEPQIITTDNTFVSGNCDVVIGIVNNTVYDPLQPELDSGGGGSDIIKLLNEQVNKEMQSSNLYMSMSSWCYTHSLDGAGLFLFDHAAEEYEHAKKLIIFLNENNVPVQLTSISAPEHKFEGLTQIFQKAYEHEQHISESINNIVDHAIKSKDHATFNFLQWYVAEQHEEEVLFKDILDKIELIGNENHGLYLADQYVKGIAKSRKS

SEQ ID NO: 8790 - protein, 1315 aa, Artificial Sequence
  SARS-CoV-2/Australia/VIC01/2020__EPI_ISL_406844 spike protein (1-1147)(K986P_V987P_T887W_A1020W) Ferritin construct
MFVFLVLLPLVSSQCVNLTTRTQLPPAYTNSFTRGVYYPDKVFRSSVLHSTQDLFLPFFSNVTWFHAIHVSGTNGTKRFDNPVLPFNDGVYFASTEKSNIIRGWIFGTTLDSKTQSLLIVNNATNVVIKVCEFQFCNDPFLGVYYHKNNKSWMESEFRVYSSANNCTFEYVSQPFLMDLEGKQGNFKNLREFVFKNIDGYFKIYSKHTPINLVRDLPQGFSALEPLVDLPIGINITRFQTLLALHRRYLTPGDSSSGWTAGAAAYYVGYLQPRTFLLKYNENGTITDAVDCALDPLSETKCTLKSFTVEKGIYQTSNFRVQPTESIVRFPNITNLCPFGEVFNATRFASVYAWNRKRISNCVADYSVLYNSASFSTFKCYGVSPTKLNDLCFTNVYADSFVIRGDEVRQIAPGQTGKIADYNYKLPDDFTGCVIAWNSNNLDSKVGGNYNYLYRLFRKSNLKPFERDISTEIYQAGSTPCNGVEGFNCYFPLQSYGFQPTNGVGYQPYRVVVLSFELLHAPATVCGPKKSTNLVKNKCVNFNFNGLTGTGVLTESNKKFLPFQQFGRDIADTTDAVRDPQTLEILDITPCSFGGVSVITPGTNTSNQVAVLYQDVNCTEVPVAIHADQLTPTWRVYSTGSNVFQTRAGCLIGAEHVNNSYECDIPIGAGICASYQTQTNSPRRARSVASQSIIAYTMSLGAENSVAYSNNSIAIPTNFTISVTTEILPVSMTKTSVDCTMYICGDSTECSNLLLQYGSFCTQLNRALTGIAVEQDKNTQEVFAQVKQIYKTPPIKDFGGFNFSQILPDPSKPSKRSFIEDLLFNKVTLADAGFIKQYGDCLGDIAARDLICAQKFNGLTVLPPLLTDEMIAQYTSALLAGTITSGWWFGAGAALQIPFAMQMAYRFNGIGVTQNVLYENQKLIANQFNSAIGKIQDSLSSTASALGKLQDVVNQNAQALNTLVKQLSSNFGAISSVLNDILSRLDPPEAEVQIDRLITGRLQSLQTYVTQQLIRAAEIRWSANLAATKMSECVLGQSKRVDFCGKGYHLMSFPQSAPHGVVFLHVTYVPAQEKNFTTAPAICHDGKAHFPREGVFVSNGTHWFVTQRNFYEPQIITTDNTFVSGNCDVVIGIVNNTVYDPLQPELDSGGGGSDIIKLLNEQVNKEMQSSNLYMSMSSWCYTHSLDGAGLFLFDHAAEEYEHAKKLIIFLNENNVPVQLTSISAPEHKFEGLTQIFQKAYEHEQHISESINNIVDHAIKSKDHATFNFLQWYVAEQHEEEVLFKDILDKIELIGNENHGLYLADQYVKGIAKSRKS

SEQ ID NO: 8791 - protein, 1315 aa, Artificial Sequence
  SARS-CoV-2/Germany/BavPat1/2020__EPI_ISL_406862 spike protein (1-1147)(K986P_V987P_T887W_A1020W) Ferritin construct
MFVFLVLLPLVSSQCVNLTTRTQLPPAYTNSFTRGVYYPDKVFRSSVLHSTQDLFLPFFSNVTWFHAIHVSGTNGTKRFDNPVLPFNDGVYFASTEKSNIIRGWIFGTTLDSKTQSLLIVNNATNVVIKVCEFQFCNDPFLGVYYHKNNKSWMESEFRVYSSANNCTFEYVSQPFLMDLEGKQGNFKNLREFVFKNIDGYFKIYSKHTPINLVRDLPQGFSALEPLVDLPIGINITRFQTLLALHRSYLTPGDSSSGWTAGAAAYYVGYLQPRTFLLKYNENGTITDAVDCALDPLSETKCTLKSFTVEKGIYQTSNFRVQPTESIVRFPNITNLCPFGEVFNATRFASVYAWNRKRISNCVADYSVLYNSASFSTFKCYGVSPTKLNDLCFTNVYADSFVIRGDEVRQIAPGQTGKIADYNYKLPDDFTGCVIAWNSNNLDSKVGGNYNYLYRLFRKSNLKPFERDISTEIYQAGSTPCNGVEGFNCYFPLQSYGFQPTNGVGYQPYRVVVLSFELLHAPATVCGPKKSTNLVKNKCVNFNFNGLTGTGVLTESNKKFLPFQQFGRDIADTTDAVRDPQTLEILDITPCSFGGVSVITPGTNTSNQVAVLYQGVNCTEVPVAIHADQLTPTWRVYSTGSNVFQTRAGCLIGAEHVNNSYECDIPIGAGICASYQTQTNSPRRARSVASQSIIAYTMSLGAENSVAYSNNSIAIPTNFTISVTTEILPVSMTKTSVDCTMYICGDSTECSNLLLQYGSFCTQLNRALTGIAVEQDKNTQEVFAQVKQIYKTPPIKDFGGFNFSQILPDPSKPSKRSFIEDLLFNKVTLADAGFIKQYGDCLGDIAARDLICAQKFNGLTVLPPLLTDEMIAQYTSALLAGTITSGWWFGAGAALQIPFAMQMAYRFNGIGVTQNVLYENQKLIANQFNSAIGKIQDSLSSTASALGKLQDVVNQNAQALNTLVKQLSSNFGAISSVLNDILSRLDPPEAEVQIDRLITGRLQSLQTYVTQQLIRAAEIRWSANLAATKMSECVLGQSKRVDFCGKGYHLMSFPQSAPHGVVFLHVTYVPAQEKNFTTAPAICHDGKAHFPREGVFVSNGTHWFVTQRNFYEPQIITTDNTFVSGNCDVVIGIVNNTVYDPLQPELDSGGGGSDIIKLLNEQVNKEMQSSNLYMSMSSWCYTHSLDGAGLFLFDHAAEEYEHAKKLIIFLNENNVPVQLTSISAPEHKFEGLTQIFQKAYEHEQHISESINNIVDHAIKSKDHATFNFLQWYVAEQHEEEVLFKDILDKIELIGNENHGLYLADQYVKGIAKSRKS

SEQ ID NO: 8792 - protein, 1315 aa, Artificial Sequence
  SARS-CoV-2/Wuhan/HBCDC-HB-02/2020__EPI_ISL_412978 spike protein (1-1147)(K986P_V987P_T887W_A1020W) Ferritin construct
MFVFLVLLPLVSSQCVNLTTRTQLPPAYTNSFTRGVYYPDKVFRSSVLHSTQDLFLPFFSNVTWFHAIHVSGTNGTKRFDNPVLPFNDGVYFASTEKSNIIRGWIFGTTLDSKTQSLLIVNNATNVVIKVCEFQFCNDPFLGVYYHKNNKSWMESEFRVYSSANNCTFEYVSQPFLMDLEGKQGNFKNLREFVFKNIDGYFKIYSKHTPINLVRDLPQGFSALEPLVDLPIGINITRFQTLLALHRSYLTPGDSSSGWTAGAAAYYVGYLQPRTFLLKYNENGTITDAVDCALDPLSETKCTLKSFTVEKGIYQTSNFRVQPTESIVRFPNITNLCPFGEVFNATRFASVYAWNRKRISNCVADYSVLYNSASFSTFKCYGVSPTKLNDLCFTNVYADSFVIRGDEVRQIAPGQTGKIADYNYKLPDDFTGCVIAWNSNNLDSKVGGNYNYLYRLFRKSNLKPFERDISTEIYQAGSTPCNGVEGFNCYFPLQSYGFQPTNGVGYQPYRVVVLSFELLHAPATVCGPKKSTNLVKNKCVNFNFNGLTGTGVLTESNKKFLPFQQFGRDIADTTDAVRDPQTLEILDITPCSFGGVSVITPGTNTSNQVAVLYQDVNCTEVPVAIHADQLTPTWRVYSTGSNVFQTRAGCLIGAEHVNNSYECDIPIGAGICASYQTQTNSPRRARSVASQSIIAYTMSLGAENSVAYSNNSIAIPTNFTISVTTEILPVSMTKTSVDCTMYICGDSTECSNFLLQYGSFCTQLNRALTGIAVEQDKNTQEVFAQVKQIYKTPPIKDFGGFNFSQILPDPSKPSKRSFIEDLLFNKVTLADAGFIKQYGDCLGDIAARDLICAQKFNGLTVLPPLLTDEMIAQYTSALLAGTITSGWWFGAGAALQIPFAMQMAYRFNGIGVTQNVLYENQKLIANQFNSAIGKIQDSLSSTASALGKLQDVVNQNAQALNTLVKQLSSNFGAISSVLNDILSRLDPPEAEVQIDRLITGRLQSLQTYVTQQLIRAAEIRWSANLAATKMSECVLGQSKRVDFCGKGYHLMSFPQSAPHGVVFLHVTYVPAQEKNFTTAPAICHDGKAHFPREGVFVSNGTHWFVTQRNFYEPQIITTDNTFVSGNCDVVIGIVNNTVYDPLQPELDSGGGGSDIIKLLNEQVNKEMQSSNLYMSMSSWCYTHSLDGAGLFLFDHAAEEYEHAKKLIIFLNENNVPVQLTSISAPEHKFEGLTQIFQKAYEHEQHISESINNIVDHAIKSKDHATFNFLQWYVAEQHEEEVLFKDILDKIELIGNENHGLYLADQYVKGIAKSRKS

SEQ ID NO: 8793 - protein, 1315 aa, Artificial Sequence
  SARS-CoV-2/Australia/QLD02/2020__EPI_ISL_407896 spike protein (1-1147)(K986P_V987P_T887W_A1020W) Ferritin construct
MFVFLVLLPLVSSQCVNLTTRTQLPPAYTNSFTRGVYYPDKVFRSSVLHSTQDLFLPFFSNVTWFHAIHVSGTNGTKRFDNPVLPFNDGVYFASTEKSNIIRGWIFGTTLDSKTQSLLIVNNATNVVIKVCEFQFCNDPFLGVYYHKNNKSWMESEFRVYSSANNCTFEYVSQPFLMDLEGKQGNFKNLREFVFKNIDGYFKIYSKHTPINLVRDLPQGFSALEPLVDLPIGINITRFQTLLALHRSYLTPGDSSSGWTAGAAAYYVGYLQPRTFLLKYNENGTITDAVDCALDPLSETKCTLKSFTVEKGIYQTSNFRVQPTESIVRFPNITNLCPFGEVFNATRFASVYAWNRKRISNCVADYSVLYNSASFSTFKCYGVSPTKLNDLCFTNVYADSFVIRGDEVRQIAPGQTGKIADYNYKLPDDFTGCVIAWNSNNLDSKVGGNYNYLYRLFRKSNLKPFERDISTEIYQAGSTPCNGVEGFNCYFPLQSYGFQPTNGVGYQPYRVVVLSFELLHAPATVCGPKKSTNLVKNKCVNFNFNGLTGTGVLTESNKKFLPFQQFGRDIADTTDAVRDPQTLEILDITPCSFGGVSVITPGTNTSNQVAVLYQDVNCTEVPVAIHADQLTPTWRVYSTGSNVFQTRAGCLIGAEHVNNSYECDIPIGAGICASYQTQTNSPRRARSVASQSIIAYTMSLGAENSVAYSNNSIAIPTNFTISVTTEILPVSMTKTSVDCTMYICGDSTECSNLLLQYGSFCTQLNRALTGIAVEQDKNTQEVFAQVKQIYKTPPIKDFGGFNFSQILPDPSKPSKRSFIEDLLFNKVTLADAGFIKQYGDCLGDIAARDLICAQKFNGLTVLPPLLTDEMIAQYTSALLAGTITSGWWFGAGAALQIPFAMQMAYRFNGIGVTQNVLYENQKLIANQFNSAIGKIQDSLSSTASALGKLQDVVNQNAQALNTLVKQLSSNFGAISSVLNDILSRLDPPEAEVQIDRLITGRLQSLQTYVTQQLIRAAEIRWSANLAATKMSECVLGQSKRVDFCGKGYHLMSFPQSAPHGVVFLHVTYVPAQEKNFTTAPAICHDGKAHFPREGVFVSNGTHWFVTQRNFYEPQIITTDNTFVSGNCDVVIGIVNNTVYDPLQLELDSGGGGSDIIKLLNEQVNKEMQSSNLYMSMSSWCYTHSLDGAGLFLFDHAAEEYEHAKKLIIFLNENNVPVQLTSISAPEHKFEGLTQIFQKAYEHEQHISESINNIVDHAIKSKDHATFNFLQWYVAEQHEEEVLFKDILDKIELIGNENHGLYLADQYVKGIAKSRKS

SEQ ID NO: 8794 - protein, 1315 aa, Artificial Sequence
  SARS-CoV-2/India/1-31/2020__EPI_ISL_413523 spike protein (1-1147)(K986P_V987P_T887W_A1020W) Ferritin construct
MFVFLVLLPLVSSQCVNLTTRTQLPPAYTNSFTRGVYYPDKVFRSSVLHSTQDLFLPFFSNVTWFHAIHVSGTNGTKRFDNPVLPFNDGVYFASTEKSNIIRGWIFGTTLDSKTQSLLIVNNATNVVIKVCEFQFCNDPFLGVYYHKNNKSWMESEFRVYSSANNCTFEYVSQPFLMDLEGKQGNFKNLREFVFKNIDGYFKIYSKHTPINLVRDLPQGFSALEPLVDLPIGINITRFQTLLALHRSYLTPGDSSSGWTAGAAAYYVGYLQPRTFLLKYNENGTITDAVDCALDPLSETKCTLKSFTVEKGIYQTSNFRVQPTESIVRFPNITNLCPFGEVFNATRFASVYAWNRKRISNCVADYSVLYNSASFSTFKCYGVSPTKLNDLCFTNVYADSFVIRGDEVRQIAPGQTGKIADYNYKLPDDFTGCVIAWNSNNLDSKVGGNYNYLYRLFRKSNLKPFERDISTEIYQAGSTPCNGVEGFNCYFPLQSYGFQPTNGVGYQPYRVVVLSFELLHAPATVCGPKKSTNLVKNKCVNFNFNGLTGTGVLTESNKKFLPFQQFGRDIADTTDAVRDPQTLEILDITPCSFGGVSVITPGTNTSNQVAVLYQDVNCTEVPVAIHADQLTPTWRVYSTGSNVFQTRAGCLIGAEHVNNSYECDIPIGAGICASYQTQTNSPRRARSVASQSIIAYTMSLGAENSVAYSNNSIAIPTNFTISVTTEILPVSMTKTSVDCTMYICGDSTECSNLLLQYGSFCTQLNRALTGIAVEQDKNTQEVFAQVKQIYKTPPIKDFGGFNFSQILPDPSKPSKRSFIEDLLFNKVTLADAGFIKQYGDCLGDIAARDLICAQKFNGLTVLPPLLTDEMIAQYTSALLAGTITSGWWFGAGAALQIPFAMQMAYRFNGIGVTQNVLYENQKLIANQFNSVIGKIQDSLSSTASALGKLQDVVNQNAQALNTLVKQLSSNFGAISSVLNDILSRLDPPEAEVQIDRLITGRLQSLQTYVTQQLIRAAEIRWSANLAATKMSECVLGQSKRVDFCGKGYHLMSFPQSAPHGVVFLHVTYVPAQEKNFTTAPAICHDGKAHFPREGVFVSNGTHWFVTQRNFYEPQIITTDNTFVSGNCDVVIGIVNNTVYDPLQPELDSGGGGSDIIKLLNEQVNKEMQSSNLYMSMSSWCYTHSLDGAGLFLFDHAAEEYEHAKKLIIFLNENNVPVQLTSISAPEHKFEGLTQIFQKAYEHEQHISESINNIVDHAIKSKDHATFNFLQWYVAEQHEEEVLFKDILDKIELIGNENHGLYLADQYVKGIAKSRKS

SEQ ID NO: 8795 - protein, 1315 aa, Artificial Sequence
  SARS-CoV-2/Guangdong/GD2020087-P0008/2020__EPI_ISL_413863 spike protein (1-1147)(K986P_V987P_T887W_A1020W) Ferritin construct
MFVFLVLLPLVSSQCVNLTTRTQLPPAYTNSFTRGVYYPDKVFRSSVLHSTQDLFLPFFSNVTWFHAIHVSGTNGTKRFDNPVLPFNDGVYFASTEKSNIIRGWIFGTTLDSKTQSLLIVNNATNVVIKVCEFQFCNDPFLGVYYHKNNKSWMESEFRVYSSANNCTFEYVSQPFLMDLEGKQGNFKNLREFVFKNIDGYFKIYSKHTPINLVRDLPQGFSALEPLVDLPIGINITRFQTLLALHRSYLTPGDSSSGWTAGAAAYYVGYLQPRTFLLKYNENGTITDAVDCALDPLSETKCTLKSFTVEKGIYQTSNFRVQPTESIVRFPNITNLCPFGEVFNATRFASVYAWNRKRISNCVADYSVLYNSASFSTFKCYGVSPTKLNDLCFTNVYADSFVIRGDEVREIAPGQTGKIADYNYKLPDDFTGCVIAWNSNNLDSKVGGNYNYLYRLFRKSNLKPFERDISTEIYQAGSTPCNGVEGFNCYFPLQSYGFQPTNGVGYQPYRVVVLSFELLHAPATVCGPKKSTNLVKNKCVNFNFNGLTGTGVLTESNKKFLPFQQFGRDIADTTDAVRDPQTLEILDITPCSFGGVSVITPGTNTSNQVAVLYQDVNCTEVPVAIHADQLTPTWRVYSTGSNVFQTRAGCLIGAEHVNNSYECDIPIGAGICASYQTQTNSPRRARSVASQSIIAYTMSLGAENSVAYSNNSIAIPTNFTISVTTEILPVSMTKTSVDCTMYICGDSTECSNLLLQYGSFCTQLNRALTGIAVEQDKNTQEVFAQVKQIYKTPPIKDFGGFNFSQILPDPSKPSKRSFIEDLLFNKVTLADAGFIKQYGDCLGDIAARDLICAQKFNGLTVLPPLLTDEMIAQYTSALLAGTITSGWWFGAGAALQIPFAMQMAYRFNGIGVTQNVLYENQKLIANQFNSAIGKIQDSLSSTASALGKLQDVVNQNAQALNTLVKQLSSNFGAISSVLNDILSRLDPPEAEVQIDRLITGRLQSLQTYVTQQLIRAAEIRWSANLAATKMSECVLGQSKRVDFCGKGYHLMSFPQSAPHGVVFLHVTYVPAQEKNFTTAPAICHDGKAHFPREGVFVSNGTHWFVTQRNFYEPQIITTDNTFVSGNCDVVIGIVNNTVYDPLQPELDSGGGGSDIIKLLNEQVNKEMQSSNLYMSMSSWCYTHSLDGAGLFLFDHAAEEYEHAKKLIIFLNENNVPVQLTSISAPEHKFEGLTQIFQKAYEHEQHISESINNIVDHAIKSKDHATFNFLQWYVAEQHEEEVLFKDILDKIELIGNENHGLYLADQYVKGIAKSRKS

SEQ ID NO: 8796 - protein, 1315 aa, Artificial Sequence
  SARS-CoV-2/Sweden/01/2020__EPI_ISL_411951 spike protein (1-1147)(K986P_V987P_T887W_A1020W) Ferritin construct
MFVFLVLLPLVSSQCVNLTTRTQLPPAYTNSFTRGVYYPDKVFRSSVLHSTQDLFLPFFSNVTWFHAIHVSGTNGTKRFDNPVLPFNDGVYFASTEKSNIIRGWIFGTTLDSKTQSLLIVNNATNVVIKVCEFQFCNDPFLGVYYHKNNKSWMESEFRVYSSANNCTFEYVSQPFLMDLEGKQGNFKNLREFVFKNIDGYFKIYSKHTPINLVRDLPQGFSALEPLVDLPIGINITRFQTLLALHRSYLTPGDSSSGWTAGAAAYYVGYLQPRTFLLKYNENGTITDAVDCALDPLSETKCTLKSFTVEKGIYQTSNFRVQPTESIVRFPNITNLCPFGEVFNATRFASVYAWNRKRISNCVADYSVLYNSASFSTFKCYGVSPTKLNDLCFTNVYADSFVIRGDEVRQIAPGQTGKIADYNYKLPDDFTGCVIAWNSNNLDSKVGGNYNYLYRLFRKSNLKPFERDISTEIYQAGSTPCNGVEGFNCYFPLQSYGFQPTNGVGYQPYRVVVLSFELLHAPATVCGPKKSTNLVKNKCVNFNFNGLTGTGVLTESNKKFLPFQQFGRDIADTTDAVRDPQTLEILDITPCSFGGVSVITPGTNTSNQVAVLYQDVNCTEVPVAIHADQLTPTWRVYSTGSNVFQTRAGCLIGAEHVNNSYECDIPIGAGICASYQTQTNSPRRARSVASQSIIAYTMSLGAENSVAYSNNSIAIPTNFTISVTTEILPVSMTKTSVDCTMYICGDSTECSNLLLQYGSFCTQLNRALTGIAVEQDKNTQEVFAQVKQIYKTPPIKDCGGFNFSQILPDPSKPSKRSFIEDLLFNKVTLADAGFIKQYGDCLGDIAARDLICAQKFNGLTVLPPLLTDEMIAQYTSALLAGTITSGWWFGAGAALQIPFAMQMAYRFNGIGVTQNVLYENQKLIANQFNSAIGKIQDSLSSTASALGKLQDVVNQNAQALNTLVKQLSSNFGAISSVLNDILSRLDPPEAEVQIDRLITGRLQSLQTYVTQQLIRAAEIRWSANLAATKMSECVLGQSKRVDFCGKGYHLMSFPQSAPHGVVFLHVTYVPAQEKNFTTAPAICHDGKAHFPREGVFVSNGTHWFVTQRNFYEPQIITTDNTFVSGNCDVVIGIVNNTVYDPLQPELDSGGGGSDIIKLLNEQVNKEMQSSNLYMSMSSWCYTHSLDGAGLFLFDHAAEEYEHAKKLIIFLNENNVPVQLTSISAPEHKFEGLTQIFQKAYEHEQHISESINNIVDHAIKSKDHATFNFLQWYVAEQHEEEVLFKDILDKIELIGNENHGLYLADQYVKGIAKSRKS

SEQ ID NO: 8797 - protein, 1315 aa, Artificial Sequence
  SARS-CoV-2/Tianmen/HBCDC-HB-07/2020__EPI_ISL_412983 spike protein (1-1147)(K986P_V987P_T887W_A1020W) Ferritin construct
MFVFLVLLPLVSSQCVNLTTRTQLPPAYTNSFTRGVYYPDKVFRSSVLHSTQDLFLPFFSNVTWFHAIHVSGTNGTKRFDNPVLPFNDGVYFASTEKSNIIRGWIFGTTLDSKTQSLLIVNNATNVVIKVCEFQFCNDPFLGVYYHKNNKSWMESEFRVYSSANNCTFEYVSQPFLMDLEGKQGNFKNLREFVFKNIDGYFKIYSKHTPINLVRDLPQGFSALEPLVDLPIGINITRFQTLLALHRSYLTPGDSSSGWTAGAAAYYVGYLQPRTFLLKYNENGTITDAVDCALDPLSETKCTLKSFTVEKGIYQTSNFRVQPTESIVRFPNITNLCPFGEVFNATRFASVYAWNRKRISNCVADYSVLYNSASFSTFKCYGVSPTKLNDLCFTNVYADSFVIRGDEVRQIAPGQTGKIADYNYKLPDDFTGCVIAWNSNNLDSKVGGNYNYLYRLFRKSNLKPFERDISTEIYQAGSTPCNGVEGFNCYFPLQSYGFQPTNGVGYQPYRVVVLSFELLHAPATVCGPKKSTNLVKNKCVNFNFNGLTGTGVLTESNKKFLPFQQFGRDIADTTDAVRDPQTLEILDITPCSFGGVSVITPGTNTSNQVAVLYQDLNCTEVPVAIHADQLTPTWRVYSTGSNVFQTRAGCLIGAEHVNNSYECDIPIGAGICASYQTQTNSPRRARSVASQSIIAYTMSLGAENSVAYSNNSIAIPTNFTISVTTEILPVSMTKTSVDCTMYICGDSTECSNLLLQYGSFCTQLNRALTGIAVEQDKNTQEVFAQVKQIYKTPPIKDFGGFNFSQILPDPSKPSKRSFIEDLLFNKVTLADAGFIKQYGDCLGDIAARDLICAQKFNGLTVLPPLLTDEMIAQYTSALLAGTITSGWWFGAGAALQIPFAMQMAYRFNGIGVTQNVLYENQKLIANQFNSAIGKIQDSLSSTASALGKLQDVVNQNAQALNTLVKQLSSNFGAISSVLNDILSRLDPPEAEVQIDRLITGRLQSLQTYVTQQLIRAAEIRWSANLAATKMSECVLGQSKRVDFCGKGYHLMSFPQSAPHGVVFLHVTYVPAQEKNFTTAPAICHDGKAHFPREGVFVSNGTHWFVTQRNFYEPQIITTDNTFVSGNCDVVIGIVNNTVYDPLQPELDSGGGGSDIIKLLNEQVNKEMQSSNLYMSMSSWCYTHSLDGAGLFLFDHAAEEYEHAKKLIIFLNENNVPVQLTSISAPEHKFEGLTQIFQKAYEHEQHISESINNIVDHAIKSKDHATFNFLQWYVAEQHEEEVLFKDILDKIELIGNENHGLYLADQYVKGIAKSRKS

SEQ ID NO: 8798 - protein, 1315 aa, Artificial Sequence
  SARS-CoV-2/Hong Kong/case42_VM20002493/2020__EPI_ISL_414527 spike protein (1-1147)(K986P_V987P_T887W_A1020W) Ferritin construct
MFVFLVLLPLVSSQCVNLTTRTQLPPAYTNSFTRGVYYPDKVFRSSVLHSTQDLFLPFFSNVTWFHAIHVSGTNGTKRFDNPVLPFNDGVYFASTEKSNIIRGWIFGTTLDSKTQSLLIVNNATNVVIKVCEFQFCNDPFLGVYYHKNNKSWMESEFRVYSSANNCTFEYVSQPFLMDLEGKQGNFKNLREFVFKNIDGYFKIYSKHTPINLVRDLPQGFSALEPLVDLPIGINITRFQTLLALHRSYLTPGDSSSGWTAGAAAYYVGYLQPRTFLLKYNENGTITDAVDCALDPLSETKCTLKSFTVEKGIYQTSNFRVQPTESIVRFPNITNLCPFGEVFNATRFASVYAWNRKRISNCVADYSVLYNSASFSTFKCYGVSPTKLNDLCFTNVYADSFVIRGDEVRQIAPGQTGKIADYNYKLPDDFTGCVIAWNSNNLDSKVGGNYNYLYRLFRKSNLKPFERDISTEIYQAGSTPCNGVEGFNCYFPLQSYGFQPTNGVGYQPYRVVVLSFELLHAPATVCGPKKSTNLVKNKCVNFNFNGLTGTGVLTESNKKFLPFQQFGRDIADTTDAVRDPQTLEILDITPCSFGGVSVITPGTNTSNQVAVLYQDVNCTEVPVAIHADQLTPTWRVYSTGSNVFQTRAGCLIGAEHVNNSYECDIPIGAGICASYQTQTNSPRRARSVASQSIIAYTMSLGAENSVAYSNNSIAIPTNFAISVTTEILPVSMTKTSVDCTMYICGDSTECSNLLLQYGSFCTQLNRALTGIAVEQDKNTQEVFAQVKQIYKTPPIKDFGGFNFSQILPDPSKPSKRSFIEDLLFNKVTLADAGFIKQYGDCLGDIAARDLICAQKFNGLTVLPPLLTDEMIAQYTSALLAGTITSGWWFGAGAALQIPFAMQMAYRFNGIGVTQNVLYENQKLIANQFNSAIGKIQDSLSSTASALGKLQDVVNQNAQALNTLVKQLSSNFGAISSVLNDILSRLDPPEAEVQIDRLITGRLQSLQTYVTQQLIRAAEIRWSANLAATKMSECVLGQSKRVDFCGKGYHLMSFPQSAPHGVVFLHVTYVPAQEKNFTTAPAICHDGKAHFPREGVFVSNGTHWFVTQRNFYEPQIITTDNTFVSGNCDVVIGIVNNTVYDPLQPELDSGGGGSDIIKLLNEQVNKEMQSSNLYMSMSSWCYTHSLDGAGLFLFDHAAEEYEHAKKLIIFLNENNVPVQLTSISAPEHKFEGLTQIFQKAYEHEQHISESINNIVDHAIKSKDHATFNFLQWYVAEQHEEEVLFKDILDKIELIGNENHGLYLADQYVKGIAKSRKS

SEQ ID NO: 8799 - protein, 1315 aa, Artificial Sequence
  SARS-CoV-2/USA/CruiseA-23/2020__EPI_ISL_414482 spike protein (1-1147)(K986P_V987P_T887W_A1020W) Ferritin construct
MFVFLVLLPLVSSQCVNLTTRTQLPPAYTNSFTRGVYYPDKVFRSSVLHSTQDLFLPFFSNVTWFHAIHVSGTNGTKRFDNPVLPFNDGVYFASTEKSNIIRGWIFGTTLDSKTQSLLIVNNATNVVIKVCEFQFCNDPFLGVYYHKNNKSWMESEFRVYSSANNCTFEYVSQPFLMDLEVKQGNFKNLREFVFKNIDGYFKIYSKHTPINLVRDLPQGFSALEPLVDLPIGINITRFQTLLALHRSYLTPGDSSSGWTAGAAAYYVGYLQPRTFLLKYNENGTITDAVDCALDPLSETKCTLKSFTVEKGIYQTSNFRVQPTESIVRFPNITNLCPFGEVFNATRFASVYAWNRKRISNCVADYSVLYNSASFSTFKCYGVSPTKLNDLCFTNVYADSFVIRGDEVRQIAPGQTGKIADYNYKLPDDFTGCVIAWNSNNLDSKVGGNYNYLYRLFRKSNLKPFERDISTEIYQAGSTPCNGVEGFNCYFPLQSYGFQPTNGVGYQPYRVVVLSFELLHAPATVCGPKKSTNLVKNKCVNFNFNGLTGTGVLTESNKKFLPFQQFGRDIADTTDAVRDPQTLEILDITPCSFGGVSVITPGTNTSNQVAVLYQDVNCTEVPVAIHADQLTPTWRVYSTGSNVFQTRAGCLIGAEHVNNSYECDIPIGAGICASYQTQTNSPRRARSVASQSIIAYTMSLGAENSVAYSNNSIAIPTNFTISVTTEILPVSMTKTSVDCTMYICGDSTECSNLLLQYGSFCTQLNRALTGIAVEQDKNTQEVFAQVKQIYKTPPIKDFGGFNFSQILPDPSKPSKRSFIEDLLFNKVTLADAGFIKQYGDCLGDIAARDLICAQKFNGLTVLPPLLTDEMIAQYTSALLAGTITSGWWFGAGAALQIPFAMQMAYRFNGIGVTQNVLYENQKLIANQFNSAIGKIQDSLSSTASALGKLQDVVNQNAQALNTLVKQLSSNFGAISSVLNDILSRLDPPEAEVQIDRLITGRLQSLQTYVTQQLIRAAEIRWSANLAATKMSECVLGQSKRVDFCGKGYHLMSFPQSAPHGVVFLHVTYVPAQEKNFTTAPAICHDGKAHFPREGVFVSNGTHWFVTQRNFYEPQIITTDNTFVSGNCDVVIGIVNNTVYDPLQPELDSGGGGSDIIKLLNEQVNKEMQSSNLYMSMSSWCYTHSLDGAGLFLFDHAAEEYEHAKKLIIFLNENNVPVQLTSISAPEHKFEGLTQIFQKAYEHEQHISESINNIVDHAIKSKDHATFNFLQWYVAEQHEEEVLFKDILDKIELIGNENHGLYLADQYVKGIAKSRKS

SEQ ID NO: 8800 - protein, 1315 aa, Artificial Sequence
  SARS-CoV-2/Hong Kong/case85_VM20002868/2020__EPI_ISL_414519 spike protein (1-1147)(K986P_V987P_T887W_A1020W) Ferritin construct
MFVFLVLVPLVSSQCVNLTTRTQLPPAYTNSFTRGVYYPDKVFRSSVLHSTQDLFLPFFSNVTWFHAIHVSGTNGTKRFDNPVLPFNDGVYFASTEKSNIIRGWIFGTTLDSKTQSLLIVNNATNVVIKVCEFQFCNDPFLGVYYHKNNKSWMESEFRVYSSANNCTFEYVSQPFLMDLEGKQGNFKNLREFVFKNIDGYFKIYSKHTPINLVRDLPQGFSALEPLVDLPIGINITRFQTLLALHRSYLTPGDSSSGWTAGAAAYYVGYLQPRTFLLKYNENGTITDAVDCALDPLSETKCTLKSFTVEKGIYQTSNFRVQPTESIVRFPNITNLCPFGEVFNATRFASVYAWNRKRISNCVADYSVLYNSASFSTFKCYGVSPTKLNDLCFTNVYADSFVIRGDEVRQIAPGQTGKIADYNYKLPDDFTGCVIAWNSNNLDSKVGGNYNYLYRLFRKSNLKPFERDISTEIYQAGSTPCNGVEGFNCYFPLQSYGFQPTNGVGYQPYRVVVLSFELLHAPATVCGPKKSTNLVKNKCVNFNFNGLTGTGVLTESNKKFLPFQQFGRDIADTTDAVRDPQTLEILDITPCSFGGVSVITPGTNTSNQVAVLYQDVNCTEVPVAIHADQLTPTWRVYSTGSNVFQTRAGCLIGAEHVNNSYECDIPIGAGICASYQTQTNSPRRARSVASQSIIAYTMSLGAENSVAYSNNSIAIPTNFTISVTTEILPVSMTKTSVDCTMYICGDSTECSNLLLQYGSFCTQLNRALTGIAVEQDKNTQEVFAQVKQIYKTPPIKDFGGFNFSQILPDPSKPSKRSFIEDLLFNKVTLADAGFIKQYGDCLGDIAARDLICAQKFNGLTVLPPLLTDEMIAQYTSALLAGTITSGWWFGAGAALQIPFAMQMAYRFNGIGVTQNVLYENQKLIANQFNSAIGKIQDSLSSTASALGKLQDVVNQNAQALNTLVKQLSSNFGAISSVLNDILSRLDPPEAEVQIDRLITGRLQSLQTYVTQQLIRAAEIRWSANLAATKMSECVLGQSKRVDFCGKGYHLMSFPQSAPHGVVFLHVTYVPAQEKNFTTAPAICHDGKAHFPREGVFVSNGTHWFVTQRNFYEPQIITTDNTFVSGNCDVVIGIVNNTVYDPLQPELDSGGGGSDIIKLLNEQVNKEMQSSNLYMSMSSWCYTHSLDGAGLFLFDHAAEEYEHAKKLIIFLNENNVPVQLTSISAPEHKFEGLTQIFQKAYEHEQHISESINNIVDHAIKSKDHATFNFLQWYVAEQHEEEVLFKDILDKIELIGNENHGLYLADQYVKGIAKSRKS

SEQ ID NO: 8801 - protein, 1315 aa, Artificial Sequence; identical to SEQ ID NO: 8791
  SARS-CoV-2/England/200990660/2020__EPI_ISL_414523 spike protein (1-1147)(K986P_V987P_T887W_A1020W) Ferritin construct

SEQ ID NO: 8802 - protein, 1315 aa, Artificial Sequence
  SARS-CoV-2/Australia/NSW09/2020__EPI_ISL_413595 spike protein (1-1147)(K986P_V987P_T887W_A1020W) Ferritin construct
MFVFLVLLPLVSSQCVNLTTRTQLPPAYTNSFTRGVYYPDKVFRSSVLHSTQDLFLPFFSNVTWFHAIHVSGTNGTKRFDNPVLPFNDGVYFASTEKSNIIRGWIFGTTLDSKTQSLLIVNNATNVVIKVCEFQFCNDPFLGVYYHKNNKSWMESEFRVYSSANNCTFEYVSQPFLMDLEGKQGNFKNLREFVFKNIDGYFKIYSKHTPINLVRDLPQGFSALEPLVDLPIGINITRFQTLLALHRSYLTPGDSSSGWTAGAAAYYVGYLQPRTFLLKYNENGTITDAVDCALDPLSETKCTLKSFTVEKGIYQTSNFRVQPTESIVRFPNITNLCPFGEVFNATRFASVYAWNRKRISNCVADYSVLYNSASFSTFKCYGVSPTKLNDLCFTNVYADSFVIRGDEVRQIAPGQTGKIADYNYKLPDDFTGCVIAWNSNNLDSKVGGNYNYLYRLFRKSNLKPFERDISTEIYQAGSTPCNGVEGFNCYFPLQSYGFQPTNGVGYQPYRVVVLSFELLHAPATVCGPKKSTNLVKNKCVNFNFNGLTGTGVLTESNKKFLPFQQFGRDIADTTDAVRDPQTLEILDITPCSFGGVSVITPGTNTSNQVAVLYQDVNCTEVPVAIHADQLTPTWRVYSTGSNVFQTRAGCLIGAEHVNNSYECDIPIGAGICASYQTQTNSPRRARSVASQSIIAYTMSLGAENSVAYSNNSIAIPTNFTISVTTEILPVSMTKTSVDCTMYICGDSTECSNLLLQYGSFCTQLNRALTGIAVEQDKNTQEVFAQVKQIYKTPPIKDFGGFNFSQILPDPSKPSKRSFIEDLLFNKVTLADAGFIKQYGDCLGDIAARDLICAQKFNGLTVLPPLLTDEMIAQYTSALLAGTITSGWWFGAGAALQIPFAMQMAYRFNGIGVTQNVLYENQKLIANQFNSAIGKIQDSLSFTASALGKLQDVVNQNAQALNTLVKQLSSNFGAISSVLNDILSRLDPPEAEVQIDRLITGRLQSLQTYVTQQLIRAAEIRWSANLAATKMSECVLGQSKRVDFCGKGYHLMSFPQSAPHGVVFLHVTYVPAQEKNFTTAPAICHDGKAHFPREGVFVSNGTHWFVTQRNFYEPQIITTDNTFVSGNCDVVIGIVNNTVYDPLQPELDSGGGGSDIIKLLNEQVNKEMQSSNLYMSMSSWCYTHSLDGAGLFLFDHAAEEYEHAKKLIIFLNENNVPVQLTSISAPEHKFEGLTQIFQKAYEHEQHISESINNIVDHAIKSKDHATFNFLQWYVAEQHEEEVLFKDILDKIELIGNENHGLYLADQYVKGIAKSRKS

SEQ ID NO: 8803 - protein, 1315 aa, Artificial Sequence; identical to SEQ ID NO: 8783
  SARS-CoV-2/Australia/NSW10/2020__EPI_ISL_413596 spike protein (1-1147)(K986P_V987P_T887W_A1020W) Ferritin construct

SEQ ID NO: 8804 - protein, 1315 aa, Artificial Sequence
  SARS-CoV-2/Switzerland/1000477797/2020__EPI_ISL_413023 spike protein (1-1147)(K986P_V987P_T887W_A1020W) Ferritin construct
MFVFLVLLPLVSSQCVNLTTRTQLPPAYTNSFTRGVYYPDKVFRSSVLHSTQDLFLPFFSNVTWFHAIHVSGTNGTKRFDNPVLPFNDGVYFASTEKSNIIRGWIFGTTLDSKTQSLLIVNNATNVVIKVCEFQFCNDPFLGVYYHKNNKSWMESEFRVYSSANNCTFEYVSQPFLMDLEGKQGNFKNLREFVFKNIDGYFNIYSKHTPINLVRDLPQGFSALEPLVDLPIGINITRFQTLLALHRSYLTPGDSSSGWTAGAAAYYVGYLQPRTFLLKYNENGTITDAVDCALDPLSETKCTLKSFTVEKGIYQTSNFRVQPTESIVRFPNITNLCPFGEVFNATRFASVYAWNRKRISNCVADYSVLYNSASFSTFKCYGVSPTKLNDLCFTNVYADSFVIRGDEVRQIAPGQTGKIADYNYKLPDDFTGCVIAWNSNNLDSKVGGNYNYLYRLFRKSNLKPFERDISTEIYQAGSTPCNGVEGFNCYFPLQSYGFQPTNGVGYQPYRVVVLSFELLHAPATVCGPKKSTNLVKNKCVNFNFNGLTGTGVLTESNKKFLPFQQFGRDIADTTDAVRDPQTLEILDITPCSFGGVSVITPGTNTSNQVAVLYQGVNCTEVPVAIHADQLTPTWRVYSTGSNVFQTRAGCLIGAEHVNNSYECDIPIGAGICASYQTQTNSPRRARSVASQSIIAYTMSLGAENSVAYSNNSIAIPTNFTISVTTEILPVSMTKTSVDCTMYICGDSTECSNLLLQYGSFCTQLNRALTGIAVEQDKNTQEVFAQVKQIYKTPPIKDFGGFNFSQILPDPSKPSKRSFIEDLLFNKVTLADAGFIKQYGDCLGDIAARDLICAQKFNGLTVLPPLLTDEMIAQYTSALLAGTITSGWWFGAGAALQIPFAMQMAYRFNGIGVTQNVLYENQKLIANQFNSAIGKIQDSLSSTASALGKLQDVVNQNAQALNTLVKQLSSNFGAISSVLNDILSRLDPPEAEVQIDRLITGRLQSLQTYVTQQLIRAAEIRWSANLAATKMSECVLGQSKRVDFCGKGYHLMSFPQSAPHGVVFLHVTYVPAQEKNFTTAPAICHDGKAHFPREGVFVSNGTHWFVTQRNFYEPQIITTDNTFVSGNCDVVIGIVNNTVYDPLQPELDSGGGGSDIIKLLNEQVNKEMQSSNLYMSMSSWCYTHSLDGAGLFLFDHAAEEYEHAKKLIIFLNENNVPVQLTSISAPEHKFEGLTQIFQKAYEHEQHISESINNIVDHAIKSKDHATFNFLQWYVAEQHEEEVLFKDILDKIELIGNENHGLYLADQYVKGIAKSRKS

SEQ ID NO: 8805 - protein, 1315 aa, Artificial Sequence
  SARS-CoV-2/Belgium/BA-02291/2020__EPI_ISL_415159 spike protein (1-1147)(K986P_V987P_T887W_A1020W) Ferritin construct
MFVFLVLLPLVSSQCVNLTTRTQLPPAYTNSFTRGVYYPDKVFRSSVLHSTQDLFLPFFSNVTWFHAIHVSGTNGTKRFDNPVLPFNDGVYFASTEKSNIIRGWIFGTTLDSKTQSLLIVNNATNVVIKVCEFQFCNDPFLGVYYHKNNKSWMESEFRVYSSANNCTFEYVSQPFLMDLEGKQGNFKNLREFVFKNIDGYFKIYSKHTPINLVRDLPQGFSALEPLVDLPIGINITRFQTLLALHRSYLTPGDSSSGWTAGAAAYYVGYLQPRTFLLKYNENGTITDAVDCALDPLSETKCTLKSFTVEKGIYQTSNFRVQPTESIVRFPNITNLCPFGEVFNATRFASVYAWNRKRISNCVADYSVLYNSASFSTFKCYGVSPTKLNDLCFTNVYADSFVIRGDEVRQIAPGQTGKIADYNYKLPDDFTGCVIAWNSNNLDSKVGGNYNYLYRLFRRSNLKPFERDISTEIYQAGSTPCNGVEGFNCYFPLQSYGFQPTNGVGYQPYRVVVLSFELLPAPATVCGPKKSTNLVKNKCVNFNFNGLTGTGVLTESNKKFLPFQQFGRDIADTTDAVRDPQTLEILDITPCSFGGVSVITPGTNTSNQVAVLYQGVNCTEVPVAIHADQLTPTWRVYSTGSNVFQTRAGCLIGAEHVNNSYECDIPIGAGICASYQTQTNSPRRARSVASQSIIAYTMSLGAENSVAYSNNSIAIPTNFTISVTTEILPVSMTKTSVDCTMYICGDSTECSNLLLQYGSFCTQLNRALTGIAVEQDKNTQEVFAQVKQIYKTPPIKDFGGFNFSQILPDPSKPSKRSFIEDLLFNKVTLADAGFIKQYGDCLGDIAARDLICAQKFNGLTVLPPLLTDEMIAQYTSALLAGTITSGWWFGAGAALQIPFAMQMAYRFNGIGVTQNVLYENQKLIANQFNSAIGKIQDSLSSAAPALGKLQDVVNQNAQALNTLVKQLSSNFGAISSVLNDILSRLDPPEAEVQIDRLITGRLQSLQTYVTQQLIRAAEIRWSANLAATKMSECVLGQSKRVDFCGKGYHLMSFPQSAPHGVVFLHVTYVPAQEKNFTTAPAICHDGKAHFPREGVFVSNGTHWFVTQRNFYEPQIITTDNTFVSGNCDVVIGIVNNTVYDPLQPELDSGGGGSDIIKLLNEQVNKEMQSSNLYMSMSSWCYTHSLDGAGLFLFDHAAEEYEHAKKLIIFLNENNVPVQLTSISAPEHKFEGLTQIFQKAYEHEQHISESINNIVDHAIKSKDHATFNFLQWYVAEQHEEEVLFKDILDKIELIGNENHGLYLADQYVKGIAKSRKS

SEQ ID NO: 8806 - protein, 1315 aa, Artificial Sequence
  SARS-CoV-2/USA/WA8-UW5/2020__EPI_ISL_413486 spike protein (1-1147)(K986P_V987P_T887W_A1020W) Ferritin construct
MFVFLVLLPLVSSQCVNLTTRTQLPPAYTNSFTRGVYYPDKVFRSSVLHSTQDLFLPFFSNVTWFHAIHVSGTNGTKRFDNPVLPFNDGVYFASTEKSNIIRGWIFGTTLDSKTQSLLIVNNATNVVIKVCEFQFCNDPFLGVYYHKNNKSWMESEFRVYSSANNCTFEYVSQPFLMDLEGKQGNFKNLREFVFKNIDGYFKIYSKHTPINLVRDLPQGFSALEPLVDLPIGINITRFQTLLALHRSYLTPGDSSSGWTAGAAAYYVGYLQPRTFLLKYNENGTITDAVDCALDPLSETKCTLKSFTVEKGIYQTSNFRVQPTESIVRFPNITNLCPFGEVFNATRFASVYAWNRKRISNCVADYSVLYNSASFSTFKCYGVSPTKLNDLCFTNVYADSFVIRGDEVRQIAPGQTGKIADYNYKLPDDFTGCVIAWNSNNLDSKVGGNYNYLYRLFRKSNLKPFERDISTEIYQAGSTPCNGVEGFNCYFPLQSYGFQPTNGVGYQPYRVVVLSFELLHAPATVCGPKKSTNLVKNKCVNFNFNGLTGTGVLTESNKKFLPFQQFGRDIADTTDAVRDPQTLEILDITPCSFGGVSVITPGTNTSNQVAVLYQDVNCTEVPVAIHADQLTPTWRVYSTGSNVFQTRAGCLIGAEYVNNSYECDIPIGAGICASYQTQTNSPRRARSVASQSIIAYTMSLGAENSVAYSNNSIAIPTNFTISVTTEILPVSMTKTSVDCTMYICGDSTECSNLLLQYGSFCTQLNRALTGIAVEQDKNTQEVFAQVKQIYKTPPIKDFGGFNFSQILPDPSKPSKRSFIEDLLFNKVTLADAGFIKQYGDCLGDIAARDLICAQKFNGLTVLPPLLTDEMIAQYTSALLAGTITSGWWFGAGAALQIPFAMQMAYRFNGIGVTQNVLYENQKLIANQFNSAIGKIQDSLSSTASALGKLQDVVNQNAQALNTLVKQLSSNFGAISSVLNDILSRLDPPEAEVQIDRLITGRLQSLQTYVTQQLIRAAEIRWSANLAATKMSECVLGQSKRVDFCGKGYHLMSFPQSAPHGVVFLHVTYVPAQEKNFTTAPAICHDGKAHFPREGVFVSNGTHWFVTQRNFYEPQIITTDNTFVSGNCDVVIGIVNNTVYDPLQPELDSGGGGSDIIKLLNEQVNKEMQSSNLYMSMSSWCYTHSLDGAGLFLFDHAAEEYEHAKKLIIFLNENNVPVQLTSISAPEHKFEGLTQIFQKAYEHEQHISESINNIVDHAIKSKDHATFNFLQWYVAEQHEEEVLFKDILDKIELIGNENHGLYLADQYVKGIAKSRKS

SEQ ID NO: 8807 - protein, 1315 aa, Artificial Sequence
  SARS-CoV-2/England/20102000506/2020__EPI_ISL_415147 spike protein (1-1147)(K986P_V987P_T887W_A1020W) Ferritin construct
MFVFLVLLPLVSSQCVNLTTRTQLPPAYTNSFTRGVYYPDKVFRSSVLHSTQDLFLPFFSNVTWFHAIHVSGTNGTKRFDNPVLPFNDGVYFASTEKSNIIRGWIFGTTLDSKTQSLLIVNNATNVVIKVCEFQFCNDPFLGVYYHKNNKSWMESEFRVYSSANNCTFEYVSQPFLMDLEGKQGNFKNLREFVFKNIDGYFKIYSKHTPINLVRDLPQGFSALEPLVDLPIGINITRFQTLLALHRSYLTPGDSSSGWTAGAAAYYVGYLQPRTFLLKYNENGTITDAVDCALDPLSETKCTLKSFTVEKGIYQTSNFRVQPTESIVRFPNITNLCPFGEVFNATRFASVYAWNRKRISNCVADYSVLYNSASFSTFKCYGVSPTKLNDLCFTNVYADSFVIRGDEVRQIAPGQTGKIADYNYKLPDDFTGCVIAWNSNNLDSKVGGNYNYLYRLFRKSNLKPFERDISTEIYQAGSTPCNGVEGFNCYFPLQSYGFQPTNGVGYQPYRVVVLSFELLHAPATVCGPKKSTNLVKNKCVNFNFNGLTGTGVLTESNKKFLPFQQFGRDIADTTDAVRDPQTLEILDITPCSFGGVSVITPGTNTSNQVAVLYQGVNCTEVPVAIHADQLTPTWRVYSTGSNVFQTRAGCLIGAEHVNNSYECDIPIGAGICASYQTQTNSPRRARSVASQSIIAYTMSLGAENSVAYSNNSIAIPTNFTISVTTEILPVSMTKTSVDCTMYICGDSTECSNLLLQYGSFCTQLNRALTGIAVEQDKNTQEVFAQVKQIYKTPPIKDFGGFNFSQILPDPSKPSKRSFIEDLLFNKVTLADAGFIKQYGYCLGDIAARDLICAQKFNGLTVLPPLLTDEMIAQYTSALLAGTITSGWWFGAGAALQIPFAMQMAYRFNGIGVTQNVLYENQKLIANQFNSAIGKIQDSLSSTASALGKLQDVVNQNAQALNTLVKQLSSNFGAISSVLNDILSRLDPPEAEVQIDRLITGRLQSLQTYVTQQLIRAAEIRWSANLAATKMSECVLGQSKRVDFCGKGYHLMSFPQSAPHGVVFLHVTYVPAQEKNFTTAPAICHDGKAHFPREGVFVSNGTHWFVTQRNFYEPQIITTDNTFVSGNCDVVIGIVNNTVYDPLQPELDSGGGGSDIIKLLNEQVNKEMQSSNLYMSMSSWCYTHSLDGAGLFLFDHAAEEYEHAKKLIIFLNENNVPVQLTSISAPEHKFEGLTQIFQKAYEHEQHISESINNIVDHAIKSKDHATFNFLQWYVAEQHEEEVLFKDILDKIELIGNENHGLYLADQYVKGIAKSRKS

SEQ ID NO: 8808 - protein, 1315 aa, Artificial Sequence
  SARS-CoV-2/Belgium/VAG-03013/2020__EPI_ISL_415155 spike protein (1-1147)(K986P_V987P_T887W_A1020W) Ferritin construct
MFVFLVLLPLVSSQCVNLTTRTQLPPAYTNSFTRGVYYPDKVFRSSVLHSTQDLFLPFFSNVTWFHAIHVSGTNGTKRFDNPVLPFNDGVYFASTEKSNIIRGWIFGTTLDSKTQSLLIVNNATNVVIKVCEFQFCNDPFLGVYYHKNNKSWMESEFRVYSSANNCTFEYVSQPFLMDLEGKQGNFKNLREFVFKNIDGYFKIYSKHTPINLVRDLPQGFSALEPLVDLPIGINITRFQTLLALHRSYLTPGDSSSGWTAGAAAYYVGYLQPRTFLLKYNENGTITDAVDCALDPLSETKCTLKSFTVEKGIYQTSNFRVQPTESIVRFPNITNLCPFGEVFNATRFASVYAWNRKRISNCVADYSVLYNSASFSTFKCYGVSPTKLNDLCFTNVYADSFVIRGDEVRQIAPGQTGKIADYNYKLPDDFTGCVIAWNSNNLDSKVGGNYNYLYRLFRKSNLKPFERDISTEIYQAGSTPCNGVEGFNCYFPLQSYGFQPTNGVGYQPYRVVVLSFELLHAPATVCGPKKSTNLVKNKCVNFNFNGLTGTGVLTESNKKFLPFQQFGRDIADTTDAVRDPQTLEILDITPCSFGGVSVITPGTNTSNQVAVLYQGVNCTEVPVAIHADQLTPTWRVYSTGSNVFQTRAGCLIGAEHVNNSYECDIPIGAGICASYQTQTNSPRRARSVASQSIIAYTMSLGAENSVAYSNNSIAIPTNFTISVTTEILPVSMTKTSVDCTMYICGDSTECSNLLLQYGSFCTQLNRALTGIAVEQDKNTQEVFAQVKQIYKTPPIKDFGGFNFSQILPDPSKPSKRSFIEDLLFNKVTLADAGFIKQYGDCLGDIAARDLICAQKFNGLTVLPPLLTDEMIAQYTSALLAGTITSGWWFGAGAALQIPFAMQMAYRFNGIGVTQNVLYENQKLIANQFNSAIGKIQDSLSSTATALGKLQDVVNQNAQALNTLVKQLSSNFGAISSVLNDILSRLDPPEAEVQIDRLITGRLQSLQTYVTQQLIRAAEIRWSANLAATKMSECVLGQSKRVDFCGKGYHLMSFPQSAPHGVVFLHVTYVPAQEKNFTTAPAICHDGKAHFPREGVFVSNGTHWFVTQRNFYEPQIITTDNTFVSGNCDVVIGIVNNTVYDPLQPELDSGGGGSDIIKLLNEQVNKEMQSSNLYMSMSSWCYTHSLDGAGLFLFDHAAEEYEHAKKLIIFLNENNVPVQLTSISAPEHKFEGLTQIFQKAYEHEQHISESINNIVDHAIKSKDHATFNFLQWYVAEQHEEEVLFKDILDKIELIGNENHGLYLADQYVKGIAKSRKS

SEQ ID NO: 8809 - protein, 1315 aa, Artificial Sequence
  SARS-CoV-2/Belgium/BC-03016/2020__EPI_ISL_415157 spike protein (1-1147)(K986P_V987P_T887W_A1020W) Ferritin construct
MFVFLVLLPLVSSQCVNLTTRTQLPPAYTNSFTRGVYYPDKVFRSSVLHSTQDLFLPFFSNVTWFHAIHVSGTNGTKRFDNPVLPFNDGVYFASTEKSNIIRGWIFGTTLDSKTQSLLIVNNATNVVIKVCEFQFCNDPFLGVYYHKNNKSWMESEFRVYSSANNCTFEYVSQPFLMDLEGKQGNFKNLREFVFKNIDGYFKIYSKHTPINLVRDLPQGFSALEPLVDLPIGINITRFQTLLALHRSYLTPGDSSSGWTAGAAAYYVGYLQPRTFLLKYNENGTITDAVDCALDPLSETKCTLKSFTVEKGIYQTSNFRVQPTESIVRFPNITNLCPFGEVFNATRFASVYAWNRKRISNCVADYSVLYNSASFSTFKCYGVSPTKLNDLCFTNVYADSFVIRGDEVRQIAPGQTGKIADYNYKLPDDFTGCVIAWNSNNLDSKVGGNYNYLYRLFRKSNLKPFERDISTEIYQAGSTPCNGVEGFNCYFPLQSYGFQPTNGVGYQPYRVVVLSFELLHAPATVCGPKKSTNLVKNKCVNFNFNGLTGTGVLTESNKKFLPFQQFGRDIADTTDAVRDPQTLEILDITPCSFGGVSVITPGTNTSNQVAVLYQGVNCTEVPVAIHADQLTPTWRVYSTGSNVFQTRAGCLIGAEHVNNSYECDIPIGAGICASYQTQTNSPRRARSVASQSIIAYTMSLGAENSVAYSNNSIAIPTNFTISVTTEILPVSMTKTSVDCTMYICGDSTECSNLLLQYGSFCTQLNRALTGIAVEQDKNTQEVFAQVKQIYKTPPIKDFGGFNFSQILPDPSKPSKRSFIEDLLFNKVTLADAGFIKQYGDCLGDIAARDLICAQKFNGLTVLPPLLTDEMIAQYTSALLAGTITSGWWFGAGAALQIPFAMQMAYRFNGIGVTQNVLYENQKLIANQFNSAIGKIQDSLSSTAPALGKLQDVVNQNAQALNTLVKQLSSNFGAISSVLNDILSRLDPPEAEVQIDRLITGRLQSLQTYVTQQLIRAAEIRWSANLAATKMSECVLGQSKRVDFCGKGYHLMSFPQSAPHGVVFLHVTYVPAQEKNFTTAPAICHDGKAHFPREGVFVSNGTHWFVTQRNFYEPQIITTDNTFVSGNCDVVIGIVNNTVYDPLQPELDSGGGGSDIIKLLNEQVNKEMQSSNLYMSMSSWCYTHSLDGAGLFLFDHAAEEYEHAKKLIIFLNENNVPVQLTSISAPEHKFEGLTQIFQKAYEHEQHISESINNIVDHAIKSKDHATFNFLQWYVAEQHEEEVLFKDILDKIELIGNENHGLYLADQYVKGIAKSRKS

SEQ ID NO: 8810 - protein, 1315 aa, Artificial Sequence
  SARS-CoV-2/Germany/BavPat3/2020__EPI_ISL_414521 spike protein (1-1147)(K986P_V987P_T887W_A1020W) Ferritin construct
MFVFLVLLPLVSSQCVNLTTRTQLPPAYTNSFTRGVYYPDKVFRSSVLHSTQDLFLPFFSNVTWFHAIHVSGTNGTKRFDNPVLPFNDGVYFASTEKSNIIRGWIFGTTLDSKTQSLLIVNNATNVVIKVCEFQFCNDPFLGVYYHKNNKSWMESEFRVYSSANNCTFEYVSQPFLMDLEGKQGNFKNLREFVFKNIDGYFKIYSKHTPINLVRDLPQGFSALEPLVDLPIGINITRFQTLLALHRSYLTPGDSSSGWTAGAAAYYVGYLQPRTFLLKYNENGTITDAVDCALDPLSETKCTLKSFTVEKGIYQTSNFRVQPTESIVRFPNITNLCPFGEVFNATRFASVYAWNRKRISNCVADYSVLYNSASFSTFKCYGVSPTKLNDLCFTNVYADSFVIRGDEVRQIAPGQTGKIADYNYKLPDDFTGCVIAWNSNNLDSKVGGNYNYLYRLFRKSNLKPFERDISTEIYQAGSTPCNGVEGFNCYFPLQSYGFQPTNGVGYQPYRVVVLSFELLHAPATVCGPKKSTNLVKNKCVNFNFNGLTGTGVLTESNKKFLPFQQFGRDIADTTDAVRDPQTLEILDITPCSFGGVSVITPGTNTSNQVAVLYQDVNCTEVPVAIHADQLTPTWRVYSTGSNVFQTRAGCLIGAEHVNNSYECDIPIGAGICASYQTQTNSPRRARSVASQSIIAYTMSLGAENSVAYSNNSIAIPTNFTISVTTEILPVSMTKTSVDCTMYICGDSTECSNLLLQYGSFCTQLNRALTGIAVEQDKNTQQVFAQVKQIYKTPPIKDFGGFNFSQILPDPSKPSKRSFIEDLLFNKVTLADAGFIKQYGDCLGDIAARDLICAQKFNGLTVLPPLLTDEMIAQYTSALLAGTITSGWWFGAGAALQIPFAMQMAYRFNGIGVTQNVLYENQKLIANQFNSAIGKIQDSLSSTASALGKLQDVVNQNAQALNTLVKQLSSNFGAISSVLNDILSRLDPPEAEVQIDRLITGRLQSLQTYVTQQLIRAAEIRWSANLAATKMSECVLGQSKRVDFCGKGYHLMSFPQSAPHGVVFLHVTYVPAQEKNFTTAPAICHDGKAHFPREGVFVSNGTHWFVTQRNFYEPQIITTDNTFVSGNCDVVIGIVNNTVYDPLQPELDSGGGGSDIIKLLNEQVNKEMQSSNLYMSMSSWCYTHSLDGAGLFLFDHAAEEYEHAKKLIIFLNENNVPVQLTSISAPEHKFEGLTQIFQKAYEHEQHISESINNIVDHAIKSKDHATFNFLQWYVAEQHEEEVLFKDILDKIELIGNENHGLYLADQYVKGIAKSRKS

SEQ ID NO: 8811 - protein, 1315 aa, Artificial Sequence
  SARS-CoV-2/France/HF1805/2020__EPI_ISL_414628 spike protein (1-1147)(K986P_V987P_T887W_A1020W) Ferritin construct
MFVFLVLLPLVSSQCVNLTTRTQLPPAYTNSFTRGVYYPDKVFRSSVLHSTQDLFLPFFSNVTWFHAIHVSGTNGTKRFDNPVLPFNDGVYFASTEKSNIIRGWIFGTTLDSKTQSLLIVNNATNVVIKVCEFQFCNDPFLGVYYHKNNKSWMESEFRVYSSANNCTFEYVSQPFLMDLEGKQGNFKNLREFVFKNIDGYFKIYSKHTPINLVRDLPQGFSALEPLVDLPIGINITRFQTLLALHRSYLTPGDSSSGWTAGAAAYYVGYLQPRTFLLKYNENGTITDAVDCALDPLSETKCTLKSFTVEKGIYQTSNFRVQPTESIVRFPNITNLCPFGEVFNATRFASVYAWNRKRISNCVADYSVLYNSASFSTFKCYGVSPTKLNDLCFTNVYADSFVIRGDEVRQIAPGQTGKIADYNYKLPDDFTGCVIAWNSNNLDSKVGGNYNYLYRLFRKSNLKPFERDISTEIYQAGSTPCNGVEGFNCYFPLQSYGFQPTNGVGYQPYRVVVLSFELLHAPATVCGPKKSTNLVKNKCVNFNFNGLTGTGVLTESNKKFLPFQQFGRDIADTTDAVRDPQTLEILDITPCSFGGVSVITPGTNTSNQVAVLYQGVNCTEVPVAIHADQLTPTWRVYSTGSNVFQTRAGCLIGAEHVNNSYECDIPIGAGICASYQTQTNSPRRARSVASQSIIAYTMSLGAENSVAYSNNSIAIPTNFTISVTTEILPVSMTKTSVDCTMYICGDSTECSNLLLQYGSFCTQLNRALTGIAVEQDKNTQEVFAQVKQIYKTPPIKDFGGFNFSQILPDPSKPSKRSFIEDLLFNKVTLADAGFIKQYGDCLGDIAARDLICAQKFNGLTVLPPLLTDEMIAQYTSALLAGTITSGWWFGAGAALQIPFAMQMAYRFNGIGVTQNVLYENQKLIANQFNSAIGKIQDSLSSTASALGKLQDVVNQNAQALNTLVKQLSSNFGAISSVLNDILSRLDPPEAEVQIDRLITGRLQSLQTYVTQQLIRAAEIRWSANLAATKMSECVLGQSKRVDFCGKGYHLMSFPQSAPHGVVFLHVTYVPAQEKNFTTAPAICHDGKAHFPREGVFVSNGTHWFVTQRNFYEPQIITTDNTFVSGNCDVVIGVVNNTVYDPLQPELDSGGGGSDIIKLLNEQVNKEMQSSNLYMSMSSWCYTHSLDGAGLFLFDHAAEEYEHAKKLIIFLNENNVPVQLTSISAPEHKFEGLTQIFQKAYEHEQHISESINNIVDHAIKSKDHATFNFLQWYVAEQHEEEVLFKDILDKIELIGNENHGLYLADQYVKGIAKSRKS

SEQ ID NO: 8812 - protein, 1315 aa, Artificial Sequence
  SARS-CoV-2/Netherlands/ZuidHolland_9/2020__EPI_ISL_414445 spike protein (1-1147)(K986P_V987P_T887W_A1020W) Ferritin construct
MFVFLVLLPLVSSQCVNLTTRTQLPPAYTNSFTRGVYYPDKVFRSSVLHSTQDLFLPFFSNVTWFHAIHVSGTNGTKRFDNPVLPFNDGVYFASTEKSNIIRGWIFGTTLDSKTQSLLIVNNATNVVIKVCEFQFCNDPFLGVYYHKNNKSWMESEFRVYSSANNCTFEYVSQPFLMDLEGKQGNFKNLREFVFKNIDGYFKIYSKHTPINLVRDLPQGFSALEPLVDLPIGINITRFQTLLALHRSYLTPGDSSSGWTAGAAAYYVGYLQPRTFLLKYNENGTITDAVDCALDPLSETKCTLKSFTVEKGIYQTSNFRVQPTESIVRFPNITNLCPFGEVFNATRFASVYAWNRKRISNCVADYSVLYNSASFSTFKCYGVSPTKLNDLCFTNVYADSFVIRGDEVRQIAPGQTGKIADYNYKLPDDFTGCVIAWNSNNLDSKVGGNYNYLYRLFRKSNLKPFERDISTEIYQAGSTPCNGVEGFNCYFPLQSYGFQPTNGVGYQPYRVVVLSFELLHAPATVCGPKKSTNLVKNKCVNFNFNGLTGTGVLTESNKKFLPFQQFGRDIADTTDAVRDPQTLEILDITPCSFGGVSVITPGTNTSNQVAVLYQGVNCTEVPVAIHADQLTPTWRVYSTGSNVFQTRAGCLIGAEHVNNSYECDIPIGAGICASYQTQTNSPRRARSVASQSIIAYTMSLGAENSVAYSNNSIAIPTNFTISVTTEILPVSMTKTSVDCTMYICGDSTECSNLLLQYGSFCTQLNRALTGIAVEQDKNTQEVFAQVKQIYKTPPIKDFGGFNFSQILPDPSKPSKRSFIEDLLFNKVTLADAGFIKQYGDCLGDIAARDLICVQKFNGLTVLPPLLTDEMIAQYTSALLAGTITSGWWFGAGAALQIPFAMQMAYRFNGIGVTQNVLYENQKLIANQFNSAIGKIQDSLSSTASALGKLQDVVNQNAQALNTLVKQLSSNFGAISSVLNDILSRLDPPEAEVQIDRLITGRLQSLQTYVTQQLIRAAEIRWSANLAATKMSECVLGQSKRVDFCGKGYHLMSFPQSAPHGVVFLHVTYVPAQEKNFTTAPAICHDGKAHFPREGVFVSNGTHWFVTQRNFYEPQIITTDNTFVSGNCDVVIGIVNNTVYDPLQPELDSGGGGSDIIKLLNEQVNKEMQSSNLYMSMSSWCYTHSLDGAGLFLFDHAAEEYEHAKKLIIFLNENNVPVQLTSISAPEHKFEGLTQIFQKAYEHEQHISESINNIVDHAIKSKDHATFNFLQWYVAEQHEEEVLFKDILDKIELIGNENHGLYLADQYVKGIAKSRKS

SEQ ID NO: 8813 - protein, 1315 aa, Artificial Sequence
  SARS-CoV-2/Finland/FIN03032020A/2020__EPI_ISL_413602 spike protein (1-1147)(K986P_V987P_T887W_A1020W) Ferritin construct
MFVFLVLLPLVSSQCVNLTTRTQLPPAYTNSFTRGVYYPDKVFRSSVLHSTQDLFLPFFSNVTWFHAIHVSGTNGTKRFDNPVLPFNDGVYFASTEKSNIIRGWIFGTTLDSKTQSLLIVNNATNVVIKVCEFQFCNDPFLGVYYHKNNKSWMESEFRVYSSANNCTFEYVSQPFLMDLEGKQGNFKNLREFVFKNIDGYFKIYSKHTPINLVRDLPQGFSALEPLVDLPIGINITRFQTLLALHRSYLTPGDSSSGWTAGAAAYYVGYLQPRTFLLKYNENGTITDAVDCALDPLSETKCTLKSFTVEKGIYQTSNFRVQPTESIVRFPNITNLCPFGEVFNATRFASVYAWNRKRISNCVADYSVLYNSASFSTFKCYGVSPTKLNDLCFTNVYADSFVIRGDEVRQIAPGQTGKIADYNYKLPDDFTGCVISWNSNNLDSKVGGNYNYLYRLFRKSNLKPFERDISTEIYQAGSTPCNGVEGFNCYFPLQSYGFQPTNGVGYQPYRVVVLSFELLHAPATVCGPKKSTNLVKNKCVNFNFNGLTGTGVLTESNKKFLPFQQFGRDIADTTDAVRDPQTLEILDITPCSFGGVSVITPGTNTSNQVAVLYQGVNCTEVPVAIHADQLTPTWRVYSTGSNVFQTRAGCLIGAEHVNNSYECDIPIGAGICASYQTQTNSPRRARSVASQSIIAYTMSLGAENSVAYSNNSIAIPTNFTISVTTEILPVSMTKTSVDCTMYICGDSTECSNLLLQYGSFCTQLNRALTGIAVEQDKNTQEVFAQVKQIYKTPPIKDFGGFNFSQILPDPSKPSKRSFIEDLLFNKVTLADAGFIKQYGDCLGDIAARDLICAQKFNGLTVLPPLLTDEMIAQYTSALLAGTITSGWWFGAGAALQIPFAMQMAYRFNGIGVTQNVLYENQKLIANQFNSAIGKIQDSLSSTASALGKLQDVVNQNAQALNTLVKQLSSNFGAISSVLNDILSRLDPPEAEVQIDRLITGRLQSLQTYVTQQLIRAAEIRWSANLAATKMSECVLGQSKRVDFCGKGYHLMSFPQSAPHGVVFLHVTYVPAQEKNFTTAPAICHDGKAHFPREGVFVSNGTHWFVTQRNFYEPQIITTDNTFVSGNCDVVIGIVNNTVYDPLQPELDSGGGGSDIIKLLNEQVNKEMQSSNLYMSMSSWCYTHSLDGAGLFLFDHAAEEYEHAKKLIIFLNENNVPVQLTSISAPEHKFEGLTQIFQKAYEHEQHISESINNIVDHAIKSKDHATFNFLQWYVAEQHEEEVLFKDILDKIELIGNENHGLYLADQYVKGIAKSRKS

SEQ ID NO: 8814 - protein, 1315 aa, Artificial Sequence
  SARS-CoV-2/France/GE1977/2020__EPI_ISL_414632 spike protein (1-1147)(K986P_V987P_T887W_A1020W) Ferritin construct
MFVFLVLLPLVSSQCVNLTTRTQLPPAYTNSFTRGVYYPDKVFRSSVLHSTQDLFLPFFSNVTWFHAIHVSGTNGTKRFDNPVLPFNDGVYFASTEKSNIIRGWIFGTTLDSKTQSLLIVNNATNVVIKVCEFQFCNDPFLGVYYHKNNKSWMESEFRVYSSANNCTFEYVSQPFLMDLEGKQGNFKNLREFVFKNIDGYFKIYSKHTPINLVRDLPQGFSALEPLVDLPIGINITRFQTLLALHRSYLTPGDSSSGWTAGAAAYYVGYLQPRTFLLKYNENGTITDAVDCALDPLSETKCTLKSFTVEKGIYQTSNFRVQPTESIVRFPNITNLCPFGEVFNATRFASVYAWNRKRISNCVADYSVLYNSASFSTFKCYGVSPTKLNDLCFTNVYADSFVIRGDEVRQIAPGQTGKIADYNYKLPDDFTGCVIAWNSNNLDSKVGGNYNYLYRLFRKSNLKPFERDISTEIYQAGSTPCNGVEGFNCYFPLQSYGFQPTNGVGYQPYRVVVLSFELLHAPATVCGPKKSTNLVKNKCVNFNFNGLTGTGVLTESNKKFLPFQQFGRDIADTTDAVRDPQTLEILDITPCSFGGVSVITPGTNTSNQVAVLYQGVNCTEVPVAIHADQLTPTWRVYSTGSNVFQTRAGCLIGAEHVNNSYECDIPIGAGICASYQTQTNSPRRARSVASQSIIAYTMSLGAENSVAYSNNSIAIPTNFTISVTTEILPVSMTKTSVDCTMYICGDSTECSNLLLQYGSFCTQLNRALTGIAVEQDKNTQEVFAQVKQIYKTPPIKDFGGFNFSQILPDPSKPSKRSFIEDLLFNKVTLADAGFIKQYGDCLGDIAARDLICAQKFNGLTVLPPLLTDEMIAQYTSALLAGTITSGWWFGAGAALQIPFAMQMAYRFNGIGVTQNVLYENQKLIANQFNSAIGKIQDSLFSTASALGKLQDVVNQNAQALNTLVKQLSSNFGAISSVLNDILSRLDPPEAEVQIDRLITGRLQSLQTYVTQQLIRAAEIRWSANLAATKMSECVLGQSKRVDFCGKGYHLMSFPQSAPHGVVFLHVTYVPAQEKNFTTAPAICHDGKAHFPREGVFVSNGTHWFVTQRNFYEPQIITTDNTFVSGNCDVVIGIVNNTVYDPLQPELDSGGGGSDIIKLLNEQVNKEMQSSNLYMSMSSWCYTHSLDGAGLFLFDHAAEEYEHAKKLIIFLNENNVPVQLTSISAPEHKFEGLTQIFQKAYEHEQHISESINNIVDHAIKSKDHATFNFLQWYVAEQHEEEVLFKDILDKIELIGNENHGLYLADQYVKGIAKSRKS

SEQ ID NO: 8815 - protein, 1315 aa, Artificial Sequence
  SARS-CoV-2/Finland/FIN-313/2020__EPI_ISL_414641 spike protein (1-1147)(K986P_V987P_T887W_A1020W) Ferritin construct
MFVFLVLLPLVSSQCVNLTTRTQLPPAYTNSFTRGVYYPDKVFRSSVLHSTQDLFLPFFSNVTWFHAIHVSGTNGTKRFDNPVLPFNDGVYFASTEKSNIIRGWIFGTTLDSKTQSLLIVNNATNVVIKVCEFQFCNDPFLGVYYHKNNKSWMESEFRVYSSANNCTFEYVSQPFLMDLEGKQGNFKNLREFVFKNIDGYFKIYSKHTPINLVRDLPQGFSALEPLVDLPIGINITRFKTLLALHRSYLTPGDSSSGWTAGAAAYYVGYLQPRTFLLKYNENGTITDAVDCALDPLSETKCTLKSFTVEKGIYQTSNFRVQPTESIVRFPNITNLCPFGEVFNATRFASVYAWNRKRISNCVADYSVLYNSASFSTFKCYGVSPTKLNDLCFTNVYADSFVIRGDEVRQIAPGQTGKIADYNYKLPDDFTGCVIAWNSNNLDSKVGGNYNYLYRLFRKSNLKPFERDISTEIYQAGSTPCNGVEGFNCYFPLQSYGFQPTNGVGYQPYRVVVLSFELLHAPATVCGPKKSTNLVKNKCVNFNFNGLTGTGVLTESNKKFLPFQQFGRDIADTTDAVRDPQTLEILDITPCSFGGVSVITPGTNTSNQVAVLYQGVNCTEVPVAIHADQLTPTWRVYSTGSNVFQTRAGCLIGAEHVNNSYECDIPIGAGICASYQTQTNSPRRARSVASQSIIAYTMSLGAENSVAYSNNSIAIPTNFTISVTTEILPVSMTKTSVDCTMYICGDSTECSNLLLQYGSFCTQLNRALTGIAVEQDKNTQEVFAQVKQIYKTPPIKDFGGFNFSQILPDPSKPSKRSFIEDLLFNKVTLADAGFIKQYGDCLGDIAARDLICAQKFNGLTVLPPLLTDEMIAQYTSALLAGTITSGWWFGAGAALQIPFAMQMAYRFNGIGVTQNVLYENQKLIANQFNSAIGKIQDSLSSTASALGKLQDVVNQNAQALNTLVKQLSSNFGAISSVLNDILSRLDPPEAEVQIDRLITGRLQSLQTYVTQQLIRAAEIRWSANLAATKMSECVLGQSKRVDFCGKGYHLMSFPQSAPHGVVFLHVTYVPAQEKNFTTAPAICHDGKAHFPREGVFVSNGTHWFVTQRNFYEPQIITTDNTFVSGNCDVVIGIVNNTVYDPLQPELDSGGGGSDIIKLLNEQVNKEMQSSNLYMSMSSWCYTHSLDGAGLFLFDHAAEEYEHAKKLIIFLNENNVPVQLTSISAPEHKFEGLTQIFQKAYEHEQHISESINNIVDHAIKSKDHATFNFLQWYVAEQHEEEVLFKDILDKIELIGNENHGLYLADQYVKGIAKSRKS

SEQ ID NO: 8816 - protein, 1315 aa, Artificial Sequence
  SARS-CoV-2/Netherlands/ZuidHolland_2/2020__EPI_ISL_414556 spike protein (1-1147)(K986P_V987P_T887W_A1020W) Ferritin construct
MFVFLVLLPLVSSQCVNLTTRTQLPPAYTNSFTRGVYYPDKVFRSSVLHSTQDLFLPFFSNVTWFHAIHVSGTNGTKRFDNPVLPFNDGVYFASTEKSNIIRGWIFGTTLDSKTQSLLIVNNATNVVIKVCEFQFCNDPFLGVYYHKNNKSWMESEFRVYSSANNCTFEYVSQPFLMDLEGKQGNFKNLREFVFKNIDGYFKIYSKHTPINLVRDLPQGFSALEPLVDLPIGINITRFQTLLALHRSYLTPGDSSSGWTAGAAAYYVGYLQPRTFLLKYNENGTITDAVDCALDPLSETKCTLKSFTVEKGIYQTSNFRVQPTESIVRFPNITNLCPFGEVFNATRFASVYAWNRKRISNCVADYSVLYNSASFSTFKCYGVSPTKLNDLCFTNVYADSFVIRGDEVRQIAPGQTGKIADYNYKLPDDFTGCVIAWNSNNLDSKVGGNYNYLYRLFRKSNLKPFERDISTEIYQAGSTPCNGVEGFNCYFPLQSYGFQPTNGVGYQPYRVVVLSFELLHAPATVCGPKKSTNLVKNKCVNFNFNGLTGTGVLTESNKKFLPFQQFGRDIADTTDAVRDPQTLEILDITPCSFGGVSVITPGTNTSNQVAVLYQGVNCTEVPVAIHADQLTPTWRVYSTGSNVFQTRAGCLIGAEHVNNSYECDIPIGAGICASYQTQTNSPRRARSVASQSIIAYTMSLGAENSVAYSNNSIAIPTNFTISVTTEILPVSMTKTSVDCTMYICGDSTECSNLLLQYGSFCTQLNRALTGIALEQDKNTQEVFAQVKQIYKTPPIKDFGGFNFSQILPDPSKPSKRSFIEDLLFNKVTLADAGFIKQYGDCLGDIAARDLICAQKFNGLTVLPPLLTDEMIAQYTSALLAGTITSGWWFGAGAALQIPFAMQMAYRFNGIGVTQNVLYENQKLIANQFNSAIGKIQDSLSSTASALGKLQDVVNQNAQALNTLVKQLSSNFGAISSVLNDILSRLDPPEAEVQIDRLITGRLQSLQTYVTQQLIRAAEIRWSANLAATKMSECVLGQSKRVDFCGKGYHLMSFPQSAPHGVVFLHVTYVPAQEKNFTTAPAICHDGKAHFPREGVFVSNGTHWFVTQRNFYEPQIITTDNTFVSGNCDVVIGIVNNTVYDPLQPELDSGGGGSDIIKLLNEQVNKEMQSSNLYMSMSSWCYTHSLDGAGLFLFDHAAEEYEHAKKLIIFLNENNVPVQLTSISAPEHKFEGLTQIFQKAYEHEQHISESINNIVDHAIKSKDHATFNFLQWYVAEQHEEEVLFKDILDKIELIGNENHGLYLADQYVKGIAKSRKS

SEQ ID NO: 8817 - protein, 1315 aa, Artificial Sequence
  SARS-CoV-2/USA/WA-UW31/2020__EPI_ISL_414618 spike protein (1-1147)(K986P_V987P_T887W_A1020W) Ferritin construct
MFVFLVLLPLVSSQCVNLTTRTQLPPAYTNSFTRGVYYPDKVFRSSVLHSTQDLFLPFFSNVTWFHAIHVSGTNGTKRFDNPVLPFNDGVYFASTEKSNIIRGWIFGTTLDSKTQSLLIVNNATNVVIKVCEFQFCNDPFLGVYYHKNNKSWMESEFRVYSSANNCTFEYVSQPFLMDLEGKQGNFKNLREFVFKNIDGYFKIYSKHTPINLVRDLPQGFSALEPLVDLPIGINITRFQTLLALHRSYLTPGDSSSGWTAGAAAYYVGYLQPRTFLLKYNENGTITDAVDCALDPLSETKCTLKSFTVEKGIYQTSNFRVQPTESIVRFPNITNLCPFGEVFNATRFASVYAWNRKRISNCVADYSVLYNSASFSTFKCYGVSPTKLNDLCFTNVYADSFVIRGDEVRQIAPGQTGKIADYNYKLPDDFTGCVIAWNSNNLDSKVGGNYNYLYRLFRKSNLKPFERDISTEIYQAGSTPCNGAEGFNCYFPLQSYGFQPTNGVGYQPYRVVVLSFELLHAPATVCGPKKSTNLVKNKCVNFNFNGLTGTGVLTESNKKFLPFQQFGRDIADTTDAVRDPQTLEILDITPCSFGGVSVITPGTNTSNQVAVLYQDVNCTEVPVAIHADQLTPTWRVYSTGSNVFQTRAGCLIGAEHVNNSYECDIPIGAGICASYQTQTNSPRRARSVASQSIIAYTMSLGAENSVAYSNNSIAIPTNFTISVTTEILPVSMTKTSVDCTMYICGDSTECSNLLLQYGSFCTQLNRALTGIAVEQDKNTQEVFAQVKQIYKTPPIKDFGGFNFSQILPDPSKPSKRSFIEDLLFNKVTLADAGFIKQYGDCLGDIAARDLICAQKFNGLTVLPPLLTDEMIAQYTSALLAGTITSGWWFGAGAALQIPFAMQMAYRFNGIGVTQNVLYENQKLIANQFNSAIGKIQDSLSSTASALGKLQDVVNQNAQALNTLVKQLSSNFGAISSVLNDILSRLDPPEAEVQIDRLITGRLQSLQTYVTQQLIRAAEIRWSANLAATKMSECVLGQSKRVDFCGKGYHLMSFPQSAPHGVVFLHVTYVPAQEKNFTTAPAICHDGKAHFPREGVFVSNGTHWFVTQRNFYEPQIITTDNTFVSGNCDVVIGIVNNTVYDPLQPELDSGGGGSDIIKLLNEQVNKEMQSSNLYMSMSSWCYTHSLDGAGLFLFDHAAEEYEHAKKLIIFLNENNVPVQLTSISAPEHKFEGLTQIFQKAYEHEQHISESINNIVDHAIKSKDHATFNFLQWYVAEQHEEEVLFKDILDKIELIGNENHGLYLADQYVKGIAKSRKS

SEQ ID NO: 8818 - protein, 1315 aa, Artificial Sequence
  SARS-CoV-2/South Korea/SNU01/2020__EPI_ISL_411929 spike protein (1-1147)(K986P_V987P_T887W_A1020W) Ferritin construct
MFVFLVLLPLVSSQCVNLTTRTQLPPAYTNSFTRGVYYPDKVFRSSVLHSTQDLFLPFFSNVTWFHAIHVSGTNGTKRFDNPVLPFNDGVYFASTEKSNIIRGWIFGTTLDSKTQSLLIVNNATNVVIKVCEFQFCNDPFLGVYYHKNNKSWMESEFRVYSSANNCTFEYVSQPFLMDLEGKQGNFKNLREFVFKNIDGYFKIYSKHTPINLVRDLPQGFWALEPLVDLPIGINITRFQTLLALHRSYLTPGDSSSGWTAGAAAYYVGYLQPRTFLLKYNENGTITDAVDCALDPLSETKCTLKSFTVEKGIYQTSNFRVQPTESIVRFPNITNLCPFGEVFNATRFASVYAWNRKRISNCVADYSVLYNSASFSTFKCYGVSPTKLNDLCFTNVYADSFVIRGDEVRQIAPGQTGKIADYNYKLPDDFTGCVIAWNSNNLDSKVGGNYNYLYRLFRKSNLKPFERDISTEIYQAGSTPCNGVEGFNCYFPLQSYGFQPTNGVGYQPYRVVVLSFELLHAPATVCGPKKSTNLVKNKCVNFNFNGLTGTGVLTESNKKFLPFQQFGRDIADTTDAVRDPQTLEILDITPCSFGGVSVITPGTNTSNQVAVLYQDVNCTEVPVAIHADQLTPTWRVYSTGSNVFQTRAGCLIGAEHVNNSYECDIPIGAGICASYQTQTNSPRRARSVASQSIIAYTMSLGAENSVAYSNNSIAIPTNFTISVTTEILPVSMTKTSVDCTMYICGDSTECSNLLLQYGSFCTQLNRALTGIAVEQDKNTQEVFAQVKQIYKTPPIKDFGGFNFSQILPDPSKPSKRSFIEDLLFNKVTLADAGFIKQYGDCLGDIAARDLICAQKFNGLTVLPPLLTDEMIAQYTSALLAGTITSGWWFGAGAALQIPFAMQMAYRFNGIGVTQNVLYENQKLIANQFNSAIGKIQDSLSSTASALGKLQDVVNQNAQALNTLVKQLSSNFGAISSVLNDILSRLDPPEAEVQIDRLITGRLQSLQTYVTQQLIRAAEIRWSANLAATKMSECVLGQSKRVDFCGKGYHLMSFPQSAPHGVVFLHVTYVPAQEKNFTTAPAICHDGKAHFPREGVFVSNGTHWFVTQRNFYEPQIITTDNTFVSGNCDVVIGIVNNTVYDPLQPELDSGGGGSDIIKLLNEQVNKEMQSSNLYMSMSSWCYTHSLDGAGLFLFDHAAEEYEHAKKLIIFLNENNVPVQLTSISAPEHKFEGLTQIFQKAYEHEQHISESINNIVDHAIKSKDHATFNFLQWYVAEQHEEEVLFKDILDKIELIGNENHGLYLADQYVKGIAKSRKS

SEQ ID NO: 8819 - protein, 1315 aa, Artificial Sequence
  SARS-CoV-2/China/WF0004/2020__EPI_ISL_413694 spike protein (1-1147)(K986P_V987P_T887W_A1020W) Ferritin construct
MFVFLVLLPLVSSQCVNLTTRTQLPPAYTNSFTRGVYYPDKVFRSSVLHSTQDLFLPFFSNVTWFHAIHVSGTNGTKRFDNPVLPFNDGVYFASTEKSNIIRGWIFGTTLDSKTQSLLIVNNATNVVIKVCEFQFCNDPFLGVYYHKNNKSWTESEFRVYSSANNCTFEYVSQPFLMDLEGKQGNFKNLREFVFKNIDGYFKIYSKHTPINLVRDLPQGFSALEPLVDLPIGINITRFQTLLALHRSYLTPGDSSSGWTAGAAAYYVGYLQPRTFLLKYNENGTITDAVDCALDPLSETKCTLKSFTVEKGIYQTSNFRVQPTESIVRFPNITNLCPFGEVFNATRFASVYAWNRKRISNCVADYSVLYNSASFSTFKCYGVSPTKLNDLCFTNVYADSFVIRGDEVRQIAPGQTGKIADYNYKLPDDFTGCVIAWNSNNLDSKVGGNYNYLYRLFRKSNLKPFERDISTEIYQAGSTPCNGVEGFNCYFPLQSYGFQPTNGVGYQPYRVVVLSFELLHAPATVCGPKKSTNLVKNKCVNFNFNGLTGTGVLTESNKKFLPFQQFGRDIADTTDAVRDPQTLEILDITPCSFGGVSVITPGTNTSNQVAVLYQDVNCTEVPVAIHADQLTPTWRVYSTGSNVFQTRAGCLIGAEHVNNSYECDIPIGAGICASYQTQTNSPRRARSVASQSIIAYTMSLGAENSVAYSNNSIAIPTNFTISVTTEILPVSMTKTSVDCTMYICGDSTECSNLLLQYGSFCTQLNRALTGIAVEQDKNTQEVFAQVKQIYKTPPIKDFGGFNFSQILPDPSKPSKRSFIEDLLFNKVTLADAGFIKQYGDCLGDIAARDLICAQKFNGLTVLPPLLTDEMIAQYTSALLAGTITSGWWFGAGAALQIPFAMQMAYRFNGIGVTQNVLYENQKLIANQFNSAIGKIQDSLSSTASALGKLQDVVNQNAQALNTLVKQLSSNFGAISSVLNDILSRLDPPEAEVQIDRLITGRLQSLQTYVTQQLIRAAEIRWSANLAATKMSECVLGQSKRFDFCGKGYHLMSFPQSAPHGVVFLHVTYVPAQEKNFTTAPAICHDGKAHFPREGVFVSNGTHWFVTQRNFYEPQIITTDNTFVSGNCDVVIGIVNNTVYDPLQPELDSGGGGSDIIKLLNEQVNKEMQSSNLYMSMSSWCYTHSLDGAGLFLFDHAAEEYEHAKKLIIFLNENNVPVQLTSISAPEHKFEGLTQIFQKAYEHEQHISESINNIVDHAIKSKDHATFNFLQWYVAEQHEEEVLFKDILDKIELIGNENHGLYLADQYVKGIAKSRKS

SEQ ID NO: 8820 - protein, 1315 aa, Artificial Sequence
  SARS-CoV-2/China/WF0028/2020__EPI_ISL_413791 spike protein (1-1147)(K986P_V987P_T887W_A1020W) Ferritin construct
MFVFLVLLPLVSSQCVNLTTRTQLPPAYTNSFTRGVYYPDKVFRSSVLHSTQDLFLPFFSNVTWFHAIHVSGTNGTKRFDNPVLPFNDGVYFASTEKSNIIRGWIFGTTLDSKTQSLLIVNNATNVVIKVCEFQFCNDPFLGVYYHKNNKSWMESEFRVYSSANNCTFEYVSQPFLMDLEGKQGNFKNLREFVFKNIDGYFKIYSKHTPINLVRDLPQGFSALEPLVDLPIGINITRFQTLLALHRSYLTPGDSSSGWTAGAAAYYVGYLQPRTFLLKYNENGTITDAVDCALDPLSETKCTLKSFTVEKGIYQTSNFRVQPTESIVRFPNITNLCPFGEVFNATRFASVYAWNRKRISNCVADYSVLYNSASFSTFKCYGVSPTKLNDLCFTNVYADSFVIRGDEVRQIAPGQTGKIADYNYKLPDDFTGCVIAWNSNNLDSKVGGNYNYLYRLFRKSNLKPFERDISTEIYQAGSTPCNGVEGFNCYFPLQSYGFQPTNGVGYQPYRVVVLSFELLHAPATVCGPKKSTNLVKNKCVNFNFNGLTGTGVLTESNKKFLPFQQFGRDIADTTDAVRDPQTLEILDITPCSFGGVSVITPGTNTSNQVAVLYQDVNCTEVPVAIHADQLTPTWRVYSTGSNVFQTRAGCLIGAEHVNNSYECDIPIGAGICASYQTQTNSPRRARSVASQSIIAYTMSLGAENSVAYSNNSIAIPTNFTISVTTEILPVSMTKTSVDCTMYICGDSTECSNLLLQYGSFCTQLNRALTGIAVEQDKNTQEVFAQVKQIYKTPPIKDFGGFNFSQILPDPSKPSKRSFIEDLLFNKVTLADAGFIKQYGDCLGDIAARDLICAQKFNGLTVLPPLLTDEMIAQYTSALLAGTITSGWWFGAGAALQIPFAMQMAYRFNGIGVTQNVLYENQKLIANQFNSAIGKIQDSLSSTASALGKLQDVVNQNAQALNTLVKQLSSNFGAISSVLNDILSRLDPPEAEVQIDRLITGRLQSLQTYVTQQLIRAAEIRWSANLAATKMSECVLGQSKRVDFCGKGYHLMSFPQSAPHGVVFLHVTYVPAQEKNFTTAPAICHDGKAHFPREGVFVSNGTHWFVTQRNFYEPQIITTDNTFVSGNCDVVIGIVNNTVYDPLQPELESGGGGSDIIKLLNEQVNKEMQSSNLYMSMSSWCYTHSLDGAGLFLFDHAAEEYEHAKKLIIFLNENNVPVQLTSISAPEHKFEGLTQIFQKAYEHEQHISESINNIVDHAIKSKDHATFNFLQWYVAEQHEEEVLFKDILDKIELIGNENHGLYLADQYVKGIAKSRKS

SEQ ID NO: 8821 - protein, 1315 aa, Artificial Sequence
  SARS-CoV-2/2019-nCoV/USA-CruiseA-18/2020__MT159716.1 spike protein (1-1147)(K986P_V987P_T887W_A1020W) Ferritin construct
MFVFLVLLPLVSSQCVNLTTRTQLPPAYTNSFTRGVYYPDKVFRSSVLHSTQDLFLPFFSNVTWFHAIHVSGTNGTKRFDNPVLPFNDGVYFASTEKSNIIRGWIFGTTLDSKTQSLLIVNNATNVVIKVCEFQFCNDPFLGVYYHKNNKSWMESELRVYSSANNCTFEYVSQPFLMDLEGKQGNFKNLREFVFKNIDGYFKIYSKHTPINLVRDLPQGFSALEPLVDLPIGINITRFQTLLALHRSYLTPGDSSSGWTAGAAAYYVGYLQPRTFLLKYNENGTITDAVDCALDPLSETKCTLKSFTVEKGIYQTSNFRVQPTESIVRFPNITNLCPFGEVFNATRFASVYAWNRKRISNCVADYSVLYNSASFSTFKCYGVSPTKLNDLCFTNVYADSFVIRGDEVRQIAPGQTGKIADYNYKLPDDFTGCVIAWNSNNLDSKVGGNYNYLYRLFRKSNLKPFERDISTEIYQAGSTPCNGVEGFNCYFPLQSYGFQPTNGVGYQPYRVVVLSFELLHAPATVCGPKKSTNLVKNKCVNFNFNGLTGTGVLTESNKKFLPFQQFGRDIADTTDAVRDPQTLEILDITPCSFGGVSVITPGTNTSNQVAVLYQDVNCTEVPVAIHADQLTPTWRVYSTGSNVFQTRAGCLIGAEHVNNSYECDIPIGAGICASYQTQTNSPRRARSVASQSIIAYTMSLGAENSVAYSNNSIAIPTNFTISVTTEILPVSMTKTSVDCTMYICGDSTECSNLLLQYGSFCTQLNRALTGIAVEQDKNTQEVFAQVKQIYKTPPIKDFGGFNFSQILPDPSKPSKRSFIEDLLFNKVTLADAGFIKQYGDCLGDIAARDLICAQKFNGLTVLPPLLTDEMIAQYTSALLAGTITSGWWFGAGAALQIPFAMQMAYRFNGIGVTQNVLYENQKLIANQFNSAIGKIQDSLSSTASALGKLQDVVNQNAQALNTLVKQLSSNFGAISSVLNDILSRLDPPEAEVQIDRLITGRLQSLQTYVTQQLIRAAEIRWSANLAATKMSECVLGQSKRVDFCGKGYHLMSFPQSAPHGVVFLHVTYVPAQEKNFTTAPAICHDGKAHFPREGVFVSNGTHWFVTQRNFYEPQIITTDNTFVSGNCDVVIGIVNNTVYDPLQPELDSGGGGSDIIKLLNEQVNKEMQSSNLYMSMSSWCYTHSLDGAGLFLFDHAAEEYEHAKKLIIFLNENNVPVQLTSISAPEHKFEGLTQIFQKAYEHEQHISESINNIVDHAIKSKDHATFNFLQWYVAEQHEEEVLFKDILDKIELIGNENHGLYLADQYVKGIAKSRKS

SEQ ID NO: 8822 - protein, 1315 aa, Artificial Sequence
  SARS-CoV-2/SARS-CoV-2/Yunnan-01/human/2020/CHN__MT049951.1 spike protein (1-1147)(K986P_V987P_T887W_A1020W) Ferritin construct
MFVFLVLLPLVSSQCVNLTTRTQLPPANTNSFTRGVYYPDKVFRSSVLHSTQDLFLPFFSNVTWFHAIHVSGTNGTKRFDNPVLPFNDGVYFASTEKSNIIRGWIFGTTLDSKTQSLLIVNNATNVVIKVCEFQFCNDPFLGVYYHKNNKSWMESEFRVYSSANNCTFEYVSQPFLMDLEGKQGNFKNLREFVFKNIDGYFKIYSKHTPINLVRDLPQGFSALEPLVDLPIGINITRFQTLLALHRSYLTPGDSSSGWTAGAAAYYVGYLQPRTFLLKYNENGTITDAVDCALDPLSETKCTLKSFTVEKGIYQTSNFRVQPTESIVRFPNITNLCPFGEVFNATRFASVYAWNRKRISNCVADYSVLYNSASFSTFKCYGVSPTKLNDLCFTNVYADSFVIRGDEVRQIAPGQTGKIADYNYKLPDDFTGCVIAWNSNNLDSKVGGNYNYLYRLFRKSNLKPFERDISTEIYQAGSTPCNGVEGFNCYFPLQSYGFQPTNGVGYQPYRVVVLSFELLHAPATVCGPKKSTNLVKNKCVNFNFNGLTGTGVLTESNKKFLPFQQFGRDIADTTDAVRDPQTLEILDITPCSFGGVSVITPGTNTSNQVAVLYQDVNCTEVPVAIHADQLTPTWRVYSTGSNVFQTRAGCLIGAEHVNNSYECDIPIGAGICASYQTQTNSPRRARSVASQSIIAYTMSLGAENSVAYSNNSIAIPTNFTISVTTEILPVSMTKTSVDCTMYICGDSTECSNLLLQYGSFCTQLNRALTGIAVEQDKNTQEVFAQVKQIYKTPPIKDFGGFNFSQILPDPSKPSKRSFIEDLLFNKVTLADAGFIKQYGDCLGDIAARDLICAQKFNGLTVLPPLLTDEMIAQYTSALLAGTITSGWWFGAGAALQIPFAMQMAYRFNGIGVTQNVLYENQKLIANQFNSAIGKIQDSLSSTASALGKLQDVVNQNAQALNTLVKQLSSNFGAISSVLNDILSRLDPPEAEVQIDRLITGRLQSLQTYVTQQLIRAAEIRWSANLAATKMSECVLGQSKRVDFCGKGYHLMSFPQSAPHGVVFLHVTYVPAQEKNFTTAPAICHDGKAHFPREGVFVSNGTHWFVTQRNFYEPQIITTDNTFVSGNCDVVIGIVNNTVYDPLQPELDSGGGGSDIIKLLNEQVNKEMQSSNLYMSMSSWCYTHSLDGAGLFLFDHAAEEYEHAKKLIIFLNENNVPVQLTSISAPEHKFEGLTQIFQKAYEHEQHISESINNIVDHAIKSKDHATFNFLQWYVAEQHEEEVLFKDILDKIELIGNENHGLYLADQYVKGIAKSRKS

SEQ ID NO: 8823 - protein, 1315 aa, Artificial Sequence
  SARS-CoV-2/USA/WA-UW292/2020__EPI_ISL_418077 spike protein (1-1147)(K986P_V987P_T887W_A1020W) Ferritin construct
MFVFLVLLPLVSSQCVNLTTRTQLPPAYTNSFTRGVYYPDKVFRSSVLHSTQDLFLPFFSNVTWFHAIHVSGTNGTKRFDNPVLPFNDGVYFASTEKSNIIRGWIFGTTLDSKTQSLLIVNNATNVVIKVCEFQFCNDPFLGVYYHKNNKSWMESEFRVYSSANNCTFEYVSQPFLMDLEGKQGNFKNLREFVFKNIDGYFKIYSKHTPINLVRDLPQGFSALEPLVDLPIGINITRFQTLLALHRSYLTPGDSSSGWTAGAAAYYVGYLQPRTFLLKYNENGTITDAVDCALDPLSETKCTLKSFTVEKGIYQTSNFRVQPTESIVRFPNITNLCPFGEVFNATRFASVYAWNRKRISNCVADYSVLYNSASFSTFKCYGVSPTKLNDLCFTNVYADSFVIRGDEVRQIAPGQTGKIADYNYKLPDDFTGCVIAWNSNNLDSKVGGNYNYLYRLFRKSNLKPFERDISTEIYQASSTPCNGVEGFNCYFPLQSYGFQPTNGVGYQPYRVVVLSFELLHAPATVCGPKKSTNLVKNKCVNFNFNGLTGTGVLTESNKKFLPFQQFGRDIADTTDAVRDPQTLEILDITPCSFGGVSVITPGTNTSNQVAVLYQDVNCTEVPVAIHADQLTPTWRVYSTGSNVFQTRAGCLIGAEHVNNSYECDIPIGAGICASYQTQTNSPRRARSVASQSIIAYTMSLGAENSVAYSNNSIAIPTNFTISVTTEILPVSMTKTSVDCTMYICGDSTECSNLLLQYGSFCTQLNRALTGIAVEQDKNTQEVFAQVKQIYKTPPIKDFGGFNFSQILPDPSKPSKRSFIEDLLFNKVTLADAGFIKQYGDCLGDIAARDLICAQKFNGLTVLPPLLTDEMIAQYTSALLAGTITSGWWFGAGAALQIPFAMQMAYRFNGIGVTQNVLYENQKLIANQFNSAIGKIQDSLSSTASALGKLQDVVNQNAQALNTLVKQLSSNFGAISSVLNDILSRLDPPEAEVQIDRLITGRLQSLQTYVTQQLIRAAEIRWSANLAATKMSECVLGQSKRVDFCGKGYHLMSFPQSAPHGVVFLHVTYVPAQEKNFTTAPAICHDGKAHFPREGVFVSNGTHWFVTQRNFYEPQIITTDNTFVSGNCDVVIGIVNNTVYDPLQPELDSGGGGSDIIKLLNEQVNKEMQSSNLYMSMSSWCYTHSLDGAGLFLFDHAAEEYEHAKKLIIFLNENNVPVQLTSISAPEHKFEGLTQIFQKAYEHEQHISESINNIVDHAIKSKDHATFNFLQWYVAEQHEEEVLFKDILDKIELIGNENHGLYLADQYVKGIAKSRKS

SEQ ID NO: 8824 - protein, 1315 aa, Artificial Sequence
  SARS-CoV-2/Iceland/192/2020__EPI_ISL_417819 spike protein (1-1147)(K986P_V987P_T887W_A1020W) Ferritin construct
MFVFFVLLPLVSSQCVNLTTRTQLPPAYTNSFTRGVYYPDKVFRSSVLHSTQDLFLPFFSNVTWFHAIHVSGTNGTKRFDNPVLPFNDGVYFASTEKSNIIRGWIFGTTLDSKTQSLLIVNNATNVVIKVCEFQFCNDPFLGVYYHKNNKSWMESEFRVYSSANNCTFEYVSQPFLMDLEGKQGNFKNLREFVFKNIDGYFKIYSKHTPINLVRDLPQGFSALEPLVDLPIGINITRFQTLLALHRSYLTPGDSSSGWTAGAAAYYVGYLQPRTFLLKYNENGTITDAVDCALDPLSETKCTLKSFTVEKGIYQTSNFRVQPTESIVRFPNITNLCPFGEVFNATRFASVYAWNRKRISNCVADYSVLYNSASFSTFKCYGVSPTKLNDLCFTNVYADSFVIRGDEVRQIAPGQTGKIADYNYKLPDDFTGCVIAWNSNNLDSKVGGNYNYLYRLFRKSNLKPFERDISTEIYQAGSTPCNGVEGFNCYFPLQSYGFQPTNGVGYQPYRVVVLSFELLHAPATVCGPKKSTNLVKNKCVNFNFNGLTGTGVLTESNKKFLPFQQFGRDIADTTDAVRDPQTLEILDITPCSFGGVSVITPGTNTSNQVAVLYQGVNCTEVPVAIHADQLTPTWRVYSTGSNVFQTRAGCLIGAEHVNNSYECDIPIGAGICASYQTQTNSPRRARSVASQSIIAYTMSLGAENSVAYSNNSIAIPTNFTISVTTEILPVSMTKTSVDCTMYICGDSTECSNLLLQYGSFCTQLNRALTGIAVEQDKNTQEVFAQVKQIYKTPPIKDFGGFNFSQILPDPSKPSKRSFIEDLLFNKVTLADAGFIKQYGDCLGDIAARDLICAQKFNGLTVLPPLLTDEMIAQYTSALLAGTITSGWWFGAGAALQIPFAMQMAYRFNGIGVTQNVLYENQKLIANQFNSAIGKIQDSLSSTASALGKLQDVVNQNAQALNTLVKQLSSNFGAISSVLNDILSRLDPPEAEVQIDRLITGRLQSLQTYVTQQLIRAAEIRWSANLAATKMSECVLGQSKRVDFCGKGYHLMSFPQSAPHGVVFLHVTYVPAQEKNFTTAPAICHDGKAHFPREGVFVSNGTHWFVTQRNFYEPQIITTDNTFVSGNCDVVIGIVNNTVYDPLQPELDSGGGGSDIIKLLNEQVNKEMQSSNLYMSMSSWCYTHSLDGAGLFLFDHAAEEYEHAKKLIIFLNENNVPVQLTSISAPEHKFEGLTQIFQKAYEHEQHISESINNIVDHAIKSKDHATFNFLQWYVAEQHEEEVLFKDILDKIELIGNENHGLYLADQYVKGIAKSRKS

SEQ ID NO: 8825 - protein, 1315 aa, Artificial Sequence
  SARS-CoV-2/Belgium/ULG-6939/2020__EPI_ISL_417020 spike protein (1-1147)(K986P_V987P_T887W_A1020W) Ferritin construct
MFVFLVLLPLVSSQCVNLTTRTQLPPAYTNSFTRGVYYPDKVFRSSVLHSTQDLFLPFFSNVTWFHAIHVSGTNGTKRFDNPVLPFNDGVYFASTEKSNIIRGWIFGTTLDSKTQSLLIVNNATNVVIKVCEFQFCNDPFLGVYYHKNNKSWMESEFRVYSSANNCTFEYVSQPFLMDLEGKQGNFKNLREFVFKNIDGYFKIYSKHTPINLVRDLPQGFSALEPLVDLPIGINITRFQTLLALHRSYLTPGDSSSGWTAGAAAYYVGYLQPRTFLLKYNENGTITDAVDCALDPLSETKCTLKSFTVEKGIYQTSNFRVQPTESIVRFPNITNLCPFGEVFNATRFASVYAWNRKRISNCVADYSVLYNSASFSTFKCYGVSPTKLNDLCFTNVYADSFVIRGDEVRQIAPGQTGKIADYNYKLPDDFTGCVIAWNSNNLDSKVGGNYNYLYRLFRKSNLKPFERDISTEIYQAGSTPCNGVEGFNCYFPLQSYGFQPTNGVGYQPYRVVVLSFELLHAPATVCGPKKSTNLVKNKCVNFNFNGLTGTGVLTESNKKFLPFQQFGRDIADTTDAVRDPQTLEILDITPCSFGGVSVITPGTNTSNQVAVLYQGVNCTEVPVAIHADQLTPTWRVYSTGSNVFQTRAGCLIGAEHVNNSYECDIPIGAGICASYQTQTNSPRRARSVASQSIIAYTMSLGAENSVVYSNNSIAIPTNFTISVTTEILPVSMTKTSVDCTMYICGDSTECSNLLLQYGSFCTQLNRALTGIAVEQDKNTQEVFAQVKQIYKTPPIKDFGGFNFSQILPDPSKPSKRSFIEDLLFNKVTLADAGFIKQYGDCLGDIAARDLICAQKFNGLTVLPPLLTDEMIAQYTSALLAGTITSGWWFGAGAALQIPFAMQMAYRFNGIGVTQNVLYENQKLIANQFNSAIGKIQDSLSSTASALGKLQDVVNQNAQALNTLVKQLSSNFGAISSVLNDILSRLDPPEAEVQIDRLITGRLQSLQTYVTQQLIRAAEIRWSANLAATKMSECVLGQSKRVDFCGKGYHLMSFPQSAPHGVVFLHVTYVPAQEKNFTTAPAICHDGKAHFPREGVFVSNGTHWFVTQRNFYEPQIITTDNTFVSGNCDVVIGIVNNTVYDPLQPELDSGGGGSDIIKLLNEQVNKEMQSSNLYMSMSSWCYTHSLDGAGLFLFDHAAEEYEHAKKLIIFLNENNVPVQLTSISAPEHKFEGLTQIFQKAYEHEQHISESINNIVDHAIKSKDHATFNFLQWYVAEQHEEEVLFKDILDKIELIGNENHGLYLADQYVKGIAKSRKS

SEQ ID NO: 8826 - protein, 1315 aa, Artificial Sequence
  SARS-CoV-2/France/HF2496/2020__EPI_ISL_418231 spike protein (1-1147)(K986P_V987P_T887W_A1020W) Ferritin construct
MFVFLVLLPLVSSQCVNLTTRTQLPPAYTNSFTRGVYYPDKVFRSSVLHSTQDLFLPFFSNVTWFHAIHVSGTNGTKRFDNPVLPFNDGVYFASTEKSNIIRGWIFGTTLDSKTQSLLIVNNATNVVIKVCEFQFCNDPFLGVYYHKNNKSWMESEFRVYSSANNCTFEYVSQPFLMDLEGKQGNFKNLREFVFKNIDGYFKIYSKHTPINLVRDLPQGFSALEPLVDLPIGINITRFQTLLALHRSYLTPGDSSSGWTAGAAAYYVGYLQPRTFLLKYNENGTITDAVDCALDPLSETKCTLKSFTVEKGIYQTSNFRVQPTESIVRFPNITNLCPFGEVFNATRFASVYAWNRKRISNCVADYSVLYNSASFSTFKCYGVSPTKLNDLCFTNVYADSFVIRGDEVRQIAPGQTGKIADYNYKLPDDFTGCVIAWNSNNLDSKVGGNYNYLYRLFRKSNLKPFERDISTEIYQAGSTPCNGVEGFNCYFPLQSYGFQPTNGVGYQPYRVVVLSFELLHAPATVCGPKKSTNLVKNKCVNFNFNGLTGTGVLTESNKKFLPFQQFGRDIADTTDAVRDPQTLEILDITPCSFGGVSVITPGTNTSNQVAVLYQGVNCTEVPVAIHADQLTPTWRVYSTGSNVFQTRAGCLIGAEHVNNSYECDIPIGAGICASYQTQTNSPRRARSVASQSIIAYTMSLGAENSVAYSNNSIAIPTNFTISVTTEILPVSMTKTSVDCTMYICGDSTECSNLLLQYGSFCTQLNRALTGIAVEQDKNTQEVFAQVKQIYKTPPIKDFGGFNFSQILPDPSKPSKRSFIEDLLFNKVTLADAGFIKQYGDCLGDIVARDLICAQKFNGLTVLPPLLTDEMIAQYTSALLAGTITSGWWFGAGAALQIPFAMQMAYRFNGIGVTQNVLYENQKLIANQFNSAIGKIQDSLSSTASALGKLQDVVNQNAQALNTLVKQLSSNFGAISSVLNDILSRLDPPEAEVQIDRLITGRLQSLQTYVTQQLIRAAEIRWSANLAATKMSECVLGQSKRVDFCGKGYHLMSFPQSAPHGVVFLHVTYVPAQEKNFTTAPAICHDGKAHFPREGVFVSNGTHWFVTQRNFYEPQIITTDNTFVSGNCDVVIGIVNNTVYDPLQPELDSGGGGSDIIKLLNEQVNKEMQSSNLYMSMSSWCYTHSLDGAGLFLFDHAAEEYEHAKKLIIFLNENNVPVQLTSISAPEHKFEGLTQIFQKAYEHEQHISESINNIVDHAIKSKDHATFNFLQWYVAEQHEEEVLFKDILDKIELIGNENHGLYLADQYVKGIAKSRKS

SEQ ID NO: 8827 - protein, 1315 aa, Artificial Sequence
  SARS-CoV-2/USA/WA-UW291/2020__EPI_ISL_418076 spike protein (1-1147)(K986P_V987P_T887W_A1020W) Ferritin construct
MFVFLVLLPLVSSQCVNLTTRTQLPPAYTNSFTRGVYYPDKVFRSSVLHSTQDLFLPFFSNVTWFHAIHVSGTNGTKRFDNPVLPFNDGVYFASTEKSNIIRGWIFGTTLDSKTQSLLIVNNATNVVIKVCEFQFCNDPFLGVYYHKNNKSWMESEFRVYSSANNCTFEYVSQPFLMDLEGKQGNFKNLREFVFKNIDGYFKIYSKHTPINLVRDLPQGFSALEPLVDLPIGINITRFQTLLALHRSYLTPGDSSSGWTAGAAAYYVGYLQPRTFLLKYNENGTITDAVDCALDPLSETKCTLKSFTVEKGIYQTSNFRVQPTESIVRFPNITNLCPFGEVFNATRFASVYAWNRKRISNCVADYSVLYNSASFSTFKCYGVSPTKLNDLCFTNVYADSFVIRGDEVRQIAPGQTGKIADYNYKLPDDFTGCVIAWNSNNLDSKVGGNYNYLYRLFRKSNLKPFERDISTEIYQAGSTPCNGVEGFNCYFPLQSYGFQPTNGVGYQPYRVVVLSFELLHAPATVCGPKKSTNLVKNKCVNFNFNGLTGTGVLTESNKKFLPFQQFGRDIADTTDAVRDPQTLEILDITPCSFGGVSVITPGTNTSNQVAVLYQGVNCTEVPVAIHADQLTPTWRVYSTGSNVFQTRAGCLIGAEHVNNSYECDIPIGAGICASYQTQTNSPRRARSVASQSIIAYTMSLGAENSVAYSNNSIAIPTNFTISVTTEILPVSMTKTSVDCTMYICGDSTECSNLLLQYGSFCTQLNRALTGIAVEQDKNTQEVFAQVKQIYKTPPIKDFGGFNFSQILPDPSKPSKRSFIEDLLFNKVTLADAGFIKQYGDCLGDIAARDLICAQKFNGLTVLPPLLTDEMIAQYTSALLAGTITSGWWFGAGAALQIPFAMQMAYRFNGIGVTQNVLYENQKLIANQFNSAIGKIQYSLSSTASALGKLQDVVNQNAQALNTLVKQLSSNFGAISSVLNDILSRLDPPEAEVQIDRLITGRLQSLQTYVTQQLIRAAEIRWSANLAATKMSECVLGQSKRVDFCGKGYHLMSFPQSAPHGVVFLHVTYVPAQEKNFTTAPAICHDGKAHFPREGVFVSNGTHWFVTQRNFYEPQIITTDNTFVSGNCDVVIGIVNNTVYDPLQPELDSGGGGSDIIKLLNEQVNKEMQSSNLYMSMSSWCYTHSLDGAGLFLFDHAAEEYEHAKKLIIFLNENNVPVQLTSISAPEHKFEGLTQIFQKAYEHEQHISESINNIVDHAIKSKDHATFNFLQWYVAEQHEEEVLFKDILDKIELIGNENHGLYLADQYVKGIAKSRKS

SEQ ID NO: 8828 - protein, 1315 aa, Artificial Sequence; identical to SEQ ID NO: 8791
  SARS-CoV-2/Portugal/PT0034/2020__EPI_ISL_418019 spike protein (1-1147)(K986P_V987P_T887W_A1020W) Ferritin construct

SEQ ID NO: 8829 - protein, 1315 aa, Artificial Sequence; identical to SEQ ID NO: 8783
  SARS-CoV-2/Iceland/202/2020__EPI_ISL_417750 spike protein (1-1147)(K986P_V987P_T887W_A1020W) Ferritin construct

SEQ ID NO: 8830 - protein, 1315 aa, Artificial Sequence
  SARS-CoV-2/USA/WA-UW261/2020__EPI_ISL_418046 spike protein (1-1147)(K986P_V987P_T887W_A1020W) Ferritin construct
MFVFLVLLPLVSSQCVNLTTRTQLPPAYTNSFTRGVYYPDKVFRSSVLHSTQDLFLPFFSNVTWFHAIHVSGTNGTKRFDNPVLPFNDGVYFASTEKSNIIRGWIFGTTLDSKTQSLLIVNNATNVVIKVCEFQFCNDPFLGVYYHKNNKSWMESEFRVYSSANNCTFEYVSQPFLMDLEGKQGNFKNLREFVFKNIDGYFKIYSKHTPINLVRDLPQGFSALEPLVDLPIGINITRFQTLLALHRSYLTPGDSSSGWTAGAAAYYVGYLQPRTFLLKYNENGTITDAVDCALDPLSETKCTLKSFTVEKGIYQTSNFRVQPTESIVRFPNITNLCPFGEVFNATRFTSVYAWNRKRISNCVADYSVLYNSASFSTFKCYGVSPTKLNDLCFTNVYADSFVIRGDEVRQIAPGQTGKIADYNYKLPDDFTGCVIAWNSNNLDSKVGGNYNYLYRLFRKSNLKPFERDISTEIYQAGSTPCNGVEGFNCYFPLQSYGFQPTNGVGYQPYRVVVLSFELLHAPATVCGPKKSTNLVKNKCVNFNFNGLTGTGVLTESNKKFLPFQQFGRDIADTTDAVRDPQTLEILDITPCSFGGVSVITPGTNTSNQVAVLYQDVNCTEVPVAIHADQLTPTWRVYSTGSNVFQTRAGCLIGAEHVNNSYECDIPIGAGICASYQTQTNSPRRARSVASQSIIAYTMSLGAENSVAYSNNSIAIPTNFTISVTTEILPVSMTKTSVDCTMYICGDSTECSNLLLQYGSFCTQLNRALTGIAVEQDKNTQEVFAQVKQIYKTPPIKDFGGFNFSQILPDPSKPSKRSFIEDLLFNKVTLADAGFIKQYGDCLGDIAARDLICAQKFNGLTVLPPLLTDEMIAQYTSALLAGTITSGWWFGAGAALQIPFAMQMAYRFNGIGVTQNVLYENQKLIANQFNSAIGKIQDSLSSTASALGKLQDVVNQNAQALNTLVKQLSSNFGAISSVLNDILSRLDPPEAEVQIDRLITGRLQSLQTYVTQQLIRAAEIRWSANLAATKMSECVLGQSKRVDFCGKGYHLMSFPQSAPHGVVFLHVTYVPAQEKNFTTAPAICHDGKAHFPREGVFVSNGTHWFVTQRNFYEPQIITTDNTFVSGNCDVVIGIVNNTVYDPLQPELDSGGGGSDIIKLLNEQVNKEMQSSNLYMSMSSWCYTHSLDGAGLFLFDHAAEEYEHAKKLIIFLNENNVPVQLTSISAPEHKFEGLTQIFQKAYEHEQHISESINNIVDHAIKSKDHATFNFLQWYVAEQHEEEVLFKDILDKIELIGNENHGLYLADQYVKGIAKSRKS

SEQ ID NO: 8831 - protein, 1315 aa, Artificial Sequence
  SARS-CoV-2/Portugal/PT0035/2020__EPI_ISL_418020 spike protein (1-1147)(K986P_V987P_T887W_A1020W) Ferritin construct
MFVFLVLLPLVSSQCVNLTTRTQLPPAYTNSFTRGVYYPDKVFRSSVLHSTQDLFLPFFSNVTWFHAIHVSGTNGTKRFDNPVLPFNDGVYFASTEKSNIIRGWIFGTTLDSKTQSLLIVNNATNVVIKVCEFQFCNDPFLGVYYHKNNKSWMESEFRVYSSANNCTFEYVSQPFLMDLEGKQGNFKNLREFVFKNIDGYFKIYSKHTPINLVRDLPQGFSALEPLVDLPIGINITRFQTLLALHRSYLTPGDSSSGWTAGAAAYYVGYLQPRTFLLKYNENGTITDAVDCALDPLSETKCTLKSFTVEKGIYQTSNFRVQPTESIVRFPNITNLCPFGEVFNATRFASVYAWNRKRISNCVADYSVLYNSASFSTFKCYGVSPTKLNDLCFTNVYADSFVIRGDEVRQIAPGQTGKIADYNYKLPDDFTGCVIAWNSNNLDSKVGGNYNYLYRLFRKSNLKPFERDISTEIYQAGSTPCNGVEGFNCYFPLQSYGFQPTNGVGYQPYRVVVLSFELLHAPATVCGPKKSTNLVKNKCVNFNFNGLTGTGVLTESNKKFLPFQQFGRDIADTTDAVRDPQTLEILDITPCSFGGVSVITPGTNTSNQVAVLYQDVNCTEVPVAIHADQLTPTWRVYSTGSNVFQTRAGCLIGAEHVNNSYECDIPIGAGICASYQTQTNSPRRARSVASQSIIAYTMSLGAENSVAYSNNSIAIPTNFTISVTTEILPVSMTKTSVDCTMYICGDSTECSNLLLQYGSFCTQLNRALTGIAVEQDKNTQEVFAQVKQIYKTPPIKDFGGFNFSQILPDPSKPSKRSFIEDLLFNKVTLADAGFIKQYGDCLGDISARDLICAQKFNGLTVLPPLLTDEMIAQYTSALLAGTITSGWWFGAGAALQIPFAMQMAYRFNGIGVTQNVLYENQKLIANQFNSAIGKIQDSLSSTASALGKLQDVVNQNAQALNTLVKQLSSNFGAISSVLNDILSRLDPPEAEVQIDRLITGRLQSLQTYVTQQLIRAAEIRWSANLAATKMSECVLGQSKRVDFCGKGYHLMSFPQSAPHGVVFLHVTYVPAQEKNFTTAPAICHDGKAHFPREGVFVSNGTHWFVTQRNFYEPQIITTDNTFVSGNCDVVIGIVNNTVYDPLQPELDSGGGGSDIIKLLNEQVNKEMQSSNLYMSMSSWCYTHSLDGAGLFLFDHAAEEYEHAKKLIIFLNENNVPVQLTSISAPEHKFEGLTQIFQKAYEHEQHISESINNIVDHAIKSKDHATFNFLQWYVAEQHEEEVLFKDILDKIELIGNENHGLYLADQYVKGIAKSRKS

SEQ ID NO: 8832 - protein, 1315 aa, Artificial Sequence
  SARS-CoV-2/USA/NY-NYUMC7/2020__EPI_ISL_418192 spike protein (1-1147)(K986P_V987P_T887W_A1020W) Ferritin construct
MFVFLVLLPLVSSQCVNLTTRTQLPPAYTNSFTRGVYYPDKVFRSSVLHSTQDLFLPFFSNVTWFHAIHVSGTNGTKRFDNPVLPFNDGVYFASTEKSNIIRGWIFGTTLDSKTQSLLIVNNATNVVIKVCEFQFCNDPFLGVYHHKNNKSWMESEFRVYSSANNCTFEYVSQPFLMDLEGKQGNFKNLREFVFKNIDGYFKIYSKHTPINLVRDLPQGFSALEPLVDLPIGINITRFQTLLALHRSYLTPGDSSSGWTAGAAAYYVGYLQPRTFLLKYNENGTITDAVDCALDPLSETKCTLKSFTVEKGIYQTSNFRVQPTESIVRFPNITNLCPFGEVFNATRFASVYAWNRKRISNCVADYSVLYNSASFSTFKCYGVSPTKLNDLCFTNVYADSFVIRGDEVRQIAPGQTGKIADYNYKLPDDFTGCVIAWNSNNLDSKVGGNYNYLYRLFRKSNLKPFERDISTEIYQAGSTPCNGVEGFNCYFPLQSYGFQPTNGVGYQPYRVVVLSFELLHAPATVCGPKKSTNLVKNKCVNFNFNGLTGTGVLTESNKKFLPFQQFGRDIADTTDAVRDPQTLEILDITPCSFGGVSVITPGTNTSNQVAVLYQGVNCTEVPVAIHADQLTPTWRVYSTGSNVFQTRAGCLIGAEHVNNSYECDIPIGAGICASYQTQTNSPRRARSVASQSIIAYTMSLGAENSVAYSNNSIAIPTNFTISVTTEILPVSMTKTSVDCTMYICGDSTECSNLLLQYGSFCTQLNRALTGIAVEQDKNTQEVFAQVKQIYKTPPIKDFGGFNFSQILPDPSKPSKRSFIEDLLFNKVTLADAGFIKQYGDCLGDIAARDLICAQKFNGLTVLPPLLTDEMIAQYTSALLAGTITSGWWFGAGAALQIPFAMQMAYRFNGIGVTQNVLYENQKLIANQFNSAIGKIQDSLSSTASALGKLQDVVNQNAQALNTLVKQLSSNFGAISSVLNDILSRLDPPEAEVQIDRLITGRLQSLQTYVTQQLIRAAEIRWSANLAATKMSECVLGQSKRVDFCGKGYHLMSFPQSAPHGVVFLHVTYVPAQEKNFTTAPAICHDGKAHFPREGVFVSNGTHWFVTQRNFYEPQIITTDNTFVSGNCDVVIGIVNNTVYDPLQPELDSGGGGSDIIKLLNEQVNKEMQSSNLYMSMSSWCYTHSLDGAGLFLFDHAAEEYEHAKKLIIFLNENNVPVQLTSISAPEHKFEGLTQIFQKAYEHEQHISESINNIVDHAIKSKDHATFNFLQWYVAEQHEEEVLFKDILDKIELIGNENHGLYLADQYVKGIAKSRKS

SEQ ID NO: 8833 - protein, 1315 aa, Artificial Sequence
  SARS-CoV-2/Iceland/189/2020__EPI_ISL_417709 spike protein (1-1147)(K986P_V987P_T887W_A1020W) Ferritin construct
MFVFLVLLPLVSSQCVNLTTRTQLPPAYTNSFTRGVYYPDKVFRSSVLHSTQDLFLPFFSNVTWFHAIHVSGTNGTKRFDNPVLPFNDGVYFASTEKSNIIRGWIFGTTLDSKTQSLLIVNNATNVVIKVCEFQFCNDPFLGVYYHKNNKSWMESEFRVYSSANNCTFEYVSQPFLMDLEGKQGNFKNLREFVFKNIDGYFKIYSKHTPINLVRDLPQGFSALEPLVDLPIGINITRFQTLLALHRSYLTPGDSSSGWTAGAAAYYVGYLQPRTFLLKYNENGTITDAVDCALDPLSETKCTLKSFTVEKGIYQTSNFRVQPTESIVRFPNITNLCPFGEVFNATRFASVYAWNRKRISNCVADYSVLYNSASFSTFKCYGVSPTKLNDLCFTNVYADSFVIRGDEVRQIAPGQTGKIADYNYKLPDDFTGCVIAWNSNNLDSKVGGNYNYLYRLFRKSNLKPFERDISTEIYQAGSTPCNGVEGFNCYFPLQSYGFQPTNGVGYQPYRVVVLSFELLHAPATVCGPKKSTNLVKNKCVNFNFNGLTGTGVLTESNKKFLPFQQFGRDIADTTDAVRDPQTLEILDITPCSFGGVSVITPGTNTSNQVAVLYQGVNCTEVPVAIHADQLTPTWRVYSTGSNVFQTRAGCLIGAEHVNNSYECDIPIGAGICASYQTQTNSPRRARSVASQSIIAYTMSLGAENSVAYSNNSIAIPTNFTISVTTEILPVSMTKTSVDCTMYICGDSTECSNLLLQYGSFCTQLNRALTGIAVEQDKNTQEVFAQVKQIYKTPPIKDFGGFNFSQILPDPSKPSKRSFIEDLLFNKVTLADAGFTKQYGDCLGDIAARDLICAQKFNGLTVLPPLLTDEMIAQYTSALLAGTITSGWWFGAGAALQIPFAMQMAYRFNGIGVTQNVLYENQKLIANQFNSAIGKIQDSLSSTASALGKLQDVVNQNAQALNTLVKQLSSNFGAISSVLNDILSRLDPPEAEVQIDRLITGRLQSLQTYVTQQLIRAAEIRWSANLAATKMSECVLGQSKRVDFCGKGYHLMSFPQSAPHGVVFLHVTYVPAQEKNFTTAPAICHDGKAHFPREGVFVSNGTHWFVTQRNFYEPQIITTDNTFVSGNCDVVIGIVNNTVYDPLQPELDSGGGGSDIIKLLNEQVNKEMQSSNLYMSMSSWCYTHSLDGAGLFLFDHAAEEYEHAKKLIIFLNENNVPVQLTSISAPEHKFEGLTQIFQKAYEHEQHISESINNIVDHAIKSKDHATFNFLQWYVAEQHEEEVLFKDILDKIELIGNENHGLYLADQYVKGIAKSRKS

SEQ ID NO: 8834 - protein, 1315 aa, Artificial Sequence
  SARS-CoV-2/Australia/NSW56/2020__EPI_ISL_417408 spike protein (1-1147)(K986P_V987P_T887W_A1020W) Ferritin construct
MFVFLVLLPLVSSQCVNLTTRTQLPPAYTNSFTRGVYYPDKVFRSSVLHSTQDLFLPFFSNVTWFHAIHVSGTNGTKRFDNPVLPFNDGVYFASTEKSNIIRGWIFGTTLDSKTQSLLIVNNATNVVIKVCEFQFCNDPFLGVYYHKNNKSWMESEFRVYSSANNCTFEYVSQPFLMDLEGKQGNFKNLREFVFKNIDGYFKIYSKHTPINLVRDLPQGFSALEPLVDLPIGINITRFQTLLALHRSYLTPGDSSSGWTAGAAAYYVGYLQPRTFLLKYNENGTITDAVDCALDPLSETKCTLKSFTVEKGIYQTSNFRVQPTESIVRFPNITNLCPFGEVFNATRFASVYAWNRKRISNCVADYSVLYNSASFSTFKCYGVSPTKLNDLCFTNVYADSFVIRGDEVRQIAPGQTGKIADYNYKLPDDFTGCVIAWNSNNLDSKVGGNYNYLYRLFRKSNLKPFERDISTEIYQAGSTPCNGVEGFNCYFPLQSYGFQPTNGVGYQPYRVVVLSFELLHAPATVCGPKKSTNLVKNKCVNFNFNGLTGTGVLTESNKKFLPFQQFGRDIADTTDAVRDPQTLEILDITPCSFGGVSVITPGTNTSNQVAVLYQDVNCTEVPVAIHADQLTPTWRVYSTGSNVFQTRAGCLIGAEHVNNSYECDIPIGAGICASYQTQTNSPRRARSVASQSIIAYTMSLGAENSVAYSNNSIAIPTNFTISVTTEILPVSMTKTSVDCTMYICGDSTECSNLLLQYGSFCTQLNRALTGIAVEQDKNTQEVFAQVKQIYKTPPIKDFGGFNFSQILPDSSKPSKRSFIEDLLFNKVTLADAGFIKQYGDCLGDIAARDLICAQKFNGLTVLPPLLTDEMIAQYTSALLAGTITSGWWFGAGAALQIPFAMQMAYRFNGIGVTQNVLYENQKLIANQFNSAIGKIQDSLSSTASALGKLQDVVNQNAQALNTLVKQLSSNFGAISSVLNDILSRLDPPEAEVQIDRLITGRLQSLQTYVTQQLIRAAEIRWSANLAATKMSECVLGQSKRVDFCGKGYHLMSFPQSAPHGVVFLHVTYVPAQEKNFTTAPAICHDGKAHFPREGVFVSNGTHWFVTQRNFYEPQIITTDNTFVSGNCDVVIGIVNNTVYDPLQPELDSGGGGSDIIKLLNEQVNKEMQSSNLYMSMSSWCYTHSLDGAGLFLFDHAAEEYEHAKKLIIFLNENNVPVQLTSISAPEHKFEGLTQIFQKAYEHEQHISESINNIVDHAIKSKDHATFNFLQWYVAEQHEEEVLFKDILDKIELIGNENHGLYLADQYVKGIAKSRKS

SEQ ID NO: 8835 - protein, 1315 aa, Artificial Sequence
  SARS-CoV-2/Iceland/280/2020__EPI_ISL_417608 spike protein (1-1147)(K986P_V987P_T887W_A1020W) Ferritin construct
MFVFLVLLPLVSSQCVNLTTRTQLPPAYTNSFTRGVYYPDKVFRSSVLHSTQDLFLPFFSNVTWFHAIHVSGTNGTKRFDNPVLPFNDGVYFASTEKSNIIRGWIFGTTLDSKTQSLLIVNNATNVVIKVCEFQFCNDPFLGVYYHKNNKSWMESEFRVYSSANNCTFEYVSQPFLMDLEGKQGNFKNLREFVFKNIDGYFKIYSKHTPINLVRDLPQGFSALEPLVDLPIGINITRFQTLLALHRSYLTPGDSSSGWTAGAAAYYVGYLQPRTFLLKYNENGTITDAVDCALDPLSETKCTLKSFTVEKGIYQTSNFRVQPTESIVRFPNITNLCPFGEVFNATRFASVYAWNRKRISNCVADYSVLYNSASFSTFKCYGVSPTKLNDLCFTNVYADSFVIRGDEVRQIAPGQTGKIADYNYKLPDDFTGCVIAWNSNNLDSKVGGNYNYLYRLFRKSNLKPFERDISTEIYQAGSTPCNGVEGFNCYFPLQSYGFQPTNGVGYQPYRVVVLSFELLHAPATVCGPKKSTNLVKNKCVNFNFNGLTGTGVLTESNKKFLPFQQFGRDIADTTDAVRDPQTLEILDITPCSFGGVSVITPGTNTSNQVAVLYQGVNCTEVPVAIHADQLTPTWRVYSTGSNVFQTRAGCLIGAEHVNNSYECDIPIGAGICASYHTQTNSPRRARSVASQSIIAYTMSLGAENSVAYSNNSIAIPTNFTISVTTEILPVSMTKTSVDCTMYICGDSTECSNLLLQYGSFCTQLNRALTGIAVEQDKNTQEVFAQVKQIYKTPPIKDFGGFNFSQILPDPSKPSKRSFIEDLLFNKVTLADAGFIKQYGDCLGDIAARDLICAQKFNGLTVLPPLLTDEMIAQYTSALLAGTITSGWWFGAGAALQIPFAMQMAYRFNGIGVTQNVLYENQKLIANQFNSAIGKIQDSLSSTASALGKLQDVVNQNAQALNTLVKQLSSNFGAISSVLNDILSRLDPPEAEVQIDRLITGRLQSLQTYVTQQLIRAAEIRWSANLAATKMSECVLGQSKRVDFCGKGYHLMSFPQSAPHGVVFLHVTYVPAQEKNFTTAPAICHDGKAHFPREGVFVSNGTHWFVTQRNFYEPQIITTDNTFVSGNCDVVIGIVNNTVYDPLQPELDSGGGGSDIIKLLNEQVNKEMQSSNLYMSMSSWCYTHSLDGAGLFLFDHAAEEYEHAKKLIIFLNENNVPVQLTSISAPEHKFEGLTQIFQKAYEHEQHISESINNIVDHAIKSKDHATFNFLQWYVAEQHEEEVLFKDILDKIELIGNENHGLYLADQYVKGIAKSRKS

SEQ ID NO: 8836 - protein, 1315 aa, Artificial Sequence; identical to SEQ ID NO: 8791
  SARS-CoV-2/Iceland/247/2020__EPI_ISL_417575 spike protein (1-1147)(K986P_V987P_T887W_A1020W) Ferritin construct

SEQ ID NO: 8837 - protein, 1315 aa, Artificial Sequence
  SARS-CoV-2/Iceland/238/2020__EPI_ISL_417566 spike protein (1-1147)(K986P_V987P_T887W_A1020W) Ferritin construct
MFVFLVLLPLVSSQCVNLTTRTQLPPAYTNSFTRGVYYPDKVFRSSVLHSTQDLFLPFFSNVTWFHAIHVSGTNGTKRFDNPVLPFNDGVYFASTEKSNIIRGWIFGTTLDSKTQSLLIVNNATNVVIKVCEFQFCNDPFLGVYYHKNNKSWMESEFRVYSSANNCTFEYVSQPFLMDLEGKQGNFKNLREFVFKNIDGYFKIYSKHTPINLVRDLPQGFSALEPLVDLPIGINITRFQTLLALHRSYLTPGDSSSGWTAGAAAYYVGYLQPRTFLLKYNENGTITDAVDCALDPLSETKCTLKSFTVEKGIYQTSNFRVQPTESIVRFPNITNLCPFGEVFNATRFASVYAWNRKRISNCVADYSVLYNSASFSTFKCYGVSPTKLNDLCFTNVYADSFVIRGDEVRQIAPGQTGKIADYNYKLPDDFTGCVIAWNSNNLDSKVGGNYNYLYRLFRKSNLKPFERDISTEIYQAGSTPCNGVEGFNCYFPLQSYGFQPTNGVGYQPYRVVVLSFELLHAPATVCGPKKSTNLVKNKCVNFNFNGLTGTGVLTESNKKFLPFQQFGRDIADTTDAVRDPQTLEILDITPCSFGGVSVITPGTNTSNQVAVLYQGVNCTEVPVAIHADQLTPTWRVYSTGSNVFQTRAGCLIGAEHVNNSYECDIPIGAGICASYQTQTNSPRRARSVASQSIIAYTMSLGAENSVAYSNNSIAIPTNFTISVTTEILPVSMTKTSVDCTMYICGDSTECSNLLLQYGSFCTQLNRALTGIAVEQDKNTQEVFAQVKQIYKTPPIKDFGGFNFSQILPDPSKPSKRSFIEDLLFNKVTLADVGFIKQYGDCLGDIAARDLICAQKFNGLTVLPPLLTDEMIAQYTSALLAGTITSGWWFGAGAALQIPFAMQMAYRFNGIGVTQNVLYENQKLIANQFNSAIGKIQDSLSSTASALGKLQDVVNQNAQALNTLVKQLSSNFGAISSVLNDILSRLDPPEAEVQIDRLITGRLQSLQTYVTQQLIRAAEIRWSANLAATKMSECVLGQSKRVDFCGKGYHLMSFPQSAPHGVVFLHVTYVPAQEKNFTTAPAICHDGKAHFPREGVFVSNGTHWFVTQRNFYEPQIITTDNTFVSGNCDVVIGIVNNTVYDPLQPELDSGGGGSDIIKLLNEQVNKEMQSSNLYMSMSSWCYTHSLDGAGLFLFDHAAEEYEHAKKLIIFLNENNVPVQLTSISAPEHKFEGLTQIFQKAYEHEQHISESINNIVDHAIKSKDHATFNFLQWYVAEQHEEEVLFKDILDKIELIGNENHGLYLADQYVKGIAKSRKS

SEQ ID NO: 8838 - protein, 1315 aa, Artificial Sequence
  SARS-CoV-2/Greece/16/2020__EPI_ISL_418265 spike protein (1-1147)(K986P_V987P_T887W_A1020W) Ferritin construct
MFVFLVLLPLVSSQCVNLTTRTQLPPAYTNSFTRGVYYPDKVFRSSVLHSTQDLFLPFFSNVTWFHAIHVSGTNGTKRFDNPVLPFNDGVYFASTEKSNIIRGWIFGTTLDSKTQSLLIVNNATNVVIKVCEFQFCNDPFLGVYYHKNNKSWMESEFRVYSSANNCTFEYVSQPFLMDLEGKQGNFKNLREFVFKNVDGYFKIYSKHTPINLVRDLPQGFSALEPLVDLPIGINITRFQTLLALHRSYLTPGDSSSGWTAGAAAYYVGYLQPRTFLLKYNENGTITDAVDCALDPLSETKCTLKSFTVEKGIYQTSNFRVQPTESIVRFPNITNLCPFGEVFNATRFASVYAWNRKRISNCVADYSVLYNSASFSTFKCYGVSPTKLNDLCFTNVYADSFVIRGDEVRQIAPGQTGKIADYNYKLPDDFTGCVIAWNSNNLDSKVGGNYNYLYRLFRKSNLKPFERDISTEIYQAGSTPCNGVEGFNCYFPLQSYGFQPTNGVGYQPYRVVVLSFELLHAPATVCGPKKSTNLVKNKCVNFNFNGLTGTGVLTESNKKFLPFQQFGRDIADTTDAVRDPQTLEILDITPCSFGGVSVITPGTNTSNQVAVLYQDVNCTEVPVAIHADQLTPTWRVYSTGSNVFQTRAGCLIGAEHVNNSYECDIPIGAGICASYQTQTNSPRRARSVASQSIIAYTMSLGAENSVAYSNNSIAIPTNFTISVTTEILPVSMTKTSVDCTMYICGDSTECSNLLLQYGSFCTQLNRALTGIAVEQDKNTQEVFAQVKQIYKTPPIKDFGGFNFSQILPDPSKPSKRSFIEDLLFNKVTLADAGFIKQYGDCLGDIAARDLICAQKFNGLTVLPPLLTDEMIAQYTSALLAGTITSGWWFGAGAALQIPFAMQMAYRFNGIGVTQNVLYENQKLIANQFNSAIGKIQDSLSSTASALGKLQDVVNQNAQALNTLVKQLSSNFGAISSVLNDILSRLDPPEAEVQIDRLITGRLQSLQTYVTQQLIRAAEIRWSANLAATKMSECVLGQSKRVDFCGKGYHLMSFPQSAPHGVVFLHVTYVPAQEKNFTTAPAICHDGKAHFPREGVFVSNGTHWFVTQRNFYEPQIITTDNTFVSGNCDVVIGIVNNTVYDPLQPELDSGGGGSDIIKLLNEQVNKEMQSSNLYMSMSSWCYTHSLDGAGLFLFDHAAEEYEHAKKLIIFLNENNVPVQLTSISAPEHKFEGLTQIFQKAYEHEQHISESINNIVDHAIKSKDHATFNFLQWYVAEQHEEEVLFKDILDKIELIGNENHGLYLADQYVKGIAKSRKS

SEQ ID NO: 8839 - protein, 1315 aa, Artificial Sequence
  SARS-CoV-2/Iceland/319/2020__EPI_ISL_417648 spike protein (1-1147)(K986P_V987P_T887W_A1020W) Ferritin construct
MFVFLVLLPLVSSQCVNLTTRTQLPPAYTNSFTRGVYYPDKVFRSSVLHSTQDLFLPFFSNVTWFHAIHVSGTNGTKRFDNPVLPFNDGVYFASTEKSNIIRGWIFGTTLDSKTQSLLIVNNATNVVIKVCEFQFCNDPFLGVYYHKNNKSWMESEFRVYSSANNCTFEYVSQPFLIDLEGKQGNFKNLREFVFKNIDGYFKIYSKHTPINLVRDLPQGFSALEPLVDLPIGINITRFQTLLALHRSYLTPGDSSSGWTAGAAAYYVGYLQPRTFLLKYNENGTITDAVDCALDPLSETKCTLKSFTVEKGIYQTSNFRVQPTESIVRFPNITNLCPFGEVFNATRFASVYAWNRKRISNCVADYSVLYNSASFSTFKCYGVSPTKLNDLCFTNVYADSFVIRGDEVRQIAPGQTGKIADYNYKLPDDFTGCVIAWNSNNLDSKVGGNYNYLYRLFRKSNLKPFERDISTEIYQAGSTPCNGVEGFNCYFPLQSYGFQPTNGVGYQPYRVVVLSFELLHAPATVCGPKKSTNLVKNKCVNFNFNGLTGTGVLTESNKKFLPFQQFGRDIADTTDAVRDPQTLEILDITPCSFGGVSVITPGTNTSNQVAVLYQGVNCTEVPVAIHADQLTPTWRVYSTGSNVFQTRAGCLIGAEHVNNSYECDIPIGAGICASYQTQTNSPRRARSVASQSIIAYTMSLGAENSVAYSNNSIAIPTNFTISVTTEILPVSMTKTSVDCTMYICGDSTECSNLLLQYGSFCTQLNRALTGIAVEQDKNTQEVFAQVKQIYKTPPIKDFGGFNFSQILPDPSKPSKRSFIEDLLFNKVTLADAGFIKQYGDCLGDIAARDLICAQKFNGLTVLPPLLTDEMIAQYTSALLAGTITSGWWFGAGAALQIPFAMQMAYRFNGIGVTQNVLYENQKLIANQFNSAIGKIQDSLSSTASALGKLQDVVNQNAQALNTLVKQLSSNFGAISSVLNDILSRLDPPEAEVQIDRLITGRLQSLQTYVTQQLIRAAEIRWSANLAATKMSECVLGQSKRVDFCGKGYHLMSFPQSAPHGVVFLHVTYVPAQEKNFTTAPAICHDGKAHFPREGVFVSNGTHWFVTQRNFYEPQIITTDNTFVSGNCDVVIGIVNNTVYDPLQPELDSGGGGSDIIKLLNEQVNKEMQSSNLYMSMSSWCYTHSLDGAGLFLFDHAAEEYEHAKKLIIFLNENNVPVQLTSISAPEHKFEGLTQIFQKAYEHEQHISESINNIVDHAIKSKDHATFNFLQWYVAEQHEEEVLFKDILDKIELIGNENHGLYLADQYVKGIAKSRKS

SEQ ID NO: 8840 - protein, 1315 aa, Artificial Sequence
  SARS-CoV-2/Congo/94/2020__EPI_ISL_417947 spike protein (1-1147)(K986P_V987P_T887W_A1020W) Ferritin construct
MFVFLVLLPLVSSQCVNLTTRTQLPPAYTNSFTRGVYYPDKVFRSSVLHSTQDLFLPFFSNVTWFHAIHVSGTNGTKRFDNPVLPFNDGVYFASTEKSNIIRGWIFGTTLDSKTQSLLIVNNATNVVIKVCEFQFCNDPFLGVYYHKNNKSWMESEFRVYSSANNCTFEYVSQPFLMDLEGKQGNFKNLREFVFKNIDGYFKIYSKHTPINLVRDLPQGFSALEPLVDLPIGINITRFQTLLALHRSYLTPGDSSSGWTAGAAAYYVGYLQPRTFLLKYNENGTITDAVDCALDPLSETKCTLKSFTVEKGIYQTSNFRVQPTESIVRFPNITNLCPFGEVFNATRFASVYAWNRKRISNCVADYSVLYNSASFSTFKCYGVSPTKLNDLCFTNVYADSFVIRGDEVRQIAPGQTGKIADYNYKLPDDFTGCVIAWNSNNLDSKVGGNYNYLYRLFRKSNLKPFERDISTEIYQAGSTPCNGVEGFNCYFPLQSYGFQPTNGVGYQPYRVVVLSFELLHAPATVCGPKKSTNLVKNKCVNFNFNGLTGTGVLTESNKKFLPFQQFGRDIADTTDAVRDPQTLEILDITPCSFGGVSVITPGTNTSNQVAVLYQGVNCTEVPVAIHADQLTPTWRVYSTGSNVFQTRAGCLIGAEHVNNSYECDIPIGAGICASYQTQTNSPRRARSVASQSIIAYTMSLGAENSVAYSNNSIAIPTNFTISVTTEILPVSMTKTSVDCTMYICGDSTECSNLLLQYGSFCTQLNRALTGIAVEQDKNTQEVFAQVKQIYKTPPIKDFGGFNFSQILPDPSKPSKRSFIEDILFNKVTLADAGFIKQYGDCLGDIAARDLICAQKFNGLTVLPPLLTDEMIAQYTSALLAGTITSGWWFGAGAALQIPFAMQMAYRFNGIGVTQNVLYENQKLIANQFNSAIGKIQDSLSSTASALGKLQDVVNQNAQALNTLVKQLSSNFGAISSVLNDILSRLDPPEAEVQIDRLITGRLQSLQTYVTQQLIRAAEIRWSANLAATKMSECVLGQSKRVDFCGKGYHLMSFPQSAPHGVVFLHVTYVPAQEKNFTTAPAICHDGKAHFPREGVFVSNGTHWFVTQRNFYEPQIITTDNTFVSGNCDVVIGIVNNTVYDPLQPELDSGGGGSDIIKLLNEQVNKEMQSSNLYMSMSSWCYTHSLDGAGLFLFDHAAEEYEHAKKLIIFLNENNVPVQLTSISAPEHKFEGLTQIFQKAYEHEQHISESINNIVDHAIKSKDHATFNFLQWYVAEQHEEEVLFKDILDKIELIGNENHGLYLADQYVKGIAKSRKS

SEQ ID NO: 8841 - protein, 1315 aa, Artificial Sequence
  SARS-CoV-2/Congo/158/2020__EPI_ISL_417950 spike protein (1-1147)(K986P_V987P_T887W_A1020W) Ferritin construct
MFVFLVLLPLVSSQCVNLTTRTQLPPAYTNSFTRGVYYPDKVFRSSVLHSTQDLFLPFFSNVTWFHAIHVSGTNGTKRFDNPVLPFNDGVYFASTEKSNIIRGWIFGTTLDSKTQSLLIVNNATNVVIKVCEFQFCNDPFLGVYYHKNNKSWMESEFRVYSSANNCTFEYVSQPFLMDLEGKQGNFKNLREFVFKNIDGYFKIYSKHTPINLVRDLPQGFSALEPLVDLPIGINITRFQTLLALHRSYLTPGDSSSGWTAGAAAYYVGYLQPRTFLLKYNENGTITDAVDCALDPLSETKCTLKSFTVEKGIYQTSNFRVQPTESIVRFPNITNLCPFGEVFNATRFASVYAWNRKRISNCVADYSVLYNSASFSTFKCYGVSPTKLNDLCFTNVYADSFVIRGDEVRQIAPGQTGKIADYNYKLPDDFTGCVIAWNSNNLDSKVGGNYNYLYRLFRKSNLKPFERDISTEIYQAGSTPCNGVEGFNCYFPLQSYGFQPTNGVGYQPYRVVVLSFELLHAPATVCGPKKSTNLVKNKCVNFNFNGLTGTGVLTESNKKFLPFQQFGRDIADTTDAVRDPQTLEILDITPCSFGGVSVITPGTNTSNQVAVLYQDVNCTEVPVAIHADQLTPTWRVYSTGSNVFQTRAGCLIGAEHVNNSYECDIPIGAGICASYQTQTNSPRRARSVASQSIIAYTMSLGAENSVAYSNNSIAIPTNFTISVTTEILPVSMTKTSVDCTMYICGDSTECSNLLLQYGSFCTQLNRALTGIAVEQDKNTQEVFAQVKQIYKTPPIKDFGGFNFSQILPDPSKPSKRSFIEDLLFNKVTLADAGFIKQYGDCLGDIAARDLICAQKFNGLTVLPPLLTDEMIAQYTSALLAGTITSGWWFGAGAALQIPFAMQMAYRFNGIGVTQNVLYENQKLIANQFNSAIGKIQDSLSSTASALGKLQDVVNQNAQALNTLVKQLSSNFGAISSVLNDILSRLDPPEAEVQIDRLITGRLQSLQTYVTQQLIRAAEIRWSANLAATKMSECVLGQSKRVDFCGKGYHLMSFPQSAPHGVVFLHVTYVPAQEKNFTTAPAICHDGKAHFPREGVFVSNGTHWFVTQRNFYEPQIITTDNTFLSGNCDVVIGIVNNTVYDPLQPELDSGGGGSDIIKLLNEQVNKEMQSSNLYMSMSSWCYTHSLDGAGLFLFDHAAEEYEHAKKLIIFLNENNVPVQLTSISAPEHKFEGLTQIFQKAYEHEQHISESINNIVDHAIKSKDHATFNFLQWYVAEQHEEEVLFKDILDKIELIGNENHGLYLADQYVKGIAKSRKS

SEQ ID NO: 8842 - protein, 1315 aa, Artificial Sequence
  SARS-CoV-2/USA/UT-00034/2020__EPI_ISL_417977 spike protein (1-1147)(K986P_V987P_T887W_A1020W) Ferritin construct
MFVFLVLLPLVSSQCVNLTTRTQLPPAYTNSFTRGVYYPDKVFRSSVLHSTQDLFLPFFSNVTWFHAIHVSGTNGTKRFDNPVLPFNDGVYFASTEKSNIIRGWIFGTTLDSKTQSLLIVNNATNVVIKVCEFQFCNDPFLGVYYYKNNKSWMESEFRVYSSANNCTFEYVSQPFLMDLEGKQGNFKNLREFVFKNIDGYFKIYSKHTPINLVRDLPQGFSALEPLVDLPIGINITRFQTLLALHRSYLTPGDSSSGWTAGAAAYYVGYLQPRTFLLKYNENGTITDAVDCALDPLSETKCTLKSFTVEKGIYQTSNFRVQPTESIVRFPNITNLCPFGEVFNATRFASVYAWNRKRISNCVADYSVLYNSASFSTFKCYGVSPTKLNDLCFTNVYADSFVIRGDEVRQIAPGQTGKIADYNYKLPDDFTGCVIAWNSNNLDSKVGGNYNYLYRLFRKSNLKPFERDISTEIYQAGSTPCNGVEGFNCYFPLQSYGFQPTNGVGYQPYRVVVLSFELLHAPATVCGPKKSTNLVKNKCVNFNFNGLTGTGVLTESNKKFLPFQQFGRDIADTTDAVRDPQTLEILDITPCSFGGVSVITPGTNTSNQVAVLYQGVNCTEVPVAIHADQLTPTWRVYSTGSNVFQTRAGCLIGAEHVNNSYECDIPIGAGICASYQTQTNSPRRARSVASQSIIAYTMSLGAENSVAYSNNSIAIPTNFTISVTTEILPVSMTKTSVDCTMYICGDSTECSNLLLQYGSFCTQLNRALTGIAVEQDKNTQEVFAQVKQIYKTPPIKDFGGFNFSQILPDPSKPSKRSFIEDLLFNKVTLADAGFIKQYGDCLGDIAARDLICAQKFNGLTVLPPLLTDEMIAQYTSALLAGTITSGWWFGAGAALQIPFAMQMAYRFNGIGVTQNVLYENQKLIANQFNSAIGKIQDSLSSTASALGKLQDVVNQNAQALNTLVKQLSSNFGAISSVLNDILSRLDPPEAEVQIDRLITGRLQSLQTYVTQQLIRAAEIRWSANLAATKMSECVLGQSKRVDFCGKGYHLMSFPQSAPHGVVFLHVTYVPAQEKNFTTAPAICHDGKAHFPREGVFVSNGTHWFVTQRNFYEPQIITTDNTFVSGNCDVVIGIVNNTVYDPLQPELDSGGGGSDIIKLLNEQVNKEMQSSNLYMSMSSWCYTHSLDGAGLFLFDHAAEEYEHAKKLIIFLNENNVPVQLTSISAPEHKFEGLTQIFQKAYEHEQHISESINNIVDHAIKSKDHATFNFLQWYVAEQHEEEVLFKDILDKIELIGNENHGLYLADQYVKGIAKSRKS

SEQ ID NO: 8843 - protein, 1315 aa, Artificial Sequence
  SARS-CoV-2/USA/UT-00033/2020__EPI_ISL_417976 spike protein (1-1147)(K986P_V987P_T887W_A1020W) Ferritin construct
MFVFLVLLPLVSSQCVNLTTRTQLPPAYTNSFTRGVYYPDKVFRSSVLHSTQDLFLPFFSNVTWFHAIHVSGTNGTKRFDNPVLPFNDGVYFASTEKSNIIRGWIFGTTLDSKTQSLLIVNNATNVVIKVCEFQFCNDPFLGVYYHKNNKSWMESEFRVYSSANNCTFEYVSQPFLMDLEGKQGNFKNLREFVFKNIDGYFKIYSKHTPINLVRDLPQGFSALEPLVDLPIGINITRFQTLLALHRSYLTPGDSSSGLTAGAAAYYVGYLQPRTFLLKYNENGTITDAVDCALDPLSETKCTLKSFTVEKGIYQTSNFRVQPTESIVRFPNITNLCPFGEVFNATRFASVYAWNRKRISNCVADYSVLYNSASFSTFKCYGVSPTKLNDLCFTNVYADSFVIRGDEVRQIAPGQTGKIADYNYKLPDDFTGCVIAWNSNNLDSKVGGNYNYLYRLFRKSNLKPFERDISTEIYQAGSTPCNGVEGFNCYFPLQSYGFQPTNGVGYQPYRVVVLSFELLHAPATVCGPKKSTNLVKNKCVNFNFNGLTGTGVLTESNKKFLPFQQFGRDIADTTDAVRDPQTLEILDITPCSFGGVSVITPGTNTSNQVAVLYQGVNCTEVPVAIHADQLTPTWRVYSTGSNVFQTRAGCLIGAEHVNNSYECDIPIGAGICASYQTQTNSPRRARSVASQSIIAYTMSLGAENSVAYSNNSIAIPTNFTISVTTEILPVSMTKTSVDCTMYICGDSTECSNLLLQYGSFCTQLNRALTGIAVEQDKNTQEVFAQVKQIYKTPPIKDFGGFNFSQILPDPSKPSKRSFIEDLLFNKVTLADAGFIKQYGDCLGDIAARDLICAQKFNGLTVLPPLLTDEMIAQYTSALLAGTITSGWWFGAGAALQIPFAMQMAYRFNGIGVTQNVLYENQKLIANQFNSAIGKIQDSLSSTASALGKLQDVVNQNAQALNTLVKQLSSNFGAISSVLNDILSRLDPPEAEVQIDRLITGRLQSLQTYVTQQLIRAAEIRWSANLAATKMSECVLGQSKRVDFCGKGYHLMSFPQSAPHGVVFLHVTYVPAQEKNFTTAPAICHDGKAHFPREGVFVSNGTHWFVTQRNFYEPQIITTDNTFVSGNCDVVIGIVNNTVYDPLQPELDSGGGGSDIIKLLNEQVNKEMQSSNLYMSMSSWCYTHSLDGAGLFLFDHAAEEYEHAKKLIIFLNENNVPVQLTSISAPEHKFEGLTQIFQKAYEHEQHISESINNIVDHAIKSKDHATFNFLQWYVAEQHEEEVLFKDILDKIELIGNENHGLYLADQYVKGIAKSRKS

SEQ ID NO: 8844 - protein, 1315 aa, Artificial Sequence
  SARS-CoV-2/USA/WI-13/2020__EPI_ISL_417516 spike protein (1-1147)(K986P_V987P_T887W_A1020W) Ferritin construct
MFVFLVLLPLVSSQCVNLTTRTQLPPAYTNSFTRGVYYPDKVFRSSVLHSTQDLFLPFFSNVTWFHAIHVSGTNGTKRFDNPVLPFNDGVYFASTEKSNIIRGWIFGTTLDSKTQSLLIVNNATNVVIKVCEFQFCNDPFLGVYYHKNNKSWMESEFRVYSSANNCTFEYVSQPFLMDLEGKQGNFKNLREFVFKNIDGYFKIYSKHTPINLVRDLPQGFSALEPLVDLPIGINITRFQTLLALHRSYLTPGDSSSGWTAGAAAYYVGYLQPRTFLLKYNENGTITDAVDCALDPLSETKCTLKSFTVEKGIYQTSNFRVLPTESIVRFPNITNLCPFGEVFNATRFASVYAWNRKRISNCVADYSVLYNSASFSTFKCYGVSPTKLNDLCFTNVYADSFVIRGDEVRQIAPGQTGKIADYNYKLPDDFTGCVIAWNSNNLDSKVGGNYNYLYRLFRKSNLKPFERDISTEIYQAGSTPCNGVEGFNCYFPLQSYGFQPTNGVGYQPYRVVVLSFELLHAPATVCGPKKSTNLVKNKCVNFNFNGLTGTGVLTESNKKFLPFQQFGRDIADTTDAVRDPQTLEILDITPCSFGGVSVITPGTNTSNQVAVLYQGVNCTEVPVAIHADQLTPTWRVYSTGSNVFQTRAGCLIGAEHVNNSYECDIPIGAGICASYQTQTNSPRRARSVASQSIIAYTMSLGAENSVAYSNNSIAIPTNFTISVTTEILPVSMTKTSVDCTMYICGDSTECSNLLLQYGSFCTQLNRALTGIAVEQDKNTQEVFAQVKQIYKTPPIKDFGGFNFSQILPDPSKPSKRSFIEDLLFNKVTLADAGFIKQYGDCLGDIAARDLICAQKFNGLTVLPPLLTDEMIAQYTSALLAGTITSGWWFGAGAALQIPFAMQMAYRFNGIGVTQNVLYENQKLIANQFNSAIGKIQDSLSSTASALGKLQDVVNQNAQALNTLVKQLSSNFGAISSVLNDILSRLDPPEAEVQIDRLITGRLQSLQTYVTQQLIRAAEIRWSANLAATKMSECVLGQSKRVDFCGKGYHLMSFPQSAPHGVVFLHVTYVPAQEKNFTTAPAICHDGKAHFPREGVFVSNGTHWFVTQRNFYEPQIITTDNTFVSGNCDVVIGIVNNTVYDPLQPELDSGGGGSDIIKLLNEQVNKEMQSSNLYMSMSSWCYTHSLDGAGLFLFDHAAEEYEHAKKLIIFLNENNVPVQLTSISAPEHKFEGLTQIFQKAYEHEQHISESINNIVDHAIKSKDHATFNFLQWYVAEQHEEEVLFKDILDKIELIGNENHGLYLADQYVKGIAKSRKS

SEQ ID NO: 8845 - protein, 1314 aa, Artificial Sequence
  SARS-CoV-2/India/1-27/2020__EPI_ISL_413522 spike protein (1-1146)(K985P_V986P_T886W_A1019W) Ferritin construct
MFVFLVLLPLVSSQCVNLTTRTQLPPAYTNSFTRGVYYPDKVFRSSVLHSTQDLFLPFFSNVTWFHAIHVSGTNGTKRFDNPVLPFNDGVYFASTEKSNIIRGWIFGTTLDSKTQSLLIVNNATNVVIKVCEFQFCNDPFLGVYHKNNKSWMESEFRVYSSANNCTFEYVSQPFLMDLEGKQGNFKNLREFVFKNIDGYFKIYSKHTPINLVRDLPQGFSALEPLVDLPIGINITRFQTLLALHRSYLTPGDSSSGWTAGAAAYYVGYLQPRTFLLKYNENGTITDAVDCALDPLSETKCTLKSFTVEKGIYQTSNFRVQPTESIVRFPNITNLCPFGEVFNATRFASVYAWNRKRISNCVADYSVLYNSASFSTFKCYGVSPTKLNDLCFTNVYADSFVIRGDEVIQIAPGQTGKIADYNYKLPDDFTGCVIAWNSNNLDSKVGGNYNYLYRLFRKSNLKPFERDISTEIYQAGSTPCNGVEGFNCYFPLQSYGFQPTNGVGYQPYRVVVLSFELLHAPATVCGPKKSTNLVKNKCVNFNFNGLTGTGVLTESNKKFLPFQQFGRDIADTTDAVRDPQTLEILDITPCSFGGVSVITPGTNTSNQVAVLYQDVNCTEVPVAIHADQLTPTWRVYSTGSNVFQTRAGCLIGAEHVNNSYECDIPIGAGICASYQTQTNSPRRARSVASQSIIAYTMSLGAENSVAYSNNSIAIPTNFTISVTTEILPVSMTKTSVDCTMYICGDSTECSNLLLQYGSFCTQLNRALTGIAVEQDKNTQEVFAQVKQIYKTPPIKDFGGFNFSQILPDPSKPSKRSFIEDLLFNKVTLADAGFIKQYGDCLGDIAARDLICAQKFNGLTVLPPLLTDEMIAQYTSALLAGTITSGWWFGAGAALQIPFAMQMAYRFNGIGVTQNVLYENQKLIANQFNSAIGKIQDSLSSTASALGKLQDVVNQNAQALNTLVKQLSSNFGAISSVLNDILSRLDPPEAEVQIDRLITGRLQSLQTYVTQQLIRAAEIRWSANLAATKMSECVLGQSKRVDFCGKGYHLMSFPQSAPHGVVFLHVTYVPAQEKNFTTAPAICHDGKAHFPREGVFVSNGTHWFVTQRNFYEPQIITTDNTFVSGNCDVVIGIVNNTVYDPLQPELDSGGGGSDIIKLLNEQVNKEMQSSNLYMSMSSWCYTHSLDGAGLFLFDHAAEEYEHAKKLIIFLNENNVPVQLTSISAPEHKFEGLTQIFQKAYEHEQHISESINNIVDHAIKSKDHATFNFLQWYVAEQHEEEVLFKDILDKIELIGNENHGLYLADQYVKGIAKSRKS

SEQ ID NO: 8846 - protein, 1309 aa, Artificial Sequence
  SARS-CoV-2/pangolin/Guangxi/P4L/2017__EPI_ISL_410538 spike protein (1-1141)(K980P_V981P_T881W_A1014W) Ferritin construct
MFVFLFVLPLVSSQCVNLTTRTGIPPGYTNSSTRGVYYPDKVFRSSILHLTQDLFLPFFSNVTWFNTINYQGGFKKFDNPVLPFNDGVYFASTEKSNIIRGWIFGTTLDARTQSLLIVNNATNVVIKVCEFQFCTDPFLGVYYHNNNKTWVENEFRVYSSANNCTFEYISQPFLMDLEGKQGNFKNLREFVFKNVDGYFKIYSKHTPIDLVRDLPRGFAALEPLVDLPIGINITRFQTLLALHRSYLTPGNLESGWTTGAAAYYVGYLQQRTFLLSYNQNGTITDAVDCSLDPLSETKCTLKSLTVEKGIYQTSNFRVQPTISIVRFPNITNLCPFGEVFNASKFASVYAWNRKRISNCVADYSVLYNSTSFSTFKCYGVSPTKLNDLCFTNVYADSFVVKGDEVRQIAPGQTGVIADYNYKLPDDFTGCVIAWNSVKQDALTGGNYGYLYRLFRKSKLKPFERDISTEIYQAGSTPCNGQVGLNCYYPLERYGFHPTTGVNYQPFRVVVLSFELLNGPATVCGPKLSTTLVKDKCVNFNFNGLTGTGVLTTSKKQFLPFQQFGRDISDTTDAVRDPQTLEILDITPCSFGGVSVITPGTNTSNQVAVLYQDVNCTEVPMAIHAEQLTPAWRVYSAGANVFQTRAGCLVGAEHVNNSYECDIPVGAGICASYHSMSSLRSVNQRSIIAYTMSLGAENSVAYSNNSIAIPTNFTISVTTEILPVSMTKTSVDCTMYICGDSIECSNLLLQYGSFCTQLNRALTGIAVEQDKNTQEVFAQVKQIYKTPPIKDFGGFNFSQILPDPSKPSKRSFIEDLLFNKVTLADAGFIKQYGDCLGDIAARDLICAQKFNGLTVLPPLLTDEMIAQYTSALLAGTITSGWWFGAGAALQIPFAMQMAYRFNGIGVTQNVLYENQKLIANQFNSAIGKIQDSLSSTASALGKLQDVVNQNAQALNTLVKQLSSNFGAISSVLNDILSRLDPPEAEVQIDRLITGRLQSLQTYVTQQLIRAAEIRWSANLAATKMSECVLGQSKRVDFCGKGYHLMSFPQSAPHGVVFLHVTYVPAQEKNFTTAPAICHEGKAHFPREGVFVSNGTHWFITQRNFYEPQIITTDNTFVSGSCDVVIGIVNNTVYDPLQPELDSGGGGSDIIKLLNEQVNKEMQSSNLYMSMSSWCYTHSLDGAGLFLFDHAAEEYEHAKKLIIFLNENNVPVQLTSISAPEHKFEGLTQIFQKAYEHEQHISESINNIVDHAIKSKDHATFNFLQWYVAEQHEEEVLFKDILDKIELIGNENHGLYLADQYVKGIAKSRKS

SEQ ID NO: 8847 - protein, 1309 aa, Artificial Sequence
  SARS-CoV-2/pangolin/Guangxi/P5L/2017__EPI_ISL_410540 spike protein (1-1141)(K980P_V981P_T881W_A1014W) Ferritin construct
MFVFLFVLPLVSSQCVNLTTRTGIPPGYTNSSTRGVYYPDKVFRSSILHLTQDLFLPFFSNVTWFNTINYQGGFKKFDNPVLPFNDGVYFASTEKSNIIRGWIFGTTLDARTQSLLIVNNATNVVIKVCEFQFCTDPFLGVYYHNNNKTWVENEFRVYSSANNCTFEYISQPFLMDLEGKQGNFKNLREFVFKNVDGYFKIYSKHTPIDLVRDLPRGFAALEPLVDLPIGINITRFQTLLALHRSYLTPGKLESGWTTGAAAYYVGYLQQRTFLLSYNQNGTITDAVDCSLDPLSETKCTLKSLTVEKGIYQTSNFRVQPTISIVRFPNITNLCPFGEVFNASKFASVYAWNRKRISNCVADYSVLYNSTSFSTFKCYGVSPTKLNDLCFTNVYADSFVVKGDEVRQIAPGQTGVIADYNYKLPDDFTGCVIAWNSVKQDALTGGNYGYLYRLFRKSKLKPFERDISTEIYQAGSTPCNGQVGLNCYYPLERYGFHPTTGVNYQPFRVVVLSFELLNGPATVCGPKLSTTLVKDKCVNFNFNGLTGTGVLTTSKKQFLPFQQFGRDISDTTDAVRDPQTLEILDITPCSFGGVSVITPGTNTSNQVAVLYQDVNCTEVPMAIHAEQLTPAWRVYSAGANVFQTRAGCLVGAEHVNNSYECDIPVGAGICASYHSMSSFRSVNQRSIIAYTMSLGAENSVAYSNNSIAIPTNFTISVTTEILPVSMTKTSVDCTMYICGDSIECSNLLLQYGSFCTQLNRALTGIAVEQDKNTQEVFAQVKQIYKTPPIKDFGGFNFSQILPDPSKPSKRSFIEDLLFNKVTLADAGFIKQYGDCLGDIAARDLICAQKFNGLTVLPPLLTDEMIAQYTSALLAGTITSGWWFGAGAALQIPFAMQMAYRFNGIGVTQNVLYENQKLIANQFNSAIGKIQDSLSSTASALGKLQDVVNQNAQALNTLVKQLSSNFGAISSVLNDILSRLDPPEAEVQIDRLITGRLQSLQTYVTQQLIRAAEIRWSANLAATKMSECVLGQSKRVDFCGKGYHLMSFPQSAPHGVVFLHVTYVPAQEKNFTTAPAICHEGKAHFPREGVFVSNGTHWFITQRNFYEPQIITTDNTFVSGSCDVVIGIVNNTVYDPLQPELDSGGGGSDIIKLLNEQVNKEMQSSNLYMSMSSWCYTHSLDGAGLFLFDHAAEEYEHAKKLIIFLNENNVPVQLTSISAPEHKFEGLTQIFQKAYEHEQHISESINNIVDHAIKSKDHATFNFLQWYVAEQHEEEVLFKDILDKIELIGNENHGLYLADQYVKGIAKSRKS

SEQ ID NO: 8848 - protein, 1309 aa, Artificial Sequence
  SARS-CoV-2/pangolin/Guangxi/P5E/2017__EPI_ISL_410541 spike protein (1-1141)(K980P_V981P_T881W_A1014W) Ferritin construct
MFVFLFVLPLVSSQCVNLTTRTGIPPGYTNSSTRGVYYPDKVFRSSILHLTQDLFLPFFSNVTWFNTITYQGGSKKFDNPVLPFNDGVYFASTEKSNIIRGWIFGTTLDARTQSLLIVNNATNVVIKVCEFQFCTDPFLGVYYHNNNKTWVENEFRVYSSANNCTFEYISQPFLMDLEGKQGNFKNLREFVFKNVDGYFKIYSKHTPIDLVRDLPRGFAALEPLVDLPIGINITRFQTLLALHRSYLTPGKLESGWTTGAAAYYVGYLQQRTFLLSYNQNGTITDAVDCSLDPLSETKCTLKSLTVEKGIYQTSNFRVQPTISIVRFPNITNLCPFGEVFNASKFASVYAWNRKRISNCVADYSVLYNSTSFSTFKCYGVSPTKLNDLCFTNVYADSFVVKGDEVRQIAPGQTGVIADYNYKLPDDFTGCVIAWNSVKQDALTGDNYGYLYRLFRKSKLKPFERDISTEIYQAGSTPCNGQVGLNCYYPLERYGFHPTTGVNYQPFRVVVLSFELLNGPATVCGPKLSTTLVKDKCVNFNFNGLTGTGVLTTSKKQFLPFQQFGRDISDTTDAVRDPQTLEILDITPCSFGGVSVITPGTNTSNQVAVLYQDVNCTEVPMAIHAEQLTPAWRVYSAGANVFQTRAGCLVGAEHVNNSYECDIPVGAGICASYHSMSSFRSVNQRSIIAYTMSLGAENSVAYSNNSIAIPTNFTISVTTEILPVSMTKTSVDCTMYICGDSIECSNLLLQYGSFCTQLNRALTGIAVEQDKNTQEVFAQVKQIYKTPPIKDFGGFNFSQILPDPSKPSKRSFIEDLLFNKVTLADAGFIKQYGDCLGDIAARDLICAQKFNGLTVLPPLLTDEMIAQYTSALLAGTITSGWWFGAGAALQIPFAMQMAYRFNGIGVTQNVLYENQKLIANQFNSAIGKIQDSLSSTASALGKLQDVVNQNAQALNTLVKQLSSNFGAISSVLNDILSRLDPPEAEVQIDRLITGRLQSLQTYVTQQLIRAAEIRWSANLAATKMSECVLGQSKRVDFCGKGYHLMSFPQSAPHGVVFLHVTYVPAQEKNFTTAPAICHEGKAHFPREGVFVSNGTHWFITQRNFYEPQIITTDNTFVSGSCDVVIGIVNNTVYDPLQPELDSGGGGSDIIKLLNEQVNKEMQSSNLYMSMSSWCYTHSLDGAGLFLFDHAAEEYEHAKKLIIFLNENNVPVQLTSISAPEHKFEGLTQIFQKAYEHEQHISESINNIVDHAIKSKDHATFNFLQWYVAEQHEEEVLFKDILDKIELIGNENHGLYLADQYVKGIAKSRKS

SEQ ID NO: 8849 - protein, 1307 aa, Artificial Sequence
  SARS-CoV-2/pangolin/Guangxi/P1E/2017__EPI_ISL_410539 spike protein (1-1139)(K978P_V979P_T879W_A1012W) Ferritin construct
MFVFLFVLPLVSSQCVNLTTRTGIQPGYTNSSTRGVYYPDKVFRSSILHLTQDLFLPFFSNVTWFNTINYQGGFKKFDNPVLPFNDGVYFASTEKSNIIRGWIFGTTLDARTQSLLIVNNATNVVIKVCEFQFCTDPFLGVYYHNNNKTWVENEFRVYSSANNCTFEYISQPFLMDLEGKQGNFKNLREFVFKNVDGYFKIYSKHTPIDLVRDLPRGFAALEPLVDLPIGINITRFQTLLALHRSYLTPGKLESGWTTGAAAYYVGYLQQRTFLLSYNQNGTITDAVDCSLDPLSETKCTLKSLTVEKGIYQTSNFRVQPTISIVRFPNITNLCPFGEVFNASKFASVYAWNRKRISNCVADYSVLYNSTSFSTFKCYGVSPTKLNDLCFTNVYADSFVVKGDEVRQIAPGQTGVIADYNYKLPDDFTGCVIAWNSVKQDALTGGNYLYRLFRKSKLKPFERDISTEIYQAGSTPCNGQVGLNCYYPLERYGFHPTTGVNYQPFRVVVLSFELLNGPATVCGPKLSTTLVKDKCVNFNFNGLTGTGVLTTSKKQFLPFQQFGRDISDTTDAVRDPQTLEILDITPCSFGGVSVITPGTNTSNQVAVLYQDVNCTEVPMAIHAEQLTPAWRVYSAGANVFQTRAGCLVGAEHVNNSYECDIPVGAGICASYHSMSSLRSVNQRSIIAYTMSLGAENSVAYSNNSIAIPTNFTISVTTEILPVSMTKTSVDCTMYICGDSIECSNLLLQYGSFCTQLNRALTGIAVEQDKNTQEVFAQVKQIYKTPPIKDFGGFNFSQILPDPSKPSKRSFIEDLLFNKVTLADAGFIKQYGDCLGDIAARDLICAQKFNGLTVLPPLLTDEMIAQYTSALLAGTITSGWWFGAGAALQIPFAMQMAYRFNGIGVTQNVLYENQKLIANQFNSAIGKIQDSLSSTASALGKLQDVVNQNAQALNTLVKQLSSNFGAISSVLNDILSRLDPPEAEVQIDRLITGRLQSLQTYVTQQLIRAAEIRWSANLAATKMSECVLGQSKRVDFCGKGYHLMSFPQSAPHGVVFLHVTYVPAQEKNFTTAPAICHEGKAHFPREGVFVSNGTHWFITQRNFYEPQIITTDNTFVSGSCDVVIGIVNNTVYDPLQPELDSGGGGSDIIKLLNEQVNKEMQSSNLYMSMSSWCYTHSLDGAGLFLFDHAAEEYEHAKKLIIFLNENNVPVQLTSISAPEHKFEGLTQIFQKAYEHEQHISESINNIVDHAIKSKDHATFNFLQWYVAEQHEEEVLFKDILDKIELIGNENHGLYLADQYVKGIAKSRKS

SEQ ID NO: 8850 - protein, 1315 aa, Artificial Sequence
  SARS-CoV-2/Wuhan/WIV05/2019__EPI_ISL_402128 spike protein (1-1147)(K986P_V987P_P1069F) Ferritin construct
MFVFLVLLPLVSSQCVNLTTRTQLPPAYTNSFTRGVYYPDKVFRSSVLHSTQDLFLPFFSNVTWFHAIHVSGTNGTKRFDNPVLPFNDGVYFASTEKSNIIRGWIFGTTLDSKTQSLLIVNNATNVVIKVCEFQFCNDPFLGVYYHKNNKSWMESEFRVYSSANNCTFEYVSQPFLMDLEGKQGNFKNLREFVFKNIDGYFKIYSKHTPINLVRDLPQGFSALEPLVDLPIGINITRFQTLLALHRSYLTPGDSSSGWTAGAAAYYVGYLQPRTFLLKYNENGTITDAVDCALDPLSETKCTLKSFTVEKGIYQTSNFRVQPTESIVRFPNITNLCPFGEVFNATRFASVYAWNRKRISNCVADYSVLYNSASFSTFKCYGVSPTKLNDLCFTNVYADSFVIRGDEVRQIAPGQTGKIADYNYKLPDDFTGCVIAWNSNNLDSKVGGNYNYLYRLFRKSNLKPFERDISTEIYQAGSTPCNGVEGFNCYFPLQSYGFQPTNGVGYQPYRVVVLSFELLHAPATVCGPKKSTNLVKNKCVNFNFNGLTGTGVLTESNKKFLPFQQFGRDIADTTDAVRDPQTLEILDITPCSFGGVSVITPGTNTSNQVAVLYQDVNCTEVPVAIHADQLTPTWRVYSTGSNVFQTRAGCLIGAEHVNNSYECDIPIGAGICASYQTQTNSPRRARSVASQSIIAYTMSLGAENSVAYSNNSIAIPTNFTISVTTEILPVSMTKTSVDCTMYICGDSTECSNLLLQYGSFCTQLNRALTGIAVEQDKNTQEVFAQVKQIYKTPPIKDFGGFNFSQILPDPSKPSKRSFIEDLLFNKVTLADAGFIKQYGDCLGDIAARDLICAQKFNGLTVLPPLLTDEMIAQYTSALLAGTITSGWTFGAGAALQIPFAMQMAYRFNGIGVTQNVLYENQKLIANQFNSAIGKIQDSLSSTASALGKLQDVVNQNAQALNTLVKQLSSNFGAISSVLNDILSRLDPPEAEVQIDRLITGRLQSLQTYVTQQLIRAAEIRASANLAATKMSECVLGQSKRVDFCGKGYHLMSFPQSAPHGVVFLHVTYVFAQEKNFTTAPAICHDGKAHFPREGVFVSNGTHWFVTQRNFYEPQIITTDNTFVSGNCDVVIGIVNNTVYDPLQPELDSGGGGSDIIKLLNEQVNKEMQSSNLYMSMSSWCYTHSLDGAGLFLFDHAAEEYEHAKKLIIFLNENNVPVQLTSISAPEHKFEGLTQIFQKAYEHEQHISESINNIVDHAIKSKDHATFNFLQWYVAEQHEEEVLFKDILDKIELIGNENHGLYLADQYVKGIAKSRKS

SEQ ID NO: 8851 - protein, 1311 aa, Artificial Sequence
  SARS-CoV-2/bat/Yunnan/RaTG13/2013__EPI_ISL_402131 spike protein (1-1143)(K982P_V983P_P1065F) Ferritin construct
MFVFLVLLPLVSSQCVNLTTRTQLPPAYTNSSTRGVYYPDKVFRSSVLHLTQDLFLPFFSNVTWFHAIHVSGTNGIKRFDNPVLPFNDGVYFASTEKSNIIRGWIFGTTLDSKTQSLLIVNNATNVVIKVCEFQFCNDPFLGVYYHKNNKSWMESEFRVYSSANNCTFEYVSQPFLMDLEGKQGNFKNLREFVFKNIDGYFKIYSKHTPINLVRDLPPGFSALEPLVDLPIGINITRFQTLLALHRSYLTPGDSSSGWTAGAAAYYVGYLQPRTFLLKYNENGTITDAVDCALDPLSETKCTLKSFTVEKGIYQTSNFRVQPTDSIVRFPNITNLCPFGEVFNATTFASVYAWNRKRISNCVADYSVLYNSTSFSTFKCYGVSPTKLNDLCFTNVYADSFVITGDEVRQIAPGQTGKIADYNYKLPDDFTGCVIAWNSKHIDAKEGGNFNYLYRLFRKANLKPFERDISTEIYQAGSKPCNGQTGLNCYYPLYRYGFYPTDGVGHQPYRVVVLSFELLNAPATVCGPKKSTNLVKNKCVNFNFNGLTGTGVLTESNKKFLPFQQFGRDIADTTDAVRDPQTLEILDITPCSFGGVSVITPGTNASNQVAVLYQDVNCTEVPVAIHADQLTPTWRVYSTGSNVFQTRAGCLIGAEHVNNSYECDIPIGAGICASYQTQTNSRSVASQSIIAYTMSLGAENSVAYSNNSIAIPTNFTISVTTEILPVSMTKTSVDCTMYICGDSTECSNLLLQYGSFCTQLNRALTGIAVEQDKNTQEVFAQVKQIYKTPPIKDFGGFNFSQILPDPSKPSKRSFIEDLLFNKVTLADAGFIKQYGDCLGDIAARDLICAQKFNGLTVLPPLLTDEMIAQYTSALLAGTITSGWTFGAGAALQIPFAMQMAYRFNGIGVTQNVLYENQKLIANQFNSAIGKIQDSLSSTASALGKLQDVVNQNAQALNTLVKQLSSNFGAISSVLNDILSRLDPPEAEVQIDRLITGRLQSLQTYVTQQLIRAAEIRASANLAATKMSECVLGQSKRVDFCGKGYHLMSFPQSAPHGVVFLHVTYVFAQEKNFTTAPAICHDGKAHFPREGVFVSNGTHWFVTQRNFYEPQIITTDNTFVSGSCDVVIGIVNNTVYDPLQPELDSGGGGSDIIKLLNEQVNKEMQSSNLYMSMSSWCYTHSLDGAGLFLFDHAAEEYEHAKKLIIFLNENNVPVQLTSISAPEHKFEGLTQIFQKAYEHEQHISESINNIVDHAIKSKDHATFNFLQWYVAEQHEEEVLFKDILDKIELIGNENHGLYLADQYVKGIAKSRKS

SEQ ID NO: 8852 - protein, 1315 aa, Artificial Sequence
  SARS-CoV-2/Wuhan/HBCDC-HB-01/2019__EPI_ISL_402132 spike protein (1-1147)(K986P_V987P_P1069F) Ferritin construct
MFVFLVLLPLVSSQCVNLTTRTQLPPAYTNSITRGVYYPDKVFRSSVLHSTQDLFLPFFSNVTWFHAIHVSGTNGTKRFDNPVLPFNDGVYFASTEKSNIIRGWIFGTTLDSKTQSLLIVNNATNVVIKVCEFQFCNDPFLGVYYHKNNKSWMESEFRVYSSANNCTFEYVSQPFLMDLEGKQGNFKNLREFVFKNIDGYFKIYSKHTPINLVRDLPQGFSALEPLVDLPIGINITRFQTLLALHRSYLTPGDSSSGWTAGAAAYYVGYLQPRTFLLKYNENGTITDAVDCALDPLSETKCTLKSFTVEKGIYQTSNFRVQPTESIVRFPNITNLCPFGEVFNATRFASVYAWNRKRISNCVADYSVLYNSASFSTFKCYGVSPTKLNDLCFTNVYADSFVIRGDEVRQIAPGQTGKIADYNYKLPDDFTGCVIAWNSNNLDSKVGGNYNYLYRLFRKSNLKPFERDISTEIYQAGSTPCNGVEGFNCYFPLQSYGFQPTNGVGYQPYRVVVLSFELLHAPATVCGPKKSTNLVKNKCVNFNFNGLTGTGVLTESNKKFLPFQQFGRDIADTTDAVRDPQTLEILDITPCSFGGVSVITPGTNTSNQVAVLYQDVNCTEVPVAIHADQLTPTWRVYSTGSNVFQTRAGCLIGAEHVNNSYECDIPIGAGICASYQTQTNSPRRARSVASQSIIAYTMSLGAENSVAYSNNSIAIPTNFTISVTTEILPVSMTKTSVDCTMYICGDSTECSNLLLQYGSFCTQLNRALTGIAVEQDKNTQEVFAQVKQIYKTPPIKDFGGFNFSQILPDPSKPSKRSFIEDLLFNKVTLADAGFIKQYGDCLGDIAARDLICAQKFNGLTVLPPLLTDEMIAQYTSALLAGTITSGWTFGAGAALQIPFAMQMAYRFNGIGVTQNVLYENQKLIANQFNSAIGKIQDSLSSTASALGKLQDVVNQNAQALNTLVKQLSSNFGAISSVLNDILSRLDPPEAEVQIDRLITGRLQSLQTYVTQQLIRAAEIRASANLAATKMSECVLGQSKRVDFCGKGYHLMSFPQSAPHGVVFLHVTYVFAQEKNFTTAPAICHDGKAHFPREGVFVSNGTHWFVTQRNFYEPQIITTDNTFVSGNCDVVIGIVNNTVYDPLQPELDSGGGGSDIIKLLNEQVNKEMQSSNLYMSMSSWCYTHSLDGAGLFLFDHAAEEYEHAKKLIIFLNENNVPVQLTSISAPEHKFEGLTQIFQKAYEHEQHISESINNIVDHAIKSKDHATFNFLQWYVAEQHEEEVLFKDILDKIELIGNENHGLYLADQYVKGIAKSRKS

SEQ ID NO: 8853 - protein, 1315 aa, Artificial Sequence
  SARS-CoV-2/Guangdong/20SF028/2020__EPI_ISL_403936 spike protein (1-1147)(K986P_V987P_P1069F) Ferritin construct
MFVFLVLLPLVSSQCVNLTTRTQLPPAYTNSFTRGVYYPDKVFRSSVLYSTQDLFLPFFSNVTWFHAIHVSGTNGTKRFDNPVLPFNDGVYFASTEKSNIIRGWIFGTTLDSKTQSLLIVNNATNVVIKVCEFQFCNDPFLGVYYHKNNKSWMESEFRVYSSANNCTFEYVSQPFLMDLEGKQGNFKNLREFVFKNIDGYFKIYSKHTPINLVRDLPQGFSALEPLVDLPIGINITRFQTLLALHRSYLTPGDSSSGWTAGAAAYYVGYLQPRTFLLKYNENGTITDAVDCALDPLSETKCTLKSFTVEKGIYQTSNFRVQPTESIVRFPNITNLCPFGEVFNATRFASVYAWNRKRISNCVADYSVLYNSASFSTFKCYGVSPTKLNDLCFTNVYADSFVIRGDEVRQIAPGQTGKIADYNYKLPDDFTGCVIAWNSNNLDSKVGGNYNYLYRLFRKSNLKPFERDISTEIYQAGSTPCNGVEGFNCYFPLQSYGFQPTNGVGYQPYRVVVLSFELLHAPATVCGPKKSTNLVKNKCVNFNFNGLTGTGVLTESNKKFLPFQQFGRDIADTTDAVRDPQTLEILDITPCSFGGVSVITPGTNTSNQVAVLYQDVNCTEVPVAIHADQLTPTWRVYSTGSNVFQTRAGCLIGAEHVNNSYECDIPIGAGICASYQTQTNSPRRARSVASQSIIAYTMSLGAENSVAYSNNSIAIPTNFTISVTTEILPVSMTKTSVDCTMYICGDSTECSNLLLQYGSFCTQLNRALTGIAVEQDKNTQEVFAQVKQIYKTPPIKDFGGFNFSQILPDPSKPSKRSFIEDLLFNKVTLADAGFIKQYGDCLGDIAARDLICAQKFNGLTVLPPLLTDEMIAQYTSALLAGTITSGWTFGAGAALQIPFAMQMAYRFNGIGVTQNVLYENQKLIANQFNSAIGKIQDSLSSTASALGKLQDVVNQNAQALNTLVKQLSSNFGAISSVLNDILSRLDPPEAEVQIDRLITGRLQSLQTYVTQQLIRAAEIRASANLAATKMSECVLGQSKRVDFCGKGYHLMSFPQSAPHGVVFLHVTYVFAQEKNFTTAPAICHDGKAHFPREGVFVSNGTHWFVTQRNFYEPQIITTDNTFVSGNCDVVIGIVNNTVYDPLQPELDSGGGGSDIIKLLNEQVNKEMQSSNLYMSMSSWCYTHSLDGAGLFLFDHAAEEYEHAKKLIIFLNENNVPVQLTSISAPEHKFEGLTQIFQKAYEHEQHISESINNIVDHAIKSKDHATFNFLQWYVAEQHEEEVLFKDILDKIELIGNENHGLYLADQYVKGIAKSRKS

SEQ ID NO: 8854 - protein, 1315 aa, Artificial Sequence
  SARS-CoV-2/Shenzhen/SZTH-001/2020__EPI_ISL_406592 spike protein (1-1147)(K986P_V987P_P1069F) Ferritin construct
MFVFLVLLPLVSSQCVNLTTRTQLPPAYTNSFTRGVYYPDKVFRSSVLHSTQDLFLPFFSNVTWFHAIHVSGTNGTKRFDNPVLPFNDGVYFASTEKSNIIRGWIFGTTLDSKTQSLLIVNNATNVVIKVCEFQFCNDPFLGVYYHKNNKSWMESEFRVYSSANNCTFEYVSQPFLMDLEGKQGNFKNLREFVFKNIDGYFKIYSKHTPINLVRDLPQGFSALEPLVDLPIGINITRFQTLLALHRSYLTPGDSSSGWTAGAAAYYVGYLQPRTFLLKYNENGTITDAVDCALDPLSETKCTLKSFTVEKGIYQTSNFRVQPTESIVRFPNITNLCPFGEVFNATRFASVYAWNRKRISNCVADYSVLYNSASFSTFKCYGVSPTKLNDLCFTNVYADSFVIRGDEVRQIAPGQTGKIADYNYKLPDDFTGCVIAWNSNNLDSKVGGNYNYLYRLFRKSNLKPFERDISTEIYQAGSTPCNGVEGFNCYFPLQSYGFQPTNGVGYQPYRVVVLSFELLHAPATVCGPKKSTNLVKNKCVNFNFNGLTGTGVLTESNKKFLPFQQFGRDIADTTDAVRDPQTLEILDITPCSFGGVSVITPGTNTSNQVAVLYQDVNCTEVPVAIHADQLTPTWRVYSTGSNVFQTRAGCLIGAEHVNNSYECDIPIGAGICASYQTQTNSPRRARSVASQSIIAYTMSLGAENSVAYSNNSIAIPTNFTISVTTEILPVSMTKTSVDCTMYICGDSTECSNLLLQYGSFCTQLNRALTGIAVEQDKNTQEVFAQVKQIYKTPPIKDFGGFNFSQILPDPSKPSKRSFIEDLLFNKVTLADAGFIKQYGDCLGDIAARDLICAQKFNGLTVLPPLLTDEMIAQYTSALLAGTITSGWTFGAGAALQIPFAMQMAYRFNGIGVTQNVLYENQKLIANQFNSAIGKIQDSLSSTASALGKLQDVVNQNAQALNTLVKQLSSNFGAISSVLNDILSRLDPPEAEVQIDRLITGRLQSLQTYVTQQLIRAAEIRASANLAATKMSECVLGQSKRVDFCGKGYHLMSFPQSAPHGVVFLHVTYVFAQEKNFTTAPAICHDGKAHFPREGVFVSNGTHWFVTQRNFYEPQIITTDNTFVSGNCDVLIGIVNNTVYDPLQPELDSGGGGSDIIKLLNEQVNKEMQSSNLYMSMSSWCYTHSLDGAGLFLFDHAAEEYEHAKKLIIFLNENNVPVQLTSISAPEHKFEGLTQIFQKAYEHEQHISESINNIVDHAIKSKDHATFNFLQWYVAEQHEEEVLFKDILDKIELIGNENHGLYLADQYVKGIAKSRKS

SEQ ID NO: 8855 - protein, 1315 aa, Artificial Sequence
  SARS-CoV-2/Shenzhen/SZTH-004/2020__EPI_ISL_406595 spike protein (1-1147)(K986P_V987P_P1069F) Ferritin construct
MFVFLVLLPLVSSQCVNLTTRTQLPPAYTNSFTRGVYYPDKVFRSSVLHSTQDLFLPFFSNVTWFHAIHVSGTNGTKRFDNPVLPFNDGVYFASTEKSNIIRGWIFGTTLDSKTQSLLIVNNATNVVIKVCEFQFCNDPFLGVYYHKNNKSWMESEFRVYSSANNCTFEYVSQPFLMDLEGKQGNFKNLREFVFKNIDGYFKIYSKHTPINLVRDLPQGFSALEPLVDLPIGINITRFQTLLALHRSYLTPGDSSSGWTAGAAAYYVGYLQPRTFLLKYNENGTITDAVDCALDPLSETKCTLKSFTVEKGIYQTSNFRVQPTESIVRFPNITNLCPFGEVFNATRFASVYAWDRKRISNCVAYYSVLYNSASFSTFKCYGVSPTKLNDLCFTNVYADSFVIRGDEVRQIAPGQTGKIADYNYKLPDDFTGCVIAWNSNNLDSKVGGNYNYLYRLFRKSNLKPFERDISTEIYQAGSTPCNGVEGFNCYFPLQSYGFQPTNGVGYQPYRVVVLSFELLHAPATVCGPKKSTNLVKNKCVNFNFNGLTGTGVLTESNKKFLPFQQFGRDIADTTDAVRDPQTLEILDITPCSFGGVSVITPGTNTSNQVAVLYQDVNCTEVPVAIHADQLTPTWRVYSTGSNVFQTRAGCLIGAEHVNNSYECDIPIGAGICASYQTQTNSPRRARSVASQSIIAYTMSLGAENSVAYSNNSIAIPTNFTISVTTEILPVSMTKTSVDCTMYICGDSTECSNLLLQYGSFCTQLNRALTGIAVEQDKNTQEVFAQVKQIYKTPPIKDFGGFNFSQILPDPSKPSKRSFIEDLLFNKVTLADAGFIKQYGDCLGDIAARDLICAQKFNGLTVLPPLLTDEMIAQYTSALLAGTITSGWTFGAGAALQIPFAMQMAYRFNGIGVTQNVLYENQKLIANQFNSAIGKIQDSLSSTASALGKLQDVVNQNAQALNTLVKQLSSNFGAISSVLNDILSRLDPPEAEVQIDRLITGRLQSLQTYVTQQLIRAAEIRASANLAATKMSECVLGQSKRVDFCGKGYHLMSFPQSAPHGVVFLHVTYVFAQEKNFTTAPAICHDGKAHFPREGVFVSNGTHWFVTQRNFYEPQIITTDNTFVSGNCDVVIGIVNNTVYDPLQPELDSGGGGSDIIKLLNEQVNKEMQSSNLYMSMSSWCYTHSLDGAGLFLFDHAAEEYEHAKKLIIFLNENNVPVQLTSISAPEHKFEGLTQIFQKAYEHEQHISESINNIVDHAIKSKDHATFNFLQWYVAEQHEEEVLFKDILDKIELIGNENHGLYLADQYVKGIAKSRKS

SEQ ID NO: 8856 - protein, 1315 aa, Artificial Sequence
  SARS-CoV-2/France/IDF0372/2020__EPI_ISL_406596 spike protein (1-1147)(K986P_V987P_P1069F) Ferritin construct
MFVFLVLLPLVSSQCVNLTTRTQLPPAYTNSFTRGVYYPDKVFRSSVLHSTQDLFLPFFSNVTWFHAIHVSGTNGTKRFDNPVLPFNDGVYFASTEKSNIIRGWIFGTTLDSKTQSLLIVNNATNVVIKVCEFQFCNDPFLGVYYHKNNKSWMESEFRVYSSANNCTFEYVSQPFLMDLEGKQGNFKNLREFVFKNIDGYFKIYSKHTPINLVRDLPQGFSALEPLVDLPIGINITRFQTLLALHRSYLTPGDSSSGWTAGAAAYYVGYLQPRTFLLKYNENGTITDAVDCALDPLSETKCTLKSFTVEKGIYQTSNFRVQPTESIVRFPNITNLCPFGEVFNATRFASVYAWNRKRISNCVADYSFLYNSASFSTFKCYGVSPTKLNDLCFTNVYADSFVIRGDEVRQIAPGQTGKIADYNYKLPDDFTGCVIAWNSNNLDSKVGGNYNYLYRLFRKSNLKPFERDISTEIYQAGSTPCNGVEGFNCYFPLQSYGFQPTNGVGYQPYRVVVLSFELLHAPATVCGPKKSTNLVKNKCVNFNFNGLTGTGVLTESNKKFLPFQQFGRDIADTTDAVRDPQTLEILDITPCSFGGVSVITPGTNTSNQVAVLYQDVNCTEVPVAIHADQLTPTWRVYSTGSNVFQTRAGCLIGAEHVNNSYECDIPIGAGICASYQTQTNSPRRARSVASQSIIAYTMSLGAENSVAYSNNSIAIPTNFTISVTTEILPVSMTKTSVDCTMYICGDSTECSNLLLQYGSFCTQLNRALTGIAVEQDKNTQEVFAQVKQIYKTPPIKDFGGFNFSQILPDPSKPSKRSFIEDLLFNKVTLADAGFIKQYGDCLGDIAARDLICAQKFNGLTVLPPLLTDEMIAQYTSALLAGTITSGWTFGAGAALQIPFAMQMAYRFNGIGVTQNVLYENQKLIANQFNSAIGKIQDSLSSTASALGKLQDVVNQNAQALNTLVKQLSSNFGAISSVLNDILSRLDPPEAEVQIDRLITGRLQSLQTYVTQQLIRAAEIRASANLAATKMSECVLGQSKRVDFCGKGYHLMSFPQSAPHGVVFLHVTYVFAQEKNFTTAPAICHDGKAHFPREGVFVSNGTHWFVTQRNFYEPQIITTDNTFVSGNCDVVIGIVNNTVYDPLQPELDSGGGGSDIIKLLNEQVNKEMQSSNLYMSMSSWCYTHSLDGAGLFLFDHAAEEYEHAKKLIIFLNENNVPVQLTSISAPEHKFEGLTQIFQKAYEHEQHISESINNIVDHAIKSKDHATFNFLQWYVAEQHEEEVLFKDILDKIELIGNENHGLYLADQYVKGIAKSRKS

SEQ ID NO: 8857 - protein, 1315 aa, Artificial Sequence
  SARS-CoV-2/Australia/VIC01/2020__EPI_ISL_406844 spike protein (1-1147)(K986P_V987P_P1069F) Ferritin construct
MFVFLVLLPLVSSQCVNLTTRTQLPPAYTNSFTRGVYYPDKVFRSSVLHSTQDLFLPFFSNVTWFHAIHVSGTNGTKRFDNPVLPFNDGVYFASTEKSNIIRGWIFGTTLDSKTQSLLIVNNATNVVIKVCEFQFCNDPFLGVYYHKNNKSWMESEFRVYSSANNCTFEYVSQPFLMDLEGKQGNFKNLREFVFKNIDGYFKIYSKHTPINLVRDLPQGFSALEPLVDLPIGINITRFQTLLALHRRYLTPGDSSSGWTAGAAAYYVGYLQPRTFLLKYNENGTITDAVDCALDPLSETKCTLKSFTVEKGIYQTSNFRVQPTESIVRFPNITNLCPFGEVFNATRFASVYAWNRKRISNCVADYSVLYNSASFSTFKCYGVSPTKLNDLCFTNVYADSFVIRGDEVRQIAPGQTGKIADYNYKLPDDFTGCVIAWNSNNLDSKVGGNYNYLYRLFRKSNLKPFERDISTEIYQAGSTPCNGVEGFNCYFPLQSYGFQPTNGVGYQPYRVVVLSFELLHAPATVCGPKKSTNLVKNKCVNFNFNGLTGTGVLTESNKKFLPFQQFGRDIADTTDAVRDPQTLEILDITPCSFGGVSVITPGTNTSNQVAVLYQDVNCTEVPVAIHADQLTPTWRVYSTGSNVFQTRAGCLIGAEHVNNSYECDIPIGAGICASYQTQTNSPRRARSVASQSIIAYTMSLGAENSVAYSNNSIAIPTNFTISVTTEILPVSMTKTSVDCTMYICGDSTECSNLLLQYGSFCTQLNRALTGIAVEQDKNTQEVFAQVKQIYKTPPIKDFGGFNFSQILPDPSKPSKRSFIEDLLFNKVTLADAGFIKQYGDCLGDIAARDLICAQKFNGLTVLPPLLTDEMIAQYTSALLAGTITSGWTFGAGAALQIPFAMQMAYRFNGIGVTQNVLYENQKLIANQFNSAIGKIQDSLSSTASALGKLQDVVNQNAQALNTLVKQLSSNFGAISSVLNDILSRLDPPEAEVQIDRLITGRLQSLQTYVTQQLIRAAEIRASANLAATKMSECVLGQSKRVDFCGKGYHLMSFPQSAPHGVVFLHVTYVFAQEKNFTTAPAICHDGKAHFPREGVFVSNGTHWFVTQRNFYEPQIITTDNTFVSGNCDVVIGIVNNTVYDPLQPELDSGGGGSDIIKLLNEQVNKEMQSSNLYMSMSSWCYTHSLDGAGLFLFDHAAEEYEHAKKLIIFLNENNVPVQLTSISAPEHKFEGLTQIFQKAYEHEQHISESINNIVDHAIKSKDHATFNFLQWYVAEQHEEEVLFKDILDKIELIGNENHGLYLADQYVKGIAKSRKS

SEQ ID NO: 8858 - protein, 1315 aa, Artificial Sequence
  SARS-CoV-2/Germany/BavPat1/2020__EPI_ISL_406862 spike protein (1-1147)(K986P_V987P_P1069F) Ferritin construct
MFVFLVLLPLVSSQCVNLTTRTQLPPAYTNSFTRGVYYPDKVFRSSVLHSTQDLFLPFFSNVTWFHAIHVSGTNGTKRFDNPVLPFNDGVYFASTEKSNIIRGWIFGTTLDSKTQSLLIVNNATNVVIKVCEFQFCNDPFLGVYYHKNNKSWMESEFRVYSSANNCTFEYVSQPFLMDLEGKQGNFKNLREFVFKNIDGYFKIYSKHTPINLVRDLPQGFSALEPLVDLPIGINITRFQTLLALHRSYLTPGDSSSGWTAGAAAYYVGYLQPRTFLLKYNENGTITDAVDCALDPLSETKCTLKSFTVEKGIYQTSNFRVQPTESIVRFPNITNLCPFGEVFNATRFASVYAWNRKRISNCVADYSVLYNSASFSTFKCYGVSPTKLNDLCFTNVYADSFVIRGDEVRQIAPGQTGKIADYNYKLPDDFTGCVIAWNSNNLDSKVGGNYNYLYRLFRKSNLKPFERDISTEIYQAGSTPCNGVEGFNCYFPLQSYGFQPTNGVGYQPYRVVVLSFELLHAPATVCGPKKSTNLVKNKCVNFNFNGLTGTGVLTESNKKFLPFQQFGRDIADTTDAVRDPQTLEILDITPCSFGGVSVITPGTNTSNQVAVLYQGVNCTEVPVAIHADQLTPTWRVYSTGSNVFQTRAGCLIGAEHVNNSYECDIPIGAGICASYQTQTNSPRRARSVASQSIIAYTMSLGAENSVAYSNNSIAIPTNFTISVTTEILPVSMTKTSVDCTMYICGDSTECSNLLLQYGSFCTQLNRALTGIAVEQDKNTQEVFAQVKQIYKTPPIKDFGGFNFSQILPDPSKPSKRSFIEDLLFNKVTLADAGFIKQYGDCLGDIAARDLICAQKFNGLTVLPPLLTDEMIAQYTSALLAGTITSGWTFGAGAALQIPFAMQMAYRFNGIGVTQNVLYENQKLIANQFNSAIGKIQDSLSSTASALGKLQDVVNQNAQALNTLVKQLSSNFGAISSVLNDILSRLDPPEAEVQIDRLITGRLQSLQTYVTQQLIRAAEIRASANLAATKMSECVLGQSKRVDFCGKGYHLMSFPQSAPHGVVFLHVTYVFAQEKNFTTAPAICHDGKAHFPREGVFVSNGTHWFVTQRNFYEPQIITTDNTFVSGNCDVVIGIVNNTVYDPLQPELDSGGGGSDIIKLLNEQVNKEMQSSNLYMSMSSWCYTHSLDGAGLFLFDHAAEEYEHAKKLIIFLNENNVPVQLTSISAPEHKFEGLTQIFQKAYEHEQHISESINNIVDHAIKSKDHATFNFLQWYVAEQHEEEVLFKDILDKIELIGNENHGLYLADQYVKGIAKSRKS

SEQ ID NO: 8859 - protein, 1315 aa, Artificial Sequence
  SARS-CoV-2/Wuhan/HBCDC-HB-02/2020__EPI_ISL_412978 spike protein (1-1147)(K986P_V987P_P1069F) Ferritin construct
MFVFLVLLPLVSSQCVNLTTRTQLPPAYTNSFTRGVYYPDKVFRSSVLHSTQDLFLPFFSNVTWFHAIHVSGTNGTKRFDNPVLPFNDGVYFASTEKSNIIRGWIFGTTLDSKTQSLLIVNNATNVVIKVCEFQFCNDPFLGVYYHKNNKSWMESEFRVYSSANNCTFEYVSQPFLMDLEGKQGNFKNLREFVFKNIDGYFKIYSKHTPINLVRDLPQGFSALEPLVDLPIGINITRFQTLLALHRSYLTPGDSSSGWTAGAAAYYVGYLQPRTFLLKYNENGTITDAVDCALDPLSETKCTLKSFTVEKGIYQTSNFRVQPTESIVRFPNITNLCPFGEVFNATRFASVYAWNRKRISNCVADYSVLYNSASFSTFKCYGVSPTKLNDLCFTNVYADSFVIRGDEVRQIAPGQTGKIADYNYKLPDDFTGCVIAWNSNNLDSKVGGNYNYLYRLFRKSNLKPFERDISTEIYQAGSTPCNGVEGFNCYFPLQSYGFQPTNGVGYQPYRVVVLSFELLHAPATVCGPKKSTNLVKNKCVNFNFNGLTGTGVLTESNKKFLPFQQFGRDIADTTDAVRDPQTLEILDITPCSFGGVSVITPGTNTSNQVAVLYQDVNCTEVPVAIHADQLTPTWRVYSTGSNVFQTRAGCLIGAEHVNNSYECDIPIGAGICASYQTQTNSPRRARSVASQSIIAYTMSLGAENSVAYSNNSIAIPTNFTISVTTEILPVSMTKTSVDCTMYICGDSTECSNFLLQYGSFCTQLNRALTGIAVEQDKNTQEVFAQVKQIYKTPPIKDFGGFNFSQILPDPSKPSKRSFIEDLLFNKVTLADAGFIKQYGDCLGDIAARDLICAQKFNGLTVLPPLLTDEMIAQYTSALLAGTITSGWTFGAGAALQIPFAMQMAYRFNGIGVTQNVLYENQKLIANQFNSAIGKIQDSLSSTASALGKLQDVVNQNAQALNTLVKQLSSNFGAISSVLNDILSRLDPPEAEVQIDRLITGRLQSLQTYVTQQLIRAAEIRASANLAATKMSECVLGQSKRVDFCGKGYHLMSFPQSAPHGVVFLHVTYVFAQEKNFTTAPAICHDGKAHFPREGVFVSNGTHWFVTQRNFYEPQIITTDNTFVSGNCDVVIGIVNNTVYDPLQPELDSGGGGSDIIKLLNEQVNKEMQSSNLYMSMSSWCYTHSLDGAGLFLFDHAAEEYEHAKKLIIFLNENNVPVQLTSISAPEHKFEGLTQIFQKAYEHEQHISESINNIVDHAIKSKDHATFNFLQWYVAEQHEEEVLFKDILDKIELIGNENHGLYLADQYVKGIAKSRKS

SEQ ID NO: 8860 - protein, 1315 aa, Artificial Sequence
  SARS-CoV-2/Australia/QLD02/2020__EPI_ISL_407896 spike protein (1-1147)(K986P_V987P_P1069F) Ferritin construct
MFVFLVLLPLVSSQCVNLTTRTQLPPAYTNSFTRGVYYPDKVFRSSVLHSTQDLFLPFFSNVTWFHAIHVSGTNGTKRFDNPVLPFNDGVYFASTEKSNIIRGWIFGTTLDSKTQSLLIVNNATNVVIKVCEFQFCNDPFLGVYYHKNNKSWMESEFRVYSSANNCTFEYVSQPFLMDLEGKQGNFKNLREFVFKNIDGYFKIYSKHTPINLVRDLPQGFSALEPLVDLPIGINITRFQTLLALHRSYLTPGDSSSGWTAGAAAYYVGYLQPRTFLLKYNENGTITDAVDCALDPLSETKCTLKSFTVEKGIYQTSNFRVQPTESIVRFPNITNLCPFGEVFNATRFASVYAWNRKRISNCVADYSVLYNSASFSTFKCYGVSPTKLNDLCFTNVYADSFVIRGDEVRQIAPGQTGKIADYNYKLPDDFTGCVIAWNSNNLDSKVGGNYNYLYRLFRKSNLKPFERDISTEIYQAGSTPCNGVEGFNCYFPLQSYGFQPTNGVGYQPYRVVVLSFELLHAPATVCGPKKSTNLVKNKCVNFNFNGLTGTGVLTESNKKFLPFQQFGRDIADTTDAVRDPQTLEILDITPCSFGGVSVITPGTNTSNQVAVLYQDVNCTEVPVAIHADQLTPTWRVYSTGSNVFQTRAGCLIGAEHVNNSYECDIPIGAGICASYQTQTNSPRRARSVASQSIIAYTMSLGAENSVAYSNNSIAIPTNFTISVTTEILPVSMTKTSVDCTMYICGDSTECSNLLLQYGSFCTQLNRALTGIAVEQDKNTQEVFAQVKQIYKTPPIKDFGGFNFSQILPDPSKPSKRSFIEDLLFNKVTLADAGFIKQYGDCLGDIAARDLICAQKFNGLTVLPPLLTDEMIAQYTSALLAGTITSGWTFGAGAALQIPFAMQMAYRFNGIGVTQNVLYENQKLIANQFNSAIGKIQDSLSSTASALGKLQDVVNQNAQALNTLVKQLSSNFGAISSVLNDILSRLDPPEAEVQIDRLITGRLQSLQTYVTQQLIRAAEIRASANLAATKMSECVLGQSKRVDFCGKGYHLMSFPQSAPHGVVFLHVTYVFAQEKNFTTAPAICHDGKAHFPREGVFVSNGTHWFVTQRNFYEPQIITTDNTFVSGNCDVVIGIVNNTVYDPLQLELDSGGGGSDIIKLLNEQVNKEMQSSNLYMSMSSWCYTHSLDGAGLFLFDHAAEEYEHAKKLIIFLNENNVPVQLTSISAPEHKFEGLTQIFQKAYEHEQHISESINNIVDHAIKSKDHATFNFLQWYVAEQHEEEVLFKDILDKIELIGNENHGLYLADQYVKGIAKSRKS

SEQ ID NO: 8861 - protein, 1315 aa, Artificial Sequence
  SARS-CoV-2/India/1-31/2020__EPI_ISL_413523 spike protein (1-1147)(K986P_V987P_P1069F) Ferritin construct
MFVFLVLLPLVSSQCVNLTTRTQLPPAYTNSFTRGVYYPDKVFRSSVLHSTQDLFLPFFSNVTWFHAIHVSGTNGTKRFDNPVLPFNDGVYFASTEKSNIIRGWIFGTTLDSKTQSLLIVNNATNVVIKVCEFQFCNDPFLGVYYHKNNKSWMESEFRVYSSANNCTFEYVSQPFLMDLEGKQGNFKNLREFVFKNIDGYFKIYSKHTPINLVRDLPQGFSALEPLVDLPIGINITRFQTLLALHRSYLTPGDSSSGWTAGAAAYYVGYLQPRTFLLKYNENGTITDAVDCALDPLSETKCTLKSFTVEKGIYQTSNFRVQPTESIVRFPNITNLCPFGEVFNATRFASVYAWNRKRISNCVADYSVLYNSASFSTFKCYGVSPTKLNDLCFTNVYADSFVIRGDEVRQIAPGQTGKIADYNYKLPDDFTGCVIAWNSNNLDSKVGGNYNYLYRLFRKSNLKPFERDISTEIYQAGSTPCNGVEGFNCYFPLQSYGFQPTNGVGYQPYRVVVLSFELLHAPATVCGPKKSTNLVKNKCVNFNFNGLTGTGVLTESNKKFLPFQQFGRDIADTTDAVRDPQTLEILDITPCSFGGVSVITPGTNTSNQVAVLYQDVNCTEVPVAIHADQLTPTWRVYSTGSNVFQTRAGCLIGAEHVNNSYECDIPIGAGICASYQTQTNSPRRARSVASQSIIAYTMSLGAENSVAYSNNSIAIPTNFTISVTTEILPVSMTKTSVDCTMYICGDSTECSNLLLQYGSFCTQLNRALTGIAVEQDKNTQEVFAQVKQIYKTPPIKDFGGFNFSQILPDPSKPSKRSFIEDLLFNKVTLADAGFIKQYGDCLGDIAARDLICAQKFNGLTVLPPLLTDEMIAQYTSALLAGTITSGWTFGAGAALQIPFAMQMAYRFNGIGVTQNVLYENQKLIANQFNSVIGKIQDSLSSTASALGKLQDVVNQNAQALNTLVKQLSSNFGAISSVLNDILSRLDPPEAEVQIDRLITGRLQSLQTYVTQQLIRAAEIRASANLAATKMSECVLGQSKRVDFCGKGYHLMSFPQSAPHGVVFLHVTYVFAQEKNFTTAPAICHDGKAHFPREGVFVSNGTHWFVTQRNFYEPQIITTDNTFVSGNCDVVIGIVNNTVYDPLQPELDSGGGGSDIIKLLNEQVNKEMQSSNLYMSMSSWCYTHSLDGAGLFLFDHAAEEYEHAKKLIIFLNENNVPVQLTSISAPEHKFEGLTQIFQKAYEHEQHISESINNIVDHAIKSKDHATFNFLQWYVAEQHEEEVLFKDILDKIELIGNENHGLYLADQYVKGIAKSRKS

SEQ ID NO: 8862 - protein, 1315 aa, Artificial Sequence
  SARS-CoV-2/Guangdong/GD2020087-P0008/2020__EPI_ISL_413863 spike protein (1-1147)(K986P_V987P_P1069F) Ferritin construct
MFVFLVLLPLVSSQCVNLTTRTQLPPAYTNSFTRGVYYPDKVFRSSVLHSTQDLFLPFFSNVTWFHAIHVSGTNGTKRFDNPVLPFNDGVYFASTEKSNIIRGWIFGTTLDSKTQSLLIVNNATNVVIKVCEFQFCNDPFLGVYYHKNNKSWMESEFRVYSSANNCTFEYVSQPFLMDLEGKQGNFKNLREFVFKNIDGYFKIYSKHTPINLVRDLPQGFSALEPLVDLPIGINITRFQTLLALHRSYLTPGDSSSGWTAGAAAYYVGYLQPRTFLLKYNENGTITDAVDCALDPLSETKCTLKSFTVEKGIYQTSNFRVQPTESIVRFPNITNLCPFGEVFNATRFASVYAWNRKRISNCVADYSVLYNSASFSTFKCYGVSPTKLNDLCFTNVYADSFVIRGDEVREIAPGQTGKIADYNYKLPDDFTGCVIAWNSNNLDSKVGGNYNYLYRLFRKSNLKPFERDISTEIYQAGSTPCNGVEGFNCYFPLQSYGFQPTNGVGYQPYRVVVLSFELLHAPATVCGPKKSTNLVKNKCVNFNFNGLTGTGVLTESNKKFLPFQQFGRDIADTTDAVRDPQTLEILDITPCSFGGVSVITPGTNTSNQVAVLYQDVNCTEVPVAIHADQLTPTWRVYSTGSNVFQTRAGCLIGAEHVNNSYECDIPIGAGICASYQTQTNSPRRARSVASQSIIAYTMSLGAENSVAYSNNSIAIPTNFTISVTTEILPVSMTKTSVDCTMYICGDSTECSNLLLQYGSFCTQLNRALTGIAVEQDKNTQEVFAQVKQIYKTPPIKDFGGFNFSQILPDPSKPSKRSFIEDLLFNKVTLADAGFIKQYGDCLGDIAARDLICAQKFNGLTVLPPLLTDEMIAQYTSALLAGTITSGWTFGAGAALQIPFAMQMAYRFNGIGVTQNVLYENQKLIANQFNSAIGKIQDSLSSTASALGKLQDVVNQNAQALNTLVKQLSSNFGAISSVLNDILSRLDPPEAEVQIDRLITGRLQSLQTYVTQQLIRAAEIRASANLAATKMSECVLGQSKRVDFCGKGYHLMSFPQSAPHGVVFLHVTYVFAQEKNFTTAPAICHDGKAHFPREGVFVSNGTHWFVTQRNFYEPQIITTDNTFVSGNCDVVIGIVNNTVYDPLQPELDSGGGGSDIIKLLNEQVNKEMQSSNLYMSMSSWCYTHSLDGAGLFLFDHAAEEYEHAKKLIIFLNENNVPVQLTSISAPEHKFEGLTQIFQKAYEHEQHISESINNIVDHAIKSKDHATFNFLQWYVAEQHEEEVLFKDILDKIELIGNENHGLYLADQYVKGIAKSRKS

SEQ ID NO: 8863 - protein, 1315 aa, Artificial Sequence
  SARS-CoV-2/Sweden/01/2020__EPI_ISL_411951 spike protein (1-1147)(K986P_V987P_P1069F) Ferritin construct
MFVFLVLLPLVSSQCVNLTTRTQLPPAYTNSFTRGVYYPDKVFRSSVLHSTQDLFLPFFSNVTWFHAIHVSGTNGTKRFDNPVLPFNDGVYFASTEKSNIIRGWIFGTTLDSKTQSLLIVNNATNVVIKVCEFQFCNDPFLGVYYHKNNKSWMESEFRVYSSANNCTFEYVSQPFLMDLEGKQGNFKNLREFVFKNIDGYFKIYSKHTPINLVRDLPQGFSALEPLVDLPIGINITRFQTLLALHRSYLTPGDSSSGWTAGAAAYYVGYLQPRTFLLKYNENGTITDAVDCALDPLSETKCTLKSFTVEKGIYQTSNFRVQPTESIVRFPNITNLCPFGEVFNATRFASVYAWNRKRISNCVADYSVLYNSASFSTFKCYGVSPTKLNDLCFTNVYADSFVIRGDEVRQIAPGQTGKIADYNYKLPDDFTGCVIAWNSNNLDSKVGGNYNYLYRLFRKSNLKPFERDISTEIYQAGSTPCNGVEGFNCYFPLQSYGFQPTNGVGYQPYRVVVLSFELLHAPATVCGPKKSTNLVKNKCVNFNFNGLTGTGVLTESNKKFLPFQQFGRDIADTTDAVRDPQTLEILDITPCSFGGVSVITPGTNTSNQVAVLYQDVNCTEVPVAIHADQLTPTWRVYSTGSNVFQTRAGCLIGAEHVNNSYECDIPIGAGICASYQTQTNSPRRARSVASQSIIAYTMSLGAENSVAYSNNSIAIPTNFTISVTTEILPVSMTKTSVDCTMYICGDSTECSNLLLQYGSFCTQLNRALTGIAVEQDKNTQEVFAQVKQIYKTPPIKDCGGFNFSQILPDPSKPSKRSFIEDLLFNKVTLADAGFIKQYGDCLGDIAARDLICAQKFNGLTVLPPLLTDEMIAQYTSALLAGTITSGWTFGAGAALQIPFAMQMAYRFNGIGVTQNVLYENQKLIANQFNSAIGKIQDSLSSTASALGKLQDVVNQNAQALNTLVKQLSSNFGAISSVLNDILSRLDPPEAEVQIDRLITGRLQSLQTYVTQQLIRAAEIRASANLAATKMSECVLGQSKRVDFCGKGYHLMSFPQSAPHGVVFLHVTYVFAQEKNFTTAPAICHDGKAHFPREGVFVSNGTHWFVTQRNFYEPQIITTDNTFVSGNCDVVIGIVNNTVYDPLQPELDSGGGGSDIIKLLNEQVNKEMQSSNLYMSMSSWCYTHSLDGAGLFLFDHAAEEYEHAKKLIIFLNENNVPVQLTSISAPEHKFEGLTQIFQKAYEHEQHISESINNIVDHAIKSKDHATFNFLQWYVAEQHEEEVLFKDILDKIELIGNENHGLYLADQYVKGIAKSRKS

SEQ ID NO: 8864 - protein, 1315 aa, Artificial Sequence
  SARS-CoV-2/Tianmen/HBCDC-HB-07/2020__EPI_ISL_412983 spike protein (1-1147)(K986P_V987P_P1069F) Ferritin construct
MFVFLVLLPLVSSQCVNLTTRTQLPPAYTNSFTRGVYYPDKVFRSSVLHSTQDLFLPFFSNVTWFHAIHVSGTNGTKRFDNPVLPFNDGVYFASTEKSNIIRGWIFGTTLDSKTQSLLIVNNATNVVIKVCEFQFCNDPFLGVYYHKNNKSWMESEFRVYSSANNCTFEYVSQPFLMDLEGKQGNFKNLREFVFKNIDGYFKIYSKHTPINLVRDLPQGFSALEPLVDLPIGINITRFQTLLALHRSYLTPGDSSSGWTAGAAAYYVGYLQPRTFLLKYNENGTITDAVDCALDPLSETKCTLKSFTVEKGIYQTSNFRVQPTESIVRFPNITNLCPFGEVFNATRFASVYAWNRKRISNCVADYSVLYNSASFSTFKCYGVSPTKLNDLCFTNVYADSFVIRGDEVRQIAPGQTGKIADYNYKLPDDFTGCVIAWNSNNLDSKVGGNYNYLYRLFRKSNLKPFERDISTEIYQAGSTPCNGVEGFNCYFPLQSYGFQPTNGVGYQPYRVVVLSFELLHAPATVCGPKKSTNLVKNKCVNFNFNGLTGTGVLTESNKKFLPFQQFGRDIADTTDAVRDPQTLEILDITPCSFGGVSVITPGTNTSNQVAVLYQDLNCTEVPVAIHADQLTPTWRVYSTGSNVFQTRAGCLIGAEHVNNSYECDIPIGAGICASYQTQTNSPRRARSVASQSIIAYTMSLGAENSVAYSNNSIAIPTNFTISVTTEILPVSMTKTSVDCTMYICGDSTECSNLLLQYGSFCTQLNRALTGIAVEQDKNTQEVFAQVKQIYKTPPIKDFGGFNFSQILPDPSKPSKRSFIEDLLFNKVTLADAGFIKQYGDCLGDIAARDLICAQKFNGLTVLPPLLTDEMIAQYTSALLAGTITSGWTFGAGAALQIPFAMQMAYRFNGIGVTQNVLYENQKLIANQFNSAIGKIQDSLSSTASALGKLQDVVNQNAQALNTLVKQLSSNFGAISSVLNDILSRLDPPEAEVQIDRLITGRLQSLQTYVTQQLIRAAEIRASANLAATKMSECVLGQSKRVDFCGKGYHLMSFPQSAPHGVVFLHVTYVFAQEKNFTTAPAICHDGKAHFPREGVFVSNGTHWFVTQRNFYEPQIITTDNTFVSGNCDVVIGIVNNTVYDPLQPELDSGGGGSDIIKLLNEQVNKEMQSSNLYMSMSSWCYTHSLDGAGLFLFDHAAEEYEHAKKLIIFLNENNVPVQLTSISAPEHKFEGLTQIFQKAYEHEQHISESINNIVDHAIKSKDHATFNFLQWYVAEQHEEEVLFKDILDKIELIGNENHGLYLADQYVKGIAKSRKS

SEQ ID NO: 8865 - protein, 1315 aa, Artificial Sequence
  SARS-CoV-2/Hong Kong/case42_VM20002493/2020__EPI_ISL_414527 spike protein (1-1147)(K986P_V987P_P1069F) Ferritin construct
MFVFLVLLPLVSSQCVNLTTRTQLPPAYTNSFTRGVYYPDKVFRSSVLHSTQDLFLPFFSNVTWFHAIHVSGTNGTKRFDNPVLPFNDGVYFASTEKSNIIRGWIFGTTLDSKTQSLLIVNNATNVVIKVCEFQFCNDPFLGVYYHKNNKSWMESEFRVYSSANNCTFEYVSQPFLMDLEGKQGNFKNLREFVFKNIDGYFKIYSKHTPINLVRDLPQGFSALEPLVDLPIGINITRFQTLLALHRSYLTPGDSSSGWTAGAAAYYVGYLQPRTFLLKYNENGTITDAVDCALDPLSETKCTLKSFTVEKGIYQTSNFRVQPTESIVRFPNITNLCPFGEVFNATRFASVYAWNRKRISNCVADYSVLYNSASFSTFKCYGVSPTKLNDLCFTNVYADSFVIRGDEVRQIAPGQTGKIADYNYKLPDDFTGCVIAWNSNNLDSKVGGNYNYLYRLFRKSNLKPFERDISTEIYQAGSTPCNGVEGFNCYFPLQSYGFQPTNGVGYQPYRVVVLSFELLHAPATVCGPKKSTNLVKNKCVNFNFNGLTGTGVLTESNKKFLPFQQFGRDIADTTDAVRDPQTLEILDITPCSFGGVSVITPGTNTSNQVAVLYQDVNCTEVPVAIHADQLTPTWRVYSTGSNVFQTRAGCLIGAEHVNNSYECDIPIGAGICASYQTQTNSPRRARSVASQSIIAYTMSLGAENSVAYSNNSIAIPTNFAISVTTEILPVSMTKTSVDCTMYICGDSTECSNLLLQYGSFCTQLNRALTGIAVEQDKNTQEVFAQVKQIYKTPPIKDFGGFNFSQILPDPSKPSKRSFIEDLLFNKVTLADAGFIKQYGDCLGDIAARDLICAQKFNGLTVLPPLLTDEMIAQYTSALLAGTITSGWTFGAGAALQIPFAMQMAYRFNGIGVTQNVLYENQKLIANQFNSAIGKIQDSLSSTASALGKLQDVVNQNAQALNTLVKQLSSNFGAISSVLNDILSRLDPPEAEVQIDRLITGRLQSLQTYVTQQLIRAAEIRASANLAATKMSECVLGQSKRVDFCGKGYHLMSFPQSAPHGVVFLHVTYVFAQEKNFTTAPAICHDGKAHFPREGVFVSNGTHWFVTQRNFYEPQIITTDNTFVSGNCDVVIGIVNNTVYDPLQPELDSGGGGSDIIKLLNEQVNKEMQSSNLYMSMSSWCYTHSLDGAGLFLFDHAAEEYEHAKKLIIFLNENNVPVQLTSISAPEHKFEGLTQIFQKAYEHEQHISESINNIVDHAIKSKDHATFNFLQWYVAEQHEEEVLFKDILDKIELIGNENHGLYLADQYVKGIAKSRKS

SEQ ID NO: 8866 - protein, 1315 aa, Artificial Sequence
  SARS-CoV-2/USA/CruiseA-23/2020__EPI_ISL_414482 spike protein (1-1147)(K986P_V987P_P1069F) Ferritin construct
MFVFLVLLPLVSSQCVNLTTRTQLPPAYTNSFTRGVYYPDKVFRSSVLHSTQDLFLPFFSNVTWFHAIHVSGTNGTKRFDNPVLPFNDGVYFASTEKSNIIRGWIFGTTLDSKTQSLLIVNNATNVVIKVCEFQFCNDPFLGVYYHKNNKSWMESEFRVYSSANNCTFEYVSQPFLMDLEVKQGNFKNLREFVFKNIDGYFKIYSKHTPINLVRDLPQGFSALEPLVDLPIGINITRFQTLLALHRSYLTPGDSSSGWTAGAAAYYVGYLQPRTFLLKYNENGTITDAVDCALDPLSETKCTLKSFTVEKGIYQTSNFRVQPTESIVRFPNITNLCPFGEVFNATRFASVYAWNRKRISNCVADYSVLYNSASFSTFKCYGVSPTKLNDLCFTNVYADSFVIRGDEVRQIAPGQTGKIADYNYKLPDDFTGCVIAWNSNNLDSKVGGNYNYLYRLFRKSNLKPFERDISTEIYQAGSTPCNGVEGFNCYFPLQSYGFQPTNGVGYQPYRVVVLSFELLHAPATVCGPKKSTNLVKNKCVNFNFNGLTGTGVLTESNKKFLPFQQFGRDIADTTDAVRDPQTLEILDITPCSFGGVSVITPGTNTSNQVAVLYQDVNCTEVPVAIHADQLTPTWRVYSTGSNVFQTRAGCLIGAEHVNNSYECDIPIGAGICASYQTQTNSPRRARSVASQSIIAYTMSLGAENSVAYSNNSIAIPTNFTISVTTEILPVSMTKTSVDCTMYICGDSTECSNLLLQYGSFCTQLNRALTGIAVEQDKNTQEVFAQVKQIYKTPPIKDFGGFNFSQILPDPSKPSKRSFIEDLLFNKVTLADAGFIKQYGDCLGDIAARDLICAQKFNGLTVLPPLLTDEMIAQYTSALLAGTITSGWTFGAGAALQIPFAMQMAYRFNGIGVTQNVLYENQKLIANQFNSAIGKIQDSLSSTASALGKLQDVVNQNAQALNTLVKQLSSNFGAISSVLNDILSRLDPPEAEVQIDRLITGRLQSLQTYVTQQLIRAAEIRASANLAATKMSECVLGQSKRVDFCGKGYHLMSFPQSAPHGVVFLHVTYVFAQEKNFTTAPAICHDGKAHFPREGVFVSNGTHWFVTQRNFYEPQIITTDNTFVSGNCDVVIGIVNNTVYDPLQPELDSGGGGSDIIKLLNEQVNKEMQSSNLYMSMSSWCYTHSLDGAGLFLFDHAAEEYEHAKKLIIFLNENNVPVQLTSISAPEHKFEGLTQIFQKAYEHEQHISESINNIVDHAIKSKDHATFNFLQWYVAEQHEEEVLFKDILDKIELIGNENHGLYLADQYVKGIAKSRKS

SEQ ID NO: 8867 - protein, 1315 aa, Artificial Sequence
  SARS-CoV-2/Hong Kong/case85_VM20002868/2020__EPI_ISL_414519 spike protein (1-1147)(K986P_V987P_P1069F) Ferritin construct
MFVFLVLVPLVSSQCVNLTTRTQLPPAYTNSFTRGVYYPDKVFRSSVLHSTQDLFLPFFSNVTWFHAIHVSGTNGTKRFDNPVLPFNDGVYFASTEKSNIIRGWIFGTTLDSKTQSLLIVNNATNVVIKVCEFQFCNDPFLGVYYHKNNKSWMESEFRVYSSANNCTFEYVSQPFLMDLEGKQGNFKNLREFVFKNIDGYFKIYSKHTPINLVRDLPQGFSALEPLVDLPIGINITRFQTLLALHRSYLTPGDSSSGWTAGAAAYYVGYLQPRTFLLKYNENGTITDAVDCALDPLSETKCTLKSFTVEKGIYQTSNFRVQPTESIVRFPNITNLCPFGEVFNATRFASVYAWNRKRISNCVADYSVLYNSASFSTFKCYGVSPTKLNDLCFTNVYADSFVIRGDEVRQIAPGQTGKIADYNYKLPDDFTGCVIAWNSNNLDSKVGGNYNYLYRLFRKSNLKPFERDISTEIYQAGSTPCNGVEGFNCYFPLQSYGFQPTNGVGYQPYRVVVLSFELLHAPATVCGPKKSTNLVKNKCVNFNFNGLTGTGVLTESNKKFLPFQQFGRDIADTTDAVRDPQTLEILDITPCSFGGVSVITPGTNTSNQVAVLYQDVNCTEVPVAIHADQLTPTWRVYSTGSNVFQTRAGCLIGAEHVNNSYECDIPIGAGICASYQTQTNSPRRARSVASQSIIAYTMSLGAENSVAYSNNSIAIPTNFTISVTTEILPVSMTKTSVDCTMYICGDSTECSNLLLQYGSFCTQLNRALTGIAVEQDKNTQEVFAQVKQIYKTPPIKDFGGFNFSQILPDPSKPSKRSFIEDLLFNKVTLADAGFIKQYGDCLGDIAARDLICAQKFNGLTVLPPLLTDEMIAQYTSALLAGTITSGWTFGAGAALQIPFAMQMAYRFNGIGVTQNVLYENQKLIANQFNSAIGKIQDSLSSTASALGKLQDVVNQNAQALNTLVKQLSSNFGAISSVLNDILSRLDPPEAEVQIDRLITGRLQSLQTYVTQQLIRAAEIRASANLAATKMSECVLGQSKRVDFCGKGYHLMSFPQSAPHGVVFLHVTYVFAQEKNFTTAPAICHDGKAHFPREGVFVSNGTHWFVTQRNFYEPQIITTDNTFVSGNCDVVIGIVNNTVYDPLQPELDSGGGGSDIIKLLNEQVNKEMQSSNLYMSMSSWCYTHSLDGAGLFLFDHAAEEYEHAKKLIIFLNENNVPVQLTSISAPEHKFEGLTQIFQKAYEHEQHISESINNIVDHAIKSKDHATFNFLQWYVAEQHEEEVLFKDILDKIELIGNENHGLYLADQYVKGIAKSRKS

SEQ ID NO: 8868 - protein, 1315 aa, Artificial Sequence; identical to SEQ ID NO: 8858
  SARS-CoV-2/England/200990660/2020__EPI_ISL_414523 spike protein (1-1147)(K986P_V987P_P1069F) Ferritin construct

SEQ ID NO: 8869 - protein, 1315 aa, Artificial Sequence
  SARS-CoV-2/Australia/NSW09/2020__EPI_ISL_413595 spike protein (1-1147)(K986P_V987P_P1069F) Ferritin construct
MFVFLVLLPLVSSQCVNLTTRTQLPPAYTNSFTRGVYYPDKVFRSSVLHSTQDLFLPFFSNVTWFHAIHVSGTNGTKRFDNPVLPFNDGVYFASTEKSNIIRGWIFGTTLDSKTQSLLIVNNATNVVIKVCEFQFCNDPFLGVYYHKNNKSWMESEFRVYSSANNCTFEYVSQPFLMDLEGKQGNFKNLREFVFKNIDGYFKIYSKHTPINLVRDLPQGFSALEPLVDLPIGINITRFQTLLALHRSYLTPGDSSSGWTAGAAAYYVGYLQPRTFLLKYNENGTITDAVDCALDPLSETKCTLKSFTVEKGIYQTSNFRVQPTESIVRFPNITNLCPFGEVFNATRFASVYAWNRKRISNCVADYSVLYNSASFSTFKCYGVSPTKLNDLCFTNVYADSFVIRGDEVRQIAPGQTGKIADYNYKLPDDFTGCVIAWNSNNLDSKVGGNYNYLYRLFRKSNLKPFERDISTEIYQAGSTPCNGVEGFNCYFPLQSYGFQPTNGVGYQPYRVVVLSFELLHAPATVCGPKKSTNLVKNKCVNFNFNGLTGTGVLTESNKKFLPFQQFGRDIADTTDAVRDPQTLEILDITPCSFGGVSVITPGTNTSNQVAVLYQDVNCTEVPVAIHADQLTPTWRVYSTGSNVFQTRAGCLIGAEHVNNSYECDIPIGAGICASYQTQTNSPRRARSVASQSIIAYTMSLGAENSVAYSNNSIAIPTNFTISVTTEILPVSMTKTSVDCTMYICGDSTECSNLLLQYGSFCTQLNRALTGIAVEQDKNTQEVFAQVKQIYKTPPIKDFGGFNFSQILPDPSKPSKRSFIEDLLFNKVTLADAGFIKQYGDCLGDIAARDLICAQKFNGLTVLPPLLTDEMIAQYTSALLAGTITSGWTFGAGAALQIPFAMQMAYRFNGIGVTQNVLYENQKLIANQFNSAIGKIQDSLSFTASALGKLQDVVNQNAQALNTLVKQLSSNFGAISSVLNDILSRLDPPEAEVQIDRLITGRLQSLQTYVTQQLIRAAEIRASANLAATKMSECVLGQSKRVDFCGKGYHLMSFPQSAPHGVVFLHVTYVFAQEKNFTTAPAICHDGKAHFPREGVFVSNGTHWFVTQRNFYEPQIITTDNTFVSGNCDVVIGIVNNTVYDPLQPELDSGGGGSDIIKLLNEQVNKEMQSSNLYMSMSSWCYTHSLDGAGLFLFDHAAEEYEHAKKLIIFLNENNVPVQLTSISAPEHKFEGLTQIFQKAYEHEQHISESINNIVDHAIKSKDHATFNFLQWYVAEQHEEEVLFKDILDKIELIGNENHGLYLADQYVKGIAKSRKS

SEQ ID NO: 8870 - protein, 1315 aa, Artificial Sequence; identical to SEQ ID NO: 8850
  SARS-CoV-2/Australia/NSW10/2020__EPI_ISL_413596 spike protein (1-1147)(K986P_V987P_P1069F) Ferritin construct

SEQ ID NO: 8871 - protein, 1315 aa, Artificial Sequence
  SARS-CoV-2/Switzerland/1000477797/2020__EPI_ISL_413023 spike protein (1-1147)(K986P_V987P_P1069F) Ferritin construct
MFVFLVLLPLVSSQCVNLTTRTQLPPAYTNSFTRGVYYPDKVFRSSVLHSTQDLFLPFFSNVTWFHAIHVSGTNGTKRFDNPVLPFNDGVYFASTEKSNIIRGWIFGTTLDSKTQSLLIVNNATNVVIKVCEFQFCNDPFLGVYYHKNNKSWMESEFRVYSSANNCTFEYVSQPFLMDLEGKQGNFKNLREFVFKNIDGYFNIYSKHTPINLVRDLPQGFSALEPLVDLPIGINITRFQTLLALHRSYLTPGDSSSGWTAGAAAYYVGYLQPRTFLLKYNENGTITDAVDCALDPLSETKCTLKSFTVEKGIYQTSNFRVQPTESIVRFPNITNLCPFGEVFNATRFASVYAWNRKRISNCVADYSVLYNSASFSTFKCYGVSPTKLNDLCFTNVYADSFVIRGDEVRQIAPGQTGKIADYNYKLPDDFTGCVIAWNSNNLDSKVGGNYNYLYRLFRKSNLKPFERDISTEIYQAGSTPCNGVEGFNCYFPLQSYGFQPTNGVGYQPYRVVVLSFELLHAPATVCGPKKSTNLVKNKCVNFNFNGLTGTGVLTESNKKFLPFQQFGRDIADTTDAVRDPQTLEILDITPCSFGGVSVITPGTNTSNQVAVLYQGVNCTEVPVAIHADQLTPTWRVYSTGSNVFQTRAGCLIGAEHVNNSYECDIPIGAGICASYQTQTNSPRRARSVASQSIIAYTMSLGAENSVAYSNNSIAIPTNFTISVTTEILPVSMTKTSVDCTMYICGDSTECSNLLLQYGSFCTQLNRALTGIAVEQDKNTQEVFAQVKQIYKTPPIKDFGGFNFSQILPDPSKPSKRSFIEDLLFNKVTLADAGFIKQYGDCLGDIAARDLICAQKFNGLTVLPPLLTDEMIAQYTSALLAGTITSGWTFGAGAALQIPFAMQMAYRFNGIGVTQNVLYENQKLIANQFNSAIGKIQDSLSSTASALGKLQDVVNQNAQALNTLVKQLSSNFGAISSVLNDILSRLDPPEAEVQIDRLITGRLQSLQTYVTQQLIRAAEIRASANLAATKMSECVLGQSKRVDFCGKGYHLMSFPQSAPHGVVFLHVTYVFAQEKNFTTAPAICHDGKAHFPREGVFVSNGTHWFVTQRNFYEPQIITTDNTFVSGNCDVVIGIVNNTVYDPLQPELDSGGGGSDIIKLLNEQVNKEMQSSNLYMSMSSWCYTHSLDGAGLFLFDHAAEEYEHAKKLIIFLNENNVPVQLTSISAPEHKFEGLTQIFQKAYEHEQHISESINNIVDHAIKSKDHATFNFLQWYVAEQHEEEVLFKDILDKIELIGNENHGLYLADQYVKGIAKSRKS

SEQ ID NO: 8872 - protein, 1315 aa, Artificial Sequence
  SARS-CoV-2/Belgium/BA-02291/2020__EPI_ISL_415159 spike protein (1-1147)(K986P_V987P_P1069F) Ferritin construct
MFVFLVLLPLVSSQCVNLTTRTQLPPAYTNSFTRGVYYPDKVFRSSVLHSTQDLFLPFFSNVTWFHAIHVSGTNGTKRFDNPVLPFNDGVYFASTEKSNIIRGWIFGTTLDSKTQSLLIVNNATNVVIKVCEFQFCNDPFLGVYYHKNNKSWMESEFRVYSSANNCTFEYVSQPFLMDLEGKQGNFKNLREFVFKNIDGYFKIYSKHTPINLVRDLPQGFSALEPLVDLPIGINITRFQTLLALHRSYLTPGDSSSGWTAGAAAYYVGYLQPRTFLLKYNENGTITDAVDCALDPLSETKCTLKSFTVEKGIYQTSNFRVQPTESIVRFPNITNLCPFGEVFNATRFASVYAWNRKRISNCVADYSVLYNSASFSTFKCYGVSPTKLNDLCFTNVYADSFVIRGDEVRQIAPGQTGKIADYNYKLPDDFTGCVIAWNSNNLDSKVGGNYNYLYRLFRRSNLKPFERDISTEIYQAGSTPCNGVEGFNCYFPLQSYGFQPTNGVGYQPYRVVVLSFELLPAPATVCGPKKSTNLVKNKCVNFNFNGLTGTGVLTESNKKFLPFQQFGRDIADTTDAVRDPQTLEILDITPCSFGGVSVITPGTNTSNQVAVLYQGVNCTEVPVAIHADQLTPTWRVYSTGSNVFQTRAGCLIGAEHVNNSYECDIPIGAGICASYQTQTNSPRRARSVASQSIIAYTMSLGAENSVAYSNNSIAIPTNFTISVTTEILPVSMTKTSVDCTMYICGDSTECSNLLLQYGSFCTQLNRALTGIAVEQDKNTQEVFAQVKQIYKTPPIKDFGGFNFSQILPDPSKPSKRSFIEDLLFNKVTLADAGFIKQYGDCLGDIAARDLICAQKFNGLTVLPPLLTDEMIAQYTSALLAGTITSGWTFGAGAALQIPFAMQMAYRFNGIGVTQNVLYENQKLIANQFNSAIGKIQDSLSSAAPALGKLQDVVNQNAQALNTLVKQLSSNFGAISSVLNDILSRLDPPEAEVQIDRLITGRLQSLQTYVTQQLIRAAEIRASANLAATKMSECVLGQSKRVDFCGKGYHLMSFPQSAPHGVVFLHVTYVFAQEKNFTTAPAICHDGKAHFPREGVFVSNGTHWFVTQRNFYEPQIITTDNTFVSGNCDVVIGIVNNTVYDPLQPELDSGGGGSDIIKLLNEQVNKEMQSSNLYMSMSSWCYTHSLDGAGLFLFDHAAEEYEHAKKLIIFLNENNVPVQLTSISAPEHKFEGLTQIFQKAYEHEQHISESINNIVDHAIKSKDHATFNFLQWYVAEQHEEEVLFKDILDKIELIGNENHGLYLADQYVKGIAKSRKS

SEQ ID NO: 8873 - protein, 1315 aa, Artificial Sequence
  SARS-CoV-2/USA/WA8-UW5/2020__EPI_ISL_413486 spike protein (1-1147)(K986P_V987P_P1069F) Ferritin construct
MFVFLVLLPLVSSQCVNLTTRTQLPPAYTNSFTRGVYYPDKVFRSSVLHSTQDLFLPFFSNVTWFHAIHVSGTNGTKRFDNPVLPFNDGVYFASTEKSNIIRGWIFGTTLDSKTQSLLIVNNATNVVIKVCEFQFCNDPFLGVYYHKNNKSWMESEFRVYSSANNCTFEYVSQPFLMDLEGKQGNFKNLREFVFKNIDGYFKIYSKHTPINLVRDLPQGFSALEPLVDLPIGINITRFQTLLALHRSYLTPGDSSSGWTAGAAAYYVGYLQPRTFLLKYNENGTITDAVDCALDPLSETKCTLKSFTVEKGIYQTSNFRVQPTESIVRFPNITNLCPFGEVFNATRFASVYAWNRKRISNCVADYSVLYNSASFSTFKCYGVSPTKLNDLCFTNVYADSFVIRGDEVRQIAPGQTGKIADYNYKLPDDFTGCVIAWNSNNLDSKVGGNYNYLYRLFRKSNLKPFERDISTEIYQAGSTPCNGVEGFNCYFPLQSYGFQPTNGVGYQPYRVVVLSFELLHAPATVCGPKKSTNLVKNKCVNFNFNGLTGTGVLTESNKKFLPFQQFGRDIADTTDAVRDPQTLEILDITPCSFGGVSVITPGTNTSNQVAVLYQDVNCTEVPVAIHADQLTPTWRVYSTGSNVFQTRAGCLIGAEYVNNSYECDIPIGAGICASYQTQTNSPRRARSVASQSIIAYTMSLGAENSVAYSNNSIAIPTNFTISVTTEILPVSMTKTSVDCTMYICGDSTECSNLLLQYGSFCTQLNRALTGIAVEQDKNTQEVFAQVKQIYKTPPIKDFGGFNFSQILPDPSKPSKRSFIEDLLFNKVTLADAGFIKQYGDCLGDIAARDLICAQKFNGLTVLPPLLTDEMIAQYTSALLAGTITSGWTFGAGAALQIPFAMQMAYRFNGIGVTQNVLYENQKLIANQFNSAIGKIQDSLSSTASALGKLQDVVNQNAQALNTLVKQLSSNFGAISSVLNDILSRLDPPEAEVQIDRLITGRLQSLQTYVTQQLIRAAEIRASANLAATKMSECVLGQSKRVDFCGKGYHLMSFPQSAPHGVVFLHVTYVFAQEKNFTTAPAICHDGKAHFPREGVFVSNGTHWFVTQRNFYEPQIITTDNTFVSGNCDVVIGIVNNTVYDPLQPELDSGGGGSDIIKLLNEQVNKEMQSSNLYMSMSSWCYTHSLDGAGLFLFDHAAEEYEHAKKLIIFLNENNVPVQLTSISAPEHKFEGLTQIFQKAYEHEQHISESINNIVDHAIKSKDHATFNFLQWYVAEQHEEEVLFKDILDKIELIGNENHGLYLADQYVKGIAKSRKS

SEQ ID NO: 8874 - protein, 1315 aa, Artificial Sequence
  SARS-CoV-2/England/20102000506/2020__EPI_ISL_415147 spike protein (1-1147)(K986P_V987P_P1069F) Ferritin construct
MFVFLVLLPLVSSQCVNLTTRTQLPPAYTNSFTRGVYYPDKVFRSSVLHSTQDLFLPFFSNVTWFHAIHVSGTNGTKRFDNPVLPFNDGVYFASTEKSNIIRGWIFGTTLDSKTQSLLIVNNATNVVIKVCEFQFCNDPFLGVYYHKNNKSWMESEFRVYSSANNCTFEYVSQPFLMDLEGKQGNFKNLREFVFKNIDGYFKIYSKHTPINLVRDLPQGFSALEPLVDLPIGINITRFQTLLALHRSYLTPGDSSSGWTAGAAAYYVGYLQPRTFLLKYNENGTITDAVDCALDPLSETKCTLKSFTVEKGIYQTSNFRVQPTESIVRFPNITNLCPFGEVFNATRFASVYAWNRKRISNCVADYSVLYNSASFSTFKCYGVSPTKLNDLCFTNVYADSFVIRGDEVRQIAPGQTGKIADYNYKLPDDFTGCVIAWNSNNLDSKVGGNYNYLYRLFRKSNLKPFERDISTEIYQAGSTPCNGVEGFNCYFPLQSYGFQPTNGVGYQPYRVVVLSFELLHAPATVCGPKKSTNLVKNKCVNFNFNGLTGTGVLTESNKKFLPFQQFGRDIADTTDAVRDPQTLEILDITPCSFGGVSVITPGTNTSNQVAVLYQGVNCTEVPVAIHADQLTPTWRVYSTGSNVFQTRAGCLIGAEHVNNSYECDIPIGAGICASYQTQTNSPRRARSVASQSIIAYTMSLGAENSVAYSNNSIAIPTNFTISVTTEILPVSMTKTSVDCTMYICGDSTECSNLLLQYGSFCTQLNRALTGIAVEQDKNTQEVFAQVKQIYKTPPIKDFGGFNFSQILPDPSKPSKRSFIEDLLFNKVTLADAGFIKQYGYCLGDIAARDLICAQKFNGLTVLPPLLTDEMIAQYTSALLAGTITSGWTFGAGAALQIPFAMQMAYRFNGIGVTQNVLYENQKLIANQFNSAIGKIQDSLSSTASALGKLQDVVNQNAQALNTLVKQLSSNFGAISSVLNDILSRLDPPEAEVQIDRLITGRLQSLQTYVTQQLIRAAEIRASANLAATKMSECVLGQSKRVDFCGKGYHLMSFPQSAPHGVVFLHVTYVFAQEKNFTTAPAICHDGKAHFPREGVFVSNGTHWFVTQRNFYEPQIITTDNTFVSGNCDVVIGIVNNTVYDPLQPELDSGGGGSDIIKLLNEQVNKEMQSSNLYMSMSSWCYTHSLDGAGLFLFDHAAEEYEHAKKLIIFLNENNVPVQLTSISAPEHKFEGLTQIFQKAYEHEQHISESINNIVDHAIKSKDHATFNFLQWYVAEQHEEEVLFKDILDKIELIGNENHGLYLADQYVKGIAKSRKS

SEQ ID NO: 8875 - protein, 1315 aa, Artificial Sequence
  SARS-CoV-2/Belgium/VAG-03013/2020__EPI_ISL_415155 spike protein (1-1147)(K986P_V987P_P1069F) Ferritin construct
MFVFLVLLPLVSSQCVNLTTRTQLPPAYTNSFTRGVYYPDKVFRSSVLHSTQDLFLPFFSNVTWFHAIHVSGTNGTKRFDNPVLPFNDGVYFASTEKSNIIRGWIFGTTLDSKTQSLLIVNNATNVVIKVCEFQFCNDPFLGVYYHKNNKSWMESEFRVYSSANNCTFEYVSQPFLMDLEGKQGNFKNLREFVFKNIDGYFKIYSKHTPINLVRDLPQGFSALEPLVDLPIGINITRFQTLLALHRSYLTPGDSSSGWTAGAAAYYVGYLQPRTFLLKYNENGTITDAVDCALDPLSETKCTLKSFTVEKGIYQTSNFRVQPTESIVRFPNITNLCPFGEVFNATRFASVYAWNRKRISNCVADYSVLYNSASFSTFKCYGVSPTKLNDLCFTNVYADSFVIRGDEVRQIAPGQTGKIADYNYKLPDDFTGCVIAWNSNNLDSKVGGNYNYLYRLFRKSNLKPFERDISTEIYQAGSTPCNGVEGFNCYFPLQSYGFQPTNGVGYQPYRVVVLSFELLHAPATVCGPKKSTNLVKNKCVNFNFNGLTGTGVLTESNKKFLPFQQFGRDIADTTDAVRDPQTLEILDITPCSFGGVSVITPGTNTSNQVAVLYQGVNCTEVPVAIHADQLTPTWRVYSTGSNVFQTRAGCLIGAEHVNNSYECDIPIGAGICASYQTQTNSPRRARSVASQSIIAYTMSLGAENSVAYSNNSIAIPTNFTISVTTEILPVSMTKTSVDCTMYICGDSTECSNLLLQYGSFCTQLNRALTGIAVEQDKNTQEVFAQVKQIYKTPPIKDFGGFNFSQILPDPSKPSKRSFIEDLLFNKVTLADAGFIKQYGDCLGDIAARDLICAQKFNGLTVLPPLLTDEMIAQYTSALLAGTITSGWTFGAGAALQIPFAMQMAYRFNGIGVTQNVLYENQKLIANQFNSAIGKIQDSLSSTATALGKLQDVVNQNAQALNTLVKQLSSNFGAISSVLNDILSRLDPPEAEVQIDRLITGRLQSLQTYVTQQLIRAAEIRASANLAATKMSECVLGQSKRVDFCGKGYHLMSFPQSAPHGVVFLHVTYVFAQEKNFTTAPAICHDGKAHFPREGVFVSNGTHWFVTQRNFYEPQIITTDNTFVSGNCDVVIGIVNNTVYDPLQPELDSGGGGSDIIKLLNEQVNKEMQSSNLYMSMSSWCYTHSLDGAGLFLFDHAAEEYEHAKKLIIFLNENNVPVQLTSISAPEHKFEGLTQIFQKAYEHEQHISESINNIVDHAIKSKDHATFNFLQWYVAEQHEEEVLFKDILDKIELIGNENHGLYLADQYVKGIAKSRKS

SEQ ID NO: 8876 - protein, 1315 aa, Artificial Sequence
  SARS-CoV-2/Belgium/BC-03016/2020__EPI_ISL_415157 spike protein (1-1147)(K986P_V987P_P1069F) Ferritin construct
MFVFLVLLPLVSSQCVNLTTRTQLPPAYTNSFTRGVYYPDKVFRSSVLHSTQDLFLPFFSNVTWFHAIHVSGTNGTKRFDNPVLPFNDGVYFASTEKSNIIRGWIFGTTLDSKTQSLLIVNNATNVVIKVCEFQFCNDPFLGVYYHKNNKSWMESEFRVYSSANNCTFEYVSQPFLMDLEGKQGNFKNLREFVFKNIDGYFKIYSKHTPINLVRDLPQGFSALEPLVDLPIGINITRFQTLLALHRSYLTPGDSSSGWTAGAAAYYVGYLQPRTFLLKYNENGTITDAVDCALDPLSETKCTLKSFTVEKGIYQTSNFRVQPTESIVRFPNITNLCPFGEVFNATRFASVYAWNRKRISNCVADYSVLYNSASFSTFKCYGVSPTKLNDLCFTNVYADSFVIRGDEVRQIAPGQTGKIADYNYKLPDDFTGCVIAWNSNNLDSKVGGNYNYLYRLFRKSNLKPFERDISTEIYQAGSTPCNGVEGFNCYFPLQSYGFQPTNGVGYQPYRVVVLSFELLHAPATVCGPKKSTNLVKNKCVNFNFNGLTGTGVLTESNKKFLPFQQFGRDIADTTDAVRDPQTLEILDITPCSFGGVSVITPGTNTSNQVAVLYQGVNCTEVPVAIHADQLTPTWRVYSTGSNVFQTRAGCLIGAEHVNNSYECDIPIGAGICASYQTQTNSPRRARSVASQSIIAYTMSLGAENSVAYSNNSIAIPTNFTISVTTEILPVSMTKTSVDCTMYICGDSTECSNLLLQYGSFCTQLNRALTGIAVEQDKNTQEVFAQVKQIYKTPPIKDFGGFNFSQILPDPSKPSKRSFIEDLLFNKVTLADAGFIKQYGDCLGDIAARDLICAQKFNGLTVLPPLLTDEMIAQYTSALLAGTITSGWTFGAGAALQIPFAMQMAYRFNGIGVTQNVLYENQKLIANQFNSAIGKIQDSLSSTAPALGKLQDVVNQNAQALNTLVKQLSSNFGAISSVLNDILSRLDPPEAEVQIDRLITGRLQSLQTYVTQQLIRAAEIRASANLAATKMSECVLGQSKRVDFCGKGYHLMSFPQSAPHGVVFLHVTYVFAQEKNFTTAPAICHDGKAHFPREGVFVSNGTHWFVTQRNFYEPQIITTDNTFVSGNCDVVIGIVNNTVYDPLQPELDSGGGGSDIIKLLNEQVNKEMQSSNLYMSMSSWCYTHSLDGAGLFLFDHAAEEYEHAKKLIIFLNENNVPVQLTSISAPEHKFEGLTQIFQKAYEHEQHISESINNIVDHAIKSKDHATFNFLQWYVAEQHEEEVLFKDILDKIELIGNENHGLYLADQYVKGIAKSRKS

SEQ ID NO: 8877 - protein, 1315 aa, Artificial Sequence
  SARS-CoV-2/Germany/BavPat3/2020__EPI_ISL_414521 spike protein (1-1147)(K986P_V987P_P1069F) Ferritin construct
MFVFLVLLPLVSSQCVNLTTRTQLPPAYTNSFTRGVYYPDKVFRSSVLHSTQDLFLPFFSNVTWFHAIHVSGTNGTKRFDNPVLPFNDGVYFASTEKSNIIRGWIFGTTLDSKTQSLLIVNNATNVVIKVCEFQFCNDPFLGVYYHKNNKSWMESEFRVYSSANNCTFEYVSQPFLMDLEGKQGNFKNLREFVFKNIDGYFKIYSKHTPINLVRDLPQGFSALEPLVDLPIGINITRFQTLLALHRSYLTPGDSSSGWTAGAAAYYVGYLQPRTFLLKYNENGTITDAVDCALDPLSETKCTLKSFTVEKGIYQTSNFRVQPTESIVRFPNITNLCPFGEVFNATRFASVYAWNRKRISNCVADYSVLYNSASFSTFKCYGVSPTKLNDLCFTNVYADSFVIRGDEVRQIAPGQTGKIADYNYKLPDDFTGCVIAWNSNNLDSKVGGNYNYLYRLFRKSNLKPFERDISTEIYQAGSTPCNGVEGFNCYFPLQSYGFQPTNGVGYQPYRVVVLSFELLHAPATVCGPKKSTNLVKNKCVNFNFNGLTGTGVLTESNKKFLPFQQFGRDIADTTDAVRDPQTLEILDITPCSFGGVSVITPGTNTSNQVAVLYQDVNCTEVPVAIHADQLTPTWRVYSTGSNVFQTRAGCLIGAEHVNNSYECDIPIGAGICASYQTQTNSPRRARSVASQSIIAYTMSLGAENSVAYSNNSIAIPTNFTISVTTEILPVSMTKTSVDCTMYICGDSTECSNLLLQYGSFCTQLNRALTGIAVEQDKNTQQVFAQVKQIYKTPPIKDFGGFNFSQILPDPSKPSKRSFIEDLLFNKVTLADAGFIKQYGDCLGDIAARDLICAQKFNGLTVLPPLLTDEMIAQYTSALLAGTITSGWTFGAGAALQIPFAMQMAYRFNGIGVTQNVLYENQKLIANQFNSAIGKIQDSLSSTASALGKLQDVVNQNAQALNTLVKQLSSNFGAISSVLNDILSRLDPPEAEVQIDRLITGRLQSLQTYVTQQLIRAAEIRASANLAATKMSECVLGQSKRVDFCGKGYHLMSFPQSAPHGVVFLHVTYVFAQEKNFTTAPAICHDGKAHFPREGVFVSNGTHWFVTQRNFYEPQIITTDNTFVSGNCDVVIGIVNNTVYDPLQPELDSGGGGSDIIKLLNEQVNKEMQSSNLYMSMSSWCYTHSLDGAGLFLFDHAAEEYEHAKKLIIFLNENNVPVQLTSISAPEHKFEGLTQIFQKAYEHEQHISESINNIVDHAIKSKDHATFNFLQWYVAEQHEEEVLFKDILDKIELIGNENHGLYLADQYVKGIAKSRKS

SEQ ID NO: 8878 - protein, 1315 aa, Artificial Sequence
  SARS-CoV-2/France/HF1805/2020__EPI_ISL_414628 spike protein (1-1147)(K986P_V987P_P1069F) Ferritin construct
MFVFLVLLPLVSSQCVNLTTRTQLPPAYTNSFTRGVYYPDKVFRSSVLHSTQDLFLPFFSNVTWFHAIHVSGTNGTKRFDNPVLPFNDGVYFASTEKSNIIRGWIFGTTLDSKTQSLLIVNNATNVVIKVCEFQFCNDPFLGVYYHKNNKSWMESEFRVYSSANNCTFEYVSQPFLMDLEGKQGNFKNLREFVFKNIDGYFKIYSKHTPINLVRDLPQGFSALEPLVDLPIGINITRFQTLLALHRSYLTPGDSSSGWTAGAAAYYVGYLQPRTFLLKYNENGTITDAVDCALDPLSETKCTLKSFTVEKGIYQTSNFRVQPTESIVRFPNITNLCPFGEVFNATRFASVYAWNRKRISNCVADYSVLYNSASFSTFKCYGVSPTKLNDLCFTNVYADSFVIRGDEVRQIAPGQTGKIADYNYKLPDDFTGCVIAWNSNNLDSKVGGNYNYLYRLFRKSNLKPFERDISTEIYQAGSTPCNGVEGFNCYFPLQSYGFQPTNGVGYQPYRVVVLSFELLHAPATVCGPKKSTNLVKNKCVNFNFNGLTGTGVLTESNKKFLPFQQFGRDIADTTDAVRDPQTLEILDITPCSFGGVSVITPGTNTSNQVAVLYQGVNCTEVPVAIHADQLTPTWRVYSTGSNVFQTRAGCLIGAEHVNNSYECDIPIGAGICASYQTQTNSPRRARSVASQSIIAYTMSLGAENSVAYSNNSIAIPTNFTISVTTEILPVSMTKTSVDCTMYICGDSTECSNLLLQYGSFCTQLNRALTGIAVEQDKNTQEVFAQVKQIYKTPPIKDFGGFNFSQILPDPSKPSKRSFIEDLLFNKVTLADAGFIKQYGDCLGDIAARDLICAQKFNGLTVLPPLLTDEMIAQYTSALLAGTITSGWTFGAGAALQIPFAMQMAYRFNGIGVTQNVLYENQKLIANQFNSAIGKIQDSLSSTASALGKLQDVVNQNAQALNTLVKQLSSNFGAISSVLNDILSRLDPPEAEVQIDRLITGRLQSLQTYVTQQLIRAAEIRASANLAATKMSECVLGQSKRVDFCGKGYHLMSFPQSAPHGVVFLHVTYVFAQEKNFTTAPAICHDGKAHFPREGVFVSNGTHWFVTQRNFYEPQIITTDNTFVSGNCDVVIGVVNNTVYDPLQPELDSGGGGSDIIKLLNEQVNKEMQSSNLYMSMSSWCYTHSLDGAGLFLFDHAAEEYEHAKKLIIFLNENNVPVQLTSISAPEHKFEGLTQIFQKAYEHEQHISESINNIVDHAIKSKDHATFNFLQWYVAEQHEEEVLFKDILDKIELIGNENHGLYLADQYVKGIAKSRKS

SEQ ID NO: 8879 - protein, 1315 aa, Artificial Sequence
  SARS-CoV-2/Netherlands/ZuidHolland_9/2020__EPI_ISL_414445 spike protein (1-1147)(K986P_V987P_P1069F) Ferritin construct
MFVFLVLLPLVSSQCVNLTTRTQLPPAYTNSFTRGVYYPDKVFRSSVLHSTQDLFLPFFSNVTWFHAIHVSGTNGTKRFDNPVLPFNDGVYFASTEKSNIIRGWIFGTTLDSKTQSLLIVNNATNVVIKVCEFQFCNDPFLGVYYHKNNKSWMESEFRVYSSANNCTFEYVSQPFLMDLEGKQGNFKNLREFVFKNIDGYFKIYSKHTPINLVRDLPQGFSALEPLVDLPIGINITRFQTLLALHRSYLTPGDSSSGWTAGAAAYYVGYLQPRTFLLKYNENGTITDAVDCALDPLSETKCTLKSFTVEKGIYQTSNFRVQPTESIVRFPNITNLCPFGEVFNATRFASVYAWNRKRISNCVADYSVLYNSASFSTFKCYGVSPTKLNDLCFTNVYADSFVIRGDEVRQIAPGQTGKIADYNYKLPDDFTGCVIAWNSNNLDSKVGGNYNYLYRLFRKSNLKPFERDISTEIYQAGSTPCNGVEGFNCYFPLQSYGFQPTNGVGYQPYRVVVLSFELLHAPATVCGPKKSTNLVKNKCVNFNFNGLTGTGVLTESNKKFLPFQQFGRDIADTTDAVRDPQTLEILDITPCSFGGVSVITPGTNTSNQVAVLYQGVNCTEVPVAIHADQLTPTWRVYSTGSNVFQTRAGCLIGAEHVNNSYECDIPIGAGICASYQTQTNSPRRARSVASQSIIAYTMSLGAENSVAYSNNSIAIPTNFTISVTTEILPVSMTKTSVDCTMYICGDSTECSNLLLQYGSFCTQLNRALTGIAVEQDKNTQEVFAQVKQIYKTPPIKDFGGFNFSQILPDPSKPSKRSFIEDLLFNKVTLADAGFIKQYGDCLGDIAARDLICVQKFNGLTVLPPLLTDEMIAQYTSALLAGTITSGWTFGAGAALQIPFAMQMAYRFNGIGVTQNVLYENQKLIANQFNSAIGKIQDSLSSTASALGKLQDVVNQNAQALNTLVKQLSSNFGAISSVLNDILSRLDPPEAEVQIDRLITGRLQSLQTYVTQQLIRAAEIRASANLAATKMSECVLGQSKRVDFCGKGYHLMSFPQSAPHGVVFLHVTYVFAQEKNFTTAPAICHDGKAHFPREGVFVSNGTHWFVTQRNFYEPQIITTDNTFVSGNCDVVIGIVNNTVYDPLQPELDSGGGGSDIIKLLNEQVNKEMQSSNLYMSMSSWCYTHSLDGAGLFLFDHAAEEYEHAKKLIIFLNENNVPVQLTSISAPEHKFEGLTQIFQKAYEHEQHISESINNIVDHAIKSKDHATFNFLQWYVAEQHEEEVLFKDILDKIELIGNENHGLYLADQYVKGIAKSRKS

SEQ ID NO: 8880 - protein, 1315 aa, Artificial Sequence
  SARS-CoV-2/Finland/FIN03032020A/2020__EPI_ISL_413602 spike protein (1-1147)(K986P_V987P_P1069F) Ferritin construct
MFVFLVLLPLVSSQCVNLTTRTQLPPAYTNSFTRGVYYPDKVFRSSVLHSTQDLFLPFFSNVTWFHAIHVSGTNGTKRFDNPVLPFNDGVYFASTEKSNIIRGWIFGTTLDSKTQSLLIVNNATNVVIKVCEFQFCNDPFLGVYYHKNNKSWMESEFRVYSSANNCTFEYVSQPFLMDLEGKQGNFKNLREFVFKNIDGYFKIYSKHTPINLVRDLPQGFSALEPLVDLPIGINITRFQTLLALHRSYLTPGDSSSGWTAGAAAYYVGYLQPRTFLLKYNENGTITDAVDCALDPLSETKCTLKSFTVEKGIYQTSNFRVQPTESIVRFPNITNLCPFGEVFNATRFASVYAWNRKRISNCVADYSVLYNSASFSTFKCYGVSPTKLNDLCFTNVYADSFVIRGDEVRQIAPGQTGKIADYNYKLPDDFTGCVISWNSNNLDSKVGGNYNYLYRLFRKSNLKPFERDISTEIYQAGSTPCNGVEGFNCYFPLQSYGFQPTNGVGYQPYRVVVLSFELLHAPATVCGPKKSTNLVKNKCVNFNFNGLTGTGVLTESNKKFLPFQQFGRDIADTTDAVRDPQTLEILDITPCSFGGVSVITPGTNTSNQVAVLYQGVNCTEVPVAIHADQLTPTWRVYSTGSNVFQTRAGCLIGAEHVNNSYECDIPIGAGICASYQTQTNSPRRARSVASQSIIAYTMSLGAENSVAYSNNSIAIPTNFTISVTTEILPVSMTKTSVDCTMYICGDSTECSNLLLQYGSFCTQLNRALTGIAVEQDKNTQEVFAQVKQIYKTPPIKDFGGFNFSQILPDPSKPSKRSFIEDLLFNKVTLADAGFIKQYGDCLGDIAARDLICAQKFNGLTVLPPLLTDEMIAQYTSALLAGTITSGWTFGAGAALQIPFAMQMAYRFNGIGVTQNVLYENQKLIANQFNSAIGKIQDSLSSTASALGKLQDVVNQNAQALNTLVKQLSSNFGAISSVLNDILSRLDPPEAEVQIDRLITGRLQSLQTYVTQQLIRAAEIRASANLAATKMSECVLGQSKRVDFCGKGYHLMSFPQSAPHGVVFLHVTYVFAQEKNFTTAPAICHDGKAHFPREGVFVSNGTHWFVTQRNFYEPQIITTDNTFVSGNCDVVIGIVNNTVYDPLQPELDSGGGGSDIIKLLNEQVNKEMQSSNLYMSMSSWCYTHSLDGAGLFLFDHAAEEYEHAKKLIIFLNENNVPVQLTSISAPEHKFEGLTQIFQKAYEHEQHISESINNIVDHAIKSKDHATFNFLQWYVAEQHEEEVLFKDILDKIELIGNENHGLYLADQYVKGIAKSRKS

SEQ ID NO: 8881 - protein, 1315 aa, Artificial Sequence
  SARS-CoV-2/France/GE1977/2020__EPI_ISL_414632 spike protein (1-1147)(K986P_V987P_P1069F) Ferritin construct
MFVFLVLLPLVSSQCVNLTTRTQLPPAYTNSFTRGVYYPDKVFRSSVLHSTQDLFLPFFSNVTWFHAIHVSGTNGTKRFDNPVLPFNDGVYFASTEKSNIIRGWIFGTTLDSKTQSLLIVNNATNVVIKVCEFQFCNDPFLGVYYHKNNKSWMESEFRVYSSANNCTFEYVSQPFLMDLEGKQGNFKNLREFVFKNIDGYFKIYSKHTPINLVRDLPQGFSALEPLVDLPIGINITRFQTLLALHRSYLTPGDSSSGWTAGAAAYYVGYLQPRTFLLKYNENGTITDAVDCALDPLSETKCTLKSFTVEKGIYQTSNFRVQPTESIVRFPNITNLCPFGEVFNATRFASVYAWNRKRISNCVADYSVLYNSASFSTFKCYGVSPTKLNDLCFTNVYADSFVIRGDEVRQIAPGQTGKIADYNYKLPDDFTGCVIAWNSNNLDSKVGGNYNYLYRLFRKSNLKPFERDISTEIYQAGSTPCNGVEGFNCYFPLQSYGFQPTNGVGYQPYRVVVLSFELLHAPATVCGPKKSTNLVKNKCVNFNFNGLTGTGVLTESNKKFLPFQQFGRDIADTTDAVRDPQTLEILDITPCSFGGVSVITPGTNTSNQVAVLYQGVNCTEVPVAIHADQLTPTWRVYSTGSNVFQTRAGCLIGAEHVNNSYECDIPIGAGICASYQTQTNSPRRARSVASQSIIAYTMSLGAENSVAYSNNSIAIPTNFTISVTTEILPVSMTKTSVDCTMYICGDSTECSNLLLQYGSFCTQLNRALTGIAVEQDKNTQEVFAQVKQIYKTPPIKDFGGFNFSQILPDPSKPSKRSFIEDLLFNKVTLADAGFIKQYGDCLGDIAARDLICAQKFNGLTVLPPLLTDEMIAQYTSALLAGTITSGWTFGAGAALQIPFAMQMAYRFNGIGVTQNVLYENQKLIANQFNSAIGKIQDSLFSTASALGKLQDVVNQNAQALNTLVKQLSSNFGAISSVLNDILSRLDPPEAEVQIDRLITGRLQSLQTYVTQQLIRAAEIRASANLAATKMSECVLGQSKRVDFCGKGYHLMSFPQSAPHGVVFLHVTYVFAQEKNFTTAPAICHDGKAHFPREGVFVSNGTHWFVTQRNFYEPQIITTDNTFVSGNCDVVIGIVNNTVYDPLQPELDSGGGGSDIIKLLNEQVNKEMQSSNLYMSMSSWCYTHSLDGAGLFLFDHAAEEYEHAKKLIIFLNENNVPVQLTSISAPEHKFEGLTQIFQKAYEHEQHISESINNIVDHAIKSKDHATFNFLQWYVAEQHEEEVLFKDILDKIELIGNENHGLYLADQYVKGIAKSRKS

SEQ ID NO: 8882 - protein, 1315 aa, Artificial Sequence
  SARS-CoV-2/Finland/FIN-313/2020__EPI_ISL_414641 spike protein (1-1147)(K986P_V987P_P1069F) Ferritin construct
MFVFLVLLPLVSSQCVNLTTRTQLPPAYTNSFTRGVYYPDKVFRSSVLHSTQDLFLPFFSNVTWFHAIHVSGTNGTKRFDNPVLPFNDGVYFASTEKSNIIRGWIFGTTLDSKTQSLLIVNNATNVVIKVCEFQFCNDPFLGVYYHKNNKSWMESEFRVYSSANNCTFEYVSQPFLMDLEGKQGNFKNLREFVFKNIDGYFKIYSKHTPINLVRDLPQGFSALEPLVDLPIGINITRFKTLLALHRSYLTPGDSSSGWTAGAAAYYVGYLQPRTFLLKYNENGTITDAVDCALDPLSETKCTLKSFTVEKGIYQTSNFRVQPTESIVRFPNITNLCPFGEVFNATRFASVYAWNRKRISNCVADYSVLYNSASFSTFKCYGVSPTKLNDLCFTNVYADSFVIRGDEVRQIAPGQTGKIADYNYKLPDDFTGCVIAWNSNNLDSKVGGNYNYLYRLFRKSNLKPFERDISTEIYQAGSTPCNGVEGFNCYFPLQSYGFQPTNGVGYQPYRVVVLSFELLHAPATVCGPKKSTNLVKNKCVNFNFNGLTGTGVLTESNKKFLPFQQFGRDIADTTDAVRDPQTLEILDITPCSFGGVSVITPGTNTSNQVAVLYQGVNCTEVPVAIHADQLTPTWRVYSTGSNVFQTRAGCLIGAEHVNNSYECDIPIGAGICASYQTQTNSPRRARSVASQSIIAYTMSLGAENSVAYSNNSIAIPTNFTISVTTEILPVSMTKTSVDCTMYICGDSTECSNLLLQYGSFCTQLNRALTGIAVEQDKNTQEVFAQVKQIYKTPPIKDFGGFNFSQILPDPSKPSKRSFIEDLLFNKVTLADAGFIKQYGDCLGDIAARDLICAQKFNGLTVLPPLLTDEMIAQYTSALLAGTITSGWTFGAGAALQIPFAMQMAYRFNGIGVTQNVLYENQKLIANQFNSAIGKIQDSLSSTASALGKLQDVVNQNAQALNTLVKQLSSNFGAISSVLNDILSRLDPPEAEVQIDRLITGRLQSLQTYVTQQLIRAAEIRASANLAATKMSECVLGQSKRVDFCGKGYHLMSFPQSAPHGVVFLHVTYVFAQEKNFTTAPAICHDGKAHFPREGVFVSNGTHWFVTQRNFYEPQIITTDNTFVSGNCDVVIGIVNNTVYDPLQPELDSGGGGSDIIKLLNEQVNKEMQSSNLYMSMSSWCYTHSLDGAGLFLFDHAAEEYEHAKKLIIFLNENNVPVQLTSISAPEHKFEGLTQIFQKAYEHEQHISESINNIVDHAIKSKDHATFNFLQWYVAEQHEEEVLFKDILDKIELIGNENHGLYLADQYVKGIAKSRKS

SEQ ID NO: 8883 - protein, 1315 aa, Artificial Sequence
  SARS-CoV-2/Netherlands/ZuidHolland_2/2020__EPI_ISL_414556 spike protein (1-1147)(K986P_V987P_P1069F) Ferritin construct
MFVFLVLLPLVSSQCVNLTTRTQLPPAYTNSFTRGVYYPDKVFRSSVLHSTQDLFLPFFSNVTWFHAIHVSGTNGTKRFDNPVLPFNDGVYFASTEKSNIIRGWIFGTTLDSKTQSLLIVNNATNVVIKVCEFQFCNDPFLGVYYHKNNKSWMESEFRVYSSANNCTFEYVSQPFLMDLEGKQGNFKNLREFVFKNIDGYFKIYSKHTPINLVRDLPQGFSALEPLVDLPIGINITRFQTLLALHRSYLTPGDSSSGWTAGAAAYYVGYLQPRTFLLKYNENGTITDAVDCALDPLSETKCTLKSFTVEKGIYQTSNFRVQPTESIVRFPNITNLCPFGEVFNATRFASVYAWNRKRISNCVADYSVLYNSASFSTFKCYGVSPTKLNDLCFTNVYADSFVIRGDEVRQIAPGQTGKIADYNYKLPDDFTGCVIAWNSNNLDSKVGGNYNYLYRLFRKSNLKPFERDISTEIYQAGSTPCNGVEGFNCYFPLQSYGFQPTNGVGYQPYRVVVLSFELLHAPATVCGPKKSTNLVKNKCVNFNFNGLTGTGVLTESNKKFLPFQQFGRDIADTTDAVRDPQTLEILDITPCSFGGVSVITPGTNTSNQVAVLYQGVNCTEVPVAIHADQLTPTWRVYSTGSNVFQTRAGCLIGAEHVNNSYECDIPIGAGICASYQTQTNSPRRARSVASQSIIAYTMSLGAENSVAYSNNSIAIPTNFTISVTTEILPVSMTKTSVDCTMYICGDSTECSNLLLQYGSFCTQLNRALTGIALEQDKNTQEVFAQVKQIYKTPPIKDFGGFNFSQILPDPSKPSKRSFIEDLLFNKVTLADAGFIKQYGDCLGDIAARDLICAQKFNGLTVLPPLLTDEMIAQYTSALLAGTITSGWTFGAGAALQIPFAMQMAYRFNGIGVTQNVLYENQKLIANQFNSAIGKIQDSLSSTASALGKLQDVVNQNAQALNTLVKQLSSNFGAISSVLNDILSRLDPPEAEVQIDRLITGRLQSLQTYVTQQLIRAAEIRASANLAATKMSECVLGQSKRVDFCGKGYHLMSFPQSAPHGVVFLHVTYVFAQEKNFTTAPAICHDGKAHFPREGVFVSNGTHWFVTQRNFYEPQIITTDNTFVSGNCDVVIGIVNNTVYDPLQPELDSGGGGSDIIKLLNEQVNKEMQSSNLYMSMSSWCYTHSLDGAGLFLFDHAAEEYEHAKKLIIFLNENNVPVQLTSISAPEHKFEGLTQIFQKAYEHEQHISESINNIVDHAIKSKDHATFNFLQWYVAEQHEEEVLFKDILDKIELIGNENHGLYLADQYVKGIAKSRKS

SEQ ID NO: 8884 - protein, 1315 aa, Artificial Sequence
  SARS-CoV-2/USA/WA-UW31/2020__EPI_ISL_414618 spike protein (1-1147)(K986P_V987P_P1069F) Ferritin construct
MFVFLVLLPLVSSQCVNLTTRTQLPPAYTNSFTRGVYYPDKVFRSSVLHSTQDLFLPFFSNVTWFHAIHVSGTNGTKRFDNPVLPFNDGVYFASTEKSNIIRGWIFGTTLDSKTQSLLIVNNATNVVIKVCEFQFCNDPFLGVYYHKNNKSWMESEFRVYSSANNCTFEYVSQPFLMDLEGKQGNFKNLREFVFKNIDGYFKIYSKHTPINLVRDLPQGFSALEPLVDLPIGINITRFQTLLALHRSYLTPGDSSSGWTAGAAAYYVGYLQPRTFLLKYNENGTITDAVDCALDPLSETKCTLKSFTVEKGIYQTSNFRVQPTESIVRFPNITNLCPFGEVFNATRFASVYAWNRKRISNCVADYSVLYNSASFSTFKCYGVSPTKLNDLCFTNVYADSFVIRGDEVRQIAPGQTGKIADYNYKLPDDFTGCVIAWNSNNLDSKVGGNYNYLYRLFRKSNLKPFERDISTEIYQAGSTPCNGAEGFNCYFPLQSYGFQPTNGVGYQPYRVVVLSFELLHAPATVCGPKKSTNLVKNKCVNFNFNGLTGTGVLTESNKKFLPFQQFGRDIADTTDAVRDPQTLEILDITPCSFGGVSVITPGTNTSNQVAVLYQDVNCTEVPVAIHADQLTPTWRVYSTGSNVFQTRAGCLIGAEHVNNSYECDIPIGAGICASYQTQTNSPRRARSVASQSIIAYTMSLGAENSVAYSNNSIAIPTNFTISVTTEILPVSMTKTSVDCTMYICGDSTECSNLLLQYGSFCTQLNRALTGIAVEQDKNTQEVFAQVKQIYKTPPIKDFGGFNFSQILPDPSKPSKRSFIEDLLFNKVTLADAGFIKQYGDCLGDIAARDLICAQKFNGLTVLPPLLTDEMIAQYTSALLAGTITSGWTFGAGAALQIPFAMQMAYRFNGIGVTQNVLYENQKLIANQFNSAIGKIQDSLSSTASALGKLQDVVNQNAQALNTLVKQLSSNFGAISSVLNDILSRLDPPEAEVQIDRLITGRLQSLQTYVTQQLIRAAEIRASANLAATKMSECVLGQSKRVDFCGKGYHLMSFPQSAPHGVVFLHVTYVFAQEKNFTTAPAICHDGKAHFPREGVFVSNGTHWFVTQRNFYEPQIITTDNTFVSGNCDVVIGIVNNTVYDPLQPELDSGGGGSDIIKLLNEQVNKEMQSSNLYMSMSSWCYTHSLDGAGLFLFDHAAEEYEHAKKLIIFLNENNVPVQLTSISAPEHKFEGLTQIFQKAYEHEQHISESINNIVDHAIKSKDHATFNFLQWYVAEQHEEEVLFKDILDKIELIGNENHGLYLADQYVKGIAKSRKS

SEQ ID NO: 8885 - protein, 1315 aa, Artificial Sequence
  SARS-CoV-2/South Korea/SNU01/2020__EPI_ISL_411929 spike protein (1-1147)(K986P_V987P_P1069F) Ferritin construct
MFVFLVLLPLVSSQCVNLTTRTQLPPAYTNSFTRGVYYPDKVFRSSVLHSTQDLFLPFFSNVTWFHAIHVSGTNGTKRFDNPVLPFNDGVYFASTEKSNIIRGWIFGTTLDSKTQSLLIVNNATNVVIKVCEFQFCNDPFLGVYYHKNNKSWMESEFRVYSSANNCTFEYVSQPFLMDLEGKQGNFKNLREFVFKNIDGYFKIYSKHTPINLVRDLPQGFWALEPLVDLPIGINITRFQTLLALHRSYLTPGDSSSGWTAGAAAYYVGYLQPRTFLLKYNENGTITDAVDCALDPLSETKCTLKSFTVEKGIYQTSNFRVQPTESIVRFPNITNLCPFGEVFNATRFASVYAWNRKRISNCVADYSVLYNSASFSTFKCYGVSPTKLNDLCFTNVYADSFVIRGDEVRQIAPGQTGKIADYNYKLPDDFTGCVIAWNSNNLDSKVGGNYNYLYRLFRKSNLKPFERDISTEIYQAGSTPCNGVEGFNCYFPLQSYGFQPTNGVGYQPYRVVVLSFELLHAPATVCGPKKSTNLVKNKCVNFNFNGLTGTGVLTESNKKFLPFQQFGRDIADTTDAVRDPQTLEILDITPCSFGGVSVITPGTNTSNQVAVLYQDVNCTEVPVAIHADQLTPTWRVYSTGSNVFQTRAGCLIGAEHVNNSYECDIPIGAGICASYQTQTNSPRRARSVASQSIIAYTMSLGAENSVAYSNNSIAIPTNFTISVTTEILPVSMTKTSVDCTMYICGDSTECSNLLLQYGSFCTQLNRALTGIAVEQDKNTQEVFAQVKQIYKTPPIKDFGGFNFSQILPDPSKPSKRSFIEDLLFNKVTLADAGFIKQYGDCLGDIAARDLICAQKFNGLTVLPPLLTDEMIAQYTSALLAGTITSGWTFGAGAALQIPFAMQMAYRFNGIGVTQNVLYENQKLIANQFNSAIGKIQDSLSSTASALGKLQDVVNQNAQALNTLVKQLSSNFGAISSVLNDILSRLDPPEAEVQIDRLITGRLQSLQTYVTQQLIRAAEIRASANLAATKMSECVLGQSKRVDFCGKGYHLMSFPQSAPHGVVFLHVTYVFAQEKNFTTAPAICHDGKAHFPREGVFVSNGTHWFVTQRNFYEPQIITTDNTFVSGNCDVVIGIVNNTVYDPLQPELDSGGGGSDIIKLLNEQVNKEMQSSNLYMSMSSWCYTHSLDGAGLFLFDHAAEEYEHAKKLIIFLNENNVPVQLTSISAPEHKFEGLTQIFQKAYEHEQHISESINNIVDHAIKSKDHATFNFLQWYVAEQHEEEVLFKDILDKIELIGNENHGLYLADQYVKGIAKSRKS

SEQ ID NO: 8886 - protein, 1315 aa, Artificial Sequence
  SARS-CoV-2/China/WF0004/2020__EPI_ISL_413694 spike protein (1-1147)(K986P_V987P_P1069F) Ferritin construct
MFVFLVLLPLVSSQCVNLTTRTQLPPAYTNSFTRGVYYPDKVFRSSVLHSTQDLFLPFFSNVTWFHAIHVSGTNGTKRFDNPVLPFNDGVYFASTEKSNIIRGWIFGTTLDSKTQSLLIVNNATNVVIKVCEFQFCNDPFLGVYYHKNNKSWTESEFRVYSSANNCTFEYVSQPFLMDLEGKQGNFKNLREFVFKNIDGYFKIYSKHTPINLVRDLPQGFSALEPLVDLPIGINITRFQTLLALHRSYLTPGDSSSGWTAGAAAYYVGYLQPRTFLLKYNENGTITDAVDCALDPLSETKCTLKSFTVEKGIYQTSNFRVQPTESIVRFPNITNLCPFGEVFNATRFASVYAWNRKRISNCVADYSVLYNSASFSTFKCYGVSPTKLNDLCFTNVYADSFVIRGDEVRQIAPGQTGKIADYNYKLPDDFTGCVIAWNSNNLDSKVGGNYNYLYRLFRKSNLKPFERDISTEIYQAGSTPCNGVEGFNCYFPLQSYGFQPTNGVGYQPYRVVVLSFELLHAPATVCGPKKSTNLVKNKCVNFNFNGLTGTGVLTESNKKFLPFQQFGRDIADTTDAVRDPQTLEILDITPCSFGGVSVITPGTNTSNQVAVLYQDVNCTEVPVAIHADQLTPTWRVYSTGSNVFQTRAGCLIGAEHVNNSYECDIPIGAGICASYQTQTNSPRRARSVASQSIIAYTMSLGAENSVAYSNNSIAIPTNFTISVTTEILPVSMTKTSVDCTMYICGDSTECSNLLLQYGSFCTQLNRALTGIAVEQDKNTQEVFAQVKQIYKTPPIKDFGGFNFSQILPDPSKPSKRSFIEDLLFNKVTLADAGFIKQYGDCLGDIAARDLICAQKFNGLTVLPPLLTDEMIAQYTSALLAGTITSGWTFGAGAALQIPFAMQMAYRFNGIGVTQNVLYENQKLIANQFNSAIGKIQDSLSSTASALGKLQDVVNQNAQALNTLVKQLSSNFGAISSVLNDILSRLDPPEAEVQIDRLITGRLQSLQTYVTQQLIRAAEIRASANLAATKMSECVLGQSKRFDFCGKGYHLMSFPQSAPHGVVFLHVTYVFAQEKNFTTAPAICHDGKAHFPREGVFVSNGTHWFVTQRNFYEPQIITTDNTFVSGNCDVVIGIVNNTVYDPLQPELDSGGGGSDIIKLLNEQVNKEMQSSNLYMSMSSWCYTHSLDGAGLFLFDHAAEEYEHAKKLIIFLNENNVPVQLTSISAPEHKFEGLTQIFQKAYEHEQHISESINNIVDHAIKSKDHATFNFLQWYVAEQHEEEVLFKDILDKIELIGNENHGLYLADQYVKGIAKSRKS

SEQ ID NO: 8887 - protein, 1315 aa, Artificial Sequence
  SARS-CoV-2/China/WF0028/2020__EPI_ISL_413791 spike protein (1-1147)(K986P_V987P_P1069F) Ferritin construct
MFVFLVLLPLVSSQCVNLTTRTQLPPAYTNSFTRGVYYPDKVFRSSVLHSTQDLFLPFFSNVTWFHAIHVSGTNGTKRFDNPVLPFNDGVYFASTEKSNIIRGWIFGTTLDSKTQSLLIVNNATNVVIKVCEFQFCNDPFLGVYYHKNNKSWMESEFRVYSSANNCTFEYVSQPFLMDLEGKQGNFKNLREFVFKNIDGYFKIYSKHTPINLVRDLPQGFSALEPLVDLPIGINITRFQTLLALHRSYLTPGDSSSGWTAGAAAYYVGYLQPRTFLLKYNENGTITDAVDCALDPLSETKCTLKSFTVEKGIYQTSNFRVQPTESIVRFPNITNLCPFGEVFNATRFASVYAWNRKRISNCVADYSVLYNSASFSTFKCYGVSPTKLNDLCFTNVYADSFVIRGDEVRQIAPGQTGKIADYNYKLPDDFTGCVIAWNSNNLDSKVGGNYNYLYRLFRKSNLKPFERDISTEIYQAGSTPCNGVEGFNCYFPLQSYGFQPTNGVGYQPYRVVVLSFELLHAPATVCGPKKSTNLVKNKCVNFNFNGLTGTGVLTESNKKFLPFQQFGRDIADTTDAVRDPQTLEILDITPCSFGGVSVITPGTNTSNQVAVLYQDVNCTEVPVAIHADQLTPTWRVYSTGSNVFQTRAGCLIGAEHVNNSYECDIPIGAGICASYQTQTNSPRRARSVASQSIIAYTMSLGAENSVAYSNNSIAIPTNFTISVTTEILPVSMTKTSVDCTMYICGDSTECSNLLLQYGSFCTQLNRALTGIAVEQDKNTQEVFAQVKQIYKTPPIKDFGGFNFSQILPDPSKPSKRSFIEDLLFNKVTLADAGFIKQYGDCLGDIAARDLICAQKFNGLTVLPPLLTDEMIAQYTSALLAGTITSGWTFGAGAALQIPFAMQMAYRFNGIGVTQNVLYENQKLIANQFNSAIGKIQDSLSSTASALGKLQDVVNQNAQALNTLVKQLSSNFGAISSVLNDILSRLDPPEAEVQIDRLITGRLQSLQTYVTQQLIRAAEIRASANLAATKMSECVLGQSKRVDFCGKGYHLMSFPQSAPHGVVFLHVTYVFAQEKNFTTAPAICHDGKAHFPREGVFVSNGTHWFVTQRNFYEPQIITTDNTFVSGNCDVVIGIVNNTVYDPLQPELESGGGGSDIIKLLNEQVNKEMQSSNLYMSMSSWCYTHSLDGAGLFLFDHAAEEYEHAKKLIIFLNENNVPVQLTSISAPEHKFEGLTQIFQKAYEHEQHISESINNIVDHAIKSKDHATFNFLQWYVAEQHEEEVLFKDILDKIELIGNENHGLYLADQYVKGIAKSRKS

SEQ ID NO: 8888 - protein, 1315 aa, Artificial Sequence
  SARS-CoV-2/2019-nCoV/USA-CruiseA-18/2020__MT159716.1 spike protein (1-1147)(K986P_V987P_P1069F) Ferritin construct
MFVFLVLLPLVSSQCVNLTTRTQLPPAYTNSFTRGVYYPDKVFRSSVLHSTQDLFLPFFSNVTWFHAIHVSGTNGTKRFDNPVLPFNDGVYFASTEKSNIIRGWIFGTTLDSKTQSLLIVNNATNVVIKVCEFQFCNDPFLGVYYHKNNKSWMESELRVYSSANNCTFEYVSQPFLMDLEGKQGNFKNLREFVFKNIDGYFKIYSKHTPINLVRDLPQGFSALEPLVDLPIGINITRFQTLLALHRSYLTPGDSSSGWTAGAAAYYVGYLQPRTFLLKYNENGTITDAVDCALDPLSETKCTLKSFTVEKGIYQTSNFRVQPTESIVRFPNITNLCPFGEVFNATRFASVYAWNRKRISNCVADYSVLYNSASFSTFKCYGVSPTKLNDLCFTNVYADSFVIRGDEVRQIAPGQTGKIADYNYKLPDDFTGCVIAWNSNNLDSKVGGNYNYLYRLFRKSNLKPFERDISTEIYQAGSTPCNGVEGFNCYFPLQSYGFQPTNGVGYQPYRVVVLSFELLHAPATVCGPKKSTNLVKNKCVNFNFNGLTGTGVLTESNKKFLPFQQFGRDIADTTDAVRDPQTLEILDITPCSFGGVSVITPGTNTSNQVAVLYQDVNCTEVPVAIHADQLTPTWRVYSTGSNVFQTRAGCLIGAEHVNNSYECDIPIGAGICASYQTQTNSPRRARSVASQSIIAYTMSLGAENSVAYSNNSIAIPTNFTISVTTEILPVSMTKTSVDCTMYICGDSTECSNLLLQYGSFCTQLNRALTGIAVEQDKNTQEVFAQVKQIYKTPPIKDFGGFNFSQILPDPSKPSKRSFIEDLLFNKVTLADAGFIKQYGDCLGDIAARDLICAQKFNGLTVLPPLLTDEMIAQYTSALLAGTITSGWTFGAGAALQIPFAMQMAYRFNGIGVTQNVLYENQKLIANQFNSAIGKIQDSLSSTASALGKLQDVVNQNAQALNTLVKQLSSNFGAISSVLNDILSRLDPPEAEVQIDRLITGRLQSLQTYVTQQLIRAAEIRASANLAATKMSECVLGQSKRVDFCGKGYHLMSFPQSAPHGVVFLHVTYVFAQEKNFTTAPAICHDGKAHFPREGVFVSNGTHWFVTQRNFYEPQIITTDNTFVSGNCDVVIGIVNNTVYDPLQPELDSGGGGSDIIKLLNEQVNKEMQSSNLYMSMSSWCYTHSLDGAGLFLFDHAAEEYEHAKKLIIFLNENNVPVQLTSISAPEHKFEGLTQIFQKAYEHEQHISESINNIVDHAIKSKDHATFNFLQWYVAEQHEEEVLFKDILDKIELIGNENHGLYLADQYVKGIAKSRKS

SEQ ID NO: 8889 - protein, 1315 aa, Artificial Sequence
  SARS-CoV-2/SARS-CoV-2/Yunnan-01/human/2020/CHN__MT049951.1 spike protein (1-1147)(K986P_V987P_P1069F) Ferritin construct
MFVFLVLLPLVSSQCVNLTTRTQLPPANTNSFTRGVYYPDKVFRSSVLHSTQDLFLPFFSNVTWFHAIHVSGTNGTKRFDNPVLPFNDGVYFASTEKSNIIRGWIFGTTLDSKTQSLLIVNNATNVVIKVCEFQFCNDPFLGVYYHKNNKSWMESEFRVYSSANNCTFEYVSQPFLMDLEGKQGNFKNLREFVFKNIDGYFKIYSKHTPINLVRDLPQGFSALEPLVDLPIGINITRFQTLLALHRSYLTPGDSSSGWTAGAAAYYVGYLQPRTFLLKYNENGTITDAVDCALDPLSETKCTLKSFTVEKGIYQTSNFRVQPTESIVRFPNITNLCPFGEVFNATRFASVYAWNRKRISNCVADYSVLYNSASFSTFKCYGVSPTKLNDLCFTNVYADSFVIRGDEVRQIAPGQTGKIADYNYKLPDDFTGCVIAWNSNNLDSKVGGNYNYLYRLFRKSNLKPFERDISTEIYQAGSTPCNGVEGFNCYFPLQSYGFQPTNGVGYQPYRVVVLSFELLHAPATVCGPKKSTNLVKNKCVNFNFNGLTGTGVLTESNKKFLPFQQFGRDIADTTDAVRDPQTLEILDITPCSFGGVSVITPGTNTSNQVAVLYQDVNCTEVPVAIHADQLTPTWRVYSTGSNVFQTRAGCLIGAEHVNNSYECDIPIGAGICASYQTQTNSPRRARSVASQSIIAYTMSLGAENSVAYSNNSIAIPTNFTISVTTEILPVSMTKTSVDCTMYICGDSTECSNLLLQYGSFCTQLNRALTGIAVEQDKNTQEVFAQVKQIYKTPPIKDFGGFNFSQILPDPSKPSKRSFIEDLLFNKVTLADAGFIKQYGDCLGDIAARDLICAQKFNGLTVLPPLLTDEMIAQYTSALLAGTITSGWTFGAGAALQIPFAMQMAYRFNGIGVTQNVLYENQKLIANQFNSAIGKIQDSLSSTASALGKLQDVVNQNAQALNTLVKQLSSNFGAISSVLNDILSRLDPPEAEVQIDRLITGRLQSLQTYVTQQLIRAAEIRASANLAATKMSECVLGQSKRVDFCGKGYHLMSFPQSAPHGVVFLHVTYVFAQEKNFTTAPAICHDGKAHFPREGVFVSNGTHWFVTQRNFYEPQIITTDNTFVSGNCDVVIGIVNNTVYDPLQPELDSGGGGSDIIKLLNEQVNKEMQSSNLYMSMSSWCYTHSLDGAGLFLFDHAAEEYEHAKKLIIFLNENNVPVQLTSISAPEHKFEGLTQIFQKAYEHEQHISESINNIVDHAIKSKDHATFNFLQWYVAEQHEEEVLFKDILDKIELIGNENHGLYLADQYVKGIAKSRKS

SEQ ID NO: 8890 - protein, 1315 aa, Artificial Sequence
  SARS-CoV-2/USA/WA-UW292/2020__EPI_ISL_418077 spike protein (1-1147)(K986P_V987P_P1069F) Ferritin construct
MFVFLVLLPLVSSQCVNLTTRTQLPPAYTNSFTRGVYYPDKVFRSSVLHSTQDLFLPFFSNVTWFHAIHVSGTNGTKRFDNPVLPFNDGVYFASTEKSNIIRGWIFGTTLDSKTQSLLIVNNATNVVIKVCEFQFCNDPFLGVYYHKNNKSWMESEFRVYSSANNCTFEYVSQPFLMDLEGKQGNFKNLREFVFKNIDGYFKIYSKHTPINLVRDLPQGFSALEPLVDLPIGINITRFQTLLALHRSYLTPGDSSSGWTAGAAAYYVGYLQPRTFLLKYNENGTITDAVDCALDPLSETKCTLKSFTVEKGIYQTSNFRVQPTESIVRFPNITNLCPFGEVFNATRFASVYAWNRKRISNCVADYSVLYNSASFSTFKCYGVSPTKLNDLCFTNVYADSFVIRGDEVRQIAPGQTGKIADYNYKLPDDFTGCVIAWNSNNLDSKVGGNYNYLYRLFRKSNLKPFERDISTEIYQASSTPCNGVEGFNCYFPLQSYGFQPTNGVGYQPYRVVVLSFELLHAPATVCGPKKSTNLVKNKCVNFNFNGLTGTGVLTESNKKFLPFQQFGRDIADTTDAVRDPQTLEILDITPCSFGGVSVITPGTNTSNQVAVLYQDVNCTEVPVAIHADQLTPTWRVYSTGSNVFQTRAGCLIGAEHVNNSYECDIPIGAGICASYQTQTNSPRRARSVASQSIIAYTMSLGAENSVAYSNNSIAIPTNFTISVTTEILPVSMTKTSVDCTMYICGDSTECSNLLLQYGSFCTQLNRALTGIAVEQDKNTQEVFAQVKQIYKTPPIKDFGGFNFSQILPDPSKPSKRSFIEDLLFNKVTLADAGFIKQYGDCLGDIAARDLICAQKFNGLTVLPPLLTDEMIAQYTSALLAGTITSGWTFGAGAALQIPFAMQMAYRFNGIGVTQNVLYENQKLIANQFNSAIGKIQDSLSSTASALGKLQDVVNQNAQALNTLVKQLSSNFGAISSVLNDILSRLDPPEAEVQIDRLITGRLQSLQTYVTQQLIRAAEIRASANLAATKMSECVLGQSKRVDFCGKGYHLMSFPQSAPHGVVFLHVTYVFAQEKNFTTAPAICHDGKAHFPREGVFVSNGTHWFVTQRNFYEPQIITTDNTFVSGNCDVVIGIVNNTVYDPLQPELDSGGGGSDIIKLLNEQVNKEMQSSNLYMSMSSWCYTHSLDGAGLFLFDHAAEEYEHAKKLIIFLNENNVPVQLTSISAPEHKFEGLTQIFQKAYEHEQHISESINNIVDHAIKSKDHATFNFLQWYVAEQHEEEVLFKDILDKIELIGNENHGLYLADQYVKGIAKSRKS

SEQ ID NO: 8891 - protein, 1315 aa, Artificial Sequence
  SARS-CoV-2/Iceland/192/2020__EPI_ISL_417819 spike protein (1-1147)(K986P_V987P_P1069F) Ferritin construct
MFVFFVLLPLVSSQCVNLTTRTQLPPAYTNSFTRGVYYPDKVFRSSVLHSTQDLFLPFFSNVTWFHAIHVSGTNGTKRFDNPVLPFNDGVYFASTEKSNIIRGWIFGTTLDSKTQSLLIVNNATNVVIKVCEFQFCNDPFLGVYYHKNNKSWMESEFRVYSSANNCTFEYVSQPFLMDLEGKQGNFKNLREFVFKNIDGYFKIYSKHTPINLVRDLPQGFSALEPLVDLPIGINITRFQTLLALHRSYLTPGDSSSGWTAGAAAYYVGYLQPRTFLLKYNENGTITDAVDCALDPLSETKCTLKSFTVEKGIYQTSNFRVQPTESIVRFPNITNLCPFGEVFNATRFASVYAWNRKRISNCVADYSVLYNSASFSTFKCYGVSPTKLNDLCFTNVYADSFVIRGDEVRQIAPGQTGKIADYNYKLPDDFTGCVIAWNSNNLDSKVGGNYNYLYRLFRKSNLKPFERDISTEIYQAGSTPCNGVEGFNCYFPLQSYGFQPTNGVGYQPYRVVVLSFELLHAPATVCGPKKSTNLVKNKCVNFNFNGLTGTGVLTESNKKFLPFQQFGRDIADTTDAVRDPQTLEILDITPCSFGGVSVITPGTNTSNQVAVLYQGVNCTEVPVAIHADQLTPTWRVYSTGSNVFQTRAGCLIGAEHVNNSYECDIPIGAGICASYQTQTNSPRRARSVASQSIIAYTMSLGAENSVAYSNNSIAIPTNFTISVTTEILPVSMTKTSVDCTMYICGDSTECSNLLLQYGSFCTQLNRALTGIAVEQDKNTQEVFAQVKQIYKTPPIKDFGGFNFSQILPDPSKPSKRSFIEDLLFNKVTLADAGFIKQYGDCLGDIAARDLICAQKFNGLTVLPPLLTDEMIAQYTSALLAGTITSGWTFGAGAALQIPFAMQMAYRFNGIGVTQNVLYENQKLIANQFNSAIGKIQDSLSSTASALGKLQDVVNQNAQALNTLVKQLSSNFGAISSVLNDILSRLDPPEAEVQIDRLITGRLQSLQTYVTQQLIRAAEIRASANLAATKMSECVLGQSKRVDFCGKGYHLMSFPQSAPHGVVFLHVTYVFAQEKNFTTAPAICHDGKAHFPREGVFVSNGTHWFVTQRNFYEPQIITTDNTFVSGNCDVVIGIVNNTVYDPLQPELDSGGGGSDIIKLLNEQVNKEMQSSNLYMSMSSWCYTHSLDGAGLFLFDHAAEEYEHAKKLIIFLNENNVPVQLTSISAPEHKFEGLTQIFQKAYEHEQHISESINNIVDHAIKSKDHATFNFLQWYVAEQHEEEVLFKDILDKIELIGNENHGLYLADQYVKGIAKSRKS

SEQ ID NO: 8892 - protein, 1315 aa, Artificial Sequence
  SARS-CoV-2/Belgium/ULG-6939/2020__EPI_ISL_417020 spike protein (1-1147)(K986P_V987P_P1069F) Ferritin construct
MFVFLVLLPLVSSQCVNLTTRTQLPPAYTNSFTRGVYYPDKVFRSSVLHSTQDLFLPFFSNVTWFHAIHVSGTNGTKRFDNPVLPFNDGVYFASTEKSNIIRGWIFGTTLDSKTQSLLIVNNATNVVIKVCEFQFCNDPFLGVYYHKNNKSWMESEFRVYSSANNCTFEYVSQPFLMDLEGKQGNFKNLREFVFKNIDGYFKIYSKHTPINLVRDLPQGFSALEPLVDLPIGINITRFQTLLALHRSYLTPGDSSSGWTAGAAAYYVGYLQPRTFLLKYNENGTITDAVDCALDPLSETKCTLKSFTVEKGIYQTSNFRVQPTESIVRFPNITNLCPFGEVFNATRFASVYAWNRKRISNCVADYSVLYNSASFSTFKCYGVSPTKLNDLCFTNVYADSFVIRGDEVRQIAPGQTGKIADYNYKLPDDFTGCVIAWNSNNLDSKVGGNYNYLYRLFRKSNLKPFERDISTEIYQAGSTPCNGVEGFNCYFPLQSYGFQPTNGVGYQPYRVVVLSFELLHAPATVCGPKKSTNLVKNKCVNFNFNGLTGTGVLTESNKKFLPFQQFGRDIADTTDAVRDPQTLEILDITPCSFGGVSVITPGTNTSNQVAVLYQGVNCTEVPVAIHADQLTPTWRVYSTGSNVFQTRAGCLIGAEHVNNSYECDIPIGAGICASYQTQTNSPRRARSVASQSIIAYTMSLGAENSVVYSNNSIAIPTNFTISVTTEILPVSMTKTSVDCTMYICGDSTECSNLLLQYGSFCTQLNRALTGIAVEQDKNTQEVFAQVKQIYKTPPIKDFGGFNFSQILPDPSKPSKRSFIEDLLFNKVTLADAGFIKQYGDCLGDIAARDLICAQKFNGLTVLPPLLTDEMIAQYTSALLAGTITSGWTFGAGAALQIPFAMQMAYRFNGIGVTQNVLYENQKLIANQFNSAIGKIQDSLSSTASALGKLQDVVNQNAQALNTLVKQLSSNFGAISSVLNDILSRLDPPEAEVQIDRLITGRLQSLQTYVTQQLIRAAEIRASANLAATKMSECVLGQSKRVDFCGKGYHLMSFPQSAPHGVVFLHVTYVFAQEKNFTTAPAICHDGKAHFPREGVFVSNGTHWFVTQRNFYEPQIITTDNTFVSGNCDVVIGIVNNTVYDPLQPELDSGGGGSDIIKLLNEQVNKEMQSSNLYMSMSSWCYTHSLDGAGLFLFDHAAEEYEHAKKLIIFLNENNVPVQLTSISAPEHKFEGLTQIFQKAYEHEQHISESINNIVDHAIKSKDHATFNFLQWYVAEQHEEEVLFKDILDKIELIGNENHGLYLADQYVKGIAKSRKS

SEQ ID NO: 8893 - protein, 1315 aa, Artificial Sequence
  SARS-CoV-2/France/HF2496/2020__EPI_ISL_418231 spike protein (1-1147)(K986P_V987P_P1069F) Ferritin construct
MFVFLVLLPLVSSQCVNLTTRTQLPPAYTNSFTRGVYYPDKVFRSSVLHSTQDLFLPFFSNVTWFHAIHVSGTNGTKRFDNPVLPFNDGVYFASTEKSNIIRGWIFGTTLDSKTQSLLIVNNATNVVIKVCEFQFCNDPFLGVYYHKNNKSWMESEFRVYSSANNCTFEYVSQPFLMDLEGKQGNFKNLREFVFKNIDGYFKIYSKHTPINLVRDLPQGFSALEPLVDLPIGINITRFQTLLALHRSYLTPGDSSSGWTAGAAAYYVGYLQPRTFLLKYNENGTITDAVDCALDPLSETKCTLKSFTVEKGIYQTSNFRVQPTESIVRFPNITNLCPFGEVFNATRFASVYAWNRKRISNCVADYSVLYNSASFSTFKCYGVSPTKLNDLCFTNVYADSFVIRGDEVRQIAPGQTGKIADYNYKLPDDFTGCVIAWNSNNLDSKVGGNYNYLYRLFRKSNLKPFERDISTEIYQAGSTPCNGVEGFNCYFPLQSYGFQPTNGVGYQPYRVVVLSFELLHAPATVCGPKKSTNLVKNKCVNFNFNGLTGTGVLTESNKKFLPFQQFGRDIADTTDAVRDPQTLEILDITPCSFGGVSVITPGTNTSNQVAVLYQGVNCTEVPVAIHADQLTPTWRVYSTGSNVFQTRAGCLIGAEHVNNSYECDIPIGAGICASYQTQTNSPRRARSVASQSIIAYTMSLGAENSVAYSNNSIAIPTNFTISVTTEILPVSMTKTSVDCTMYICGDSTECSNLLLQYGSFCTQLNRALTGIAVEQDKNTQEVFAQVKQIYKTPPIKDFGGFNFSQILPDPSKPSKRSFIEDLLFNKVTLADAGFIKQYGDCLGDIVARDLICAQKFNGLTVLPPLLTDEMIAQYTSALLAGTITSGWTFGAGAALQIPFAMQMAYRFNGIGVTQNVLYENQKLIANQFNSAIGKIQDSLSSTASALGKLQDVVNQNAQALNTLVKQLSSNFGAISSVLNDILSRLDPPEAEVQIDRLITGRLQSLQTYVTQQLIRAAEIRASANLAATKMSECVLGQSKRVDFCGKGYHLMSFPQSAPHGVVFLHVTYVFAQEKNFTTAPAICHDGKAHFPREGVFVSNGTHWFVTQRNFYEPQIITTDNTFVSGNCDVVIGIVNNTVYDPLQPELDSGGGGSDIIKLLNEQVNKEMQSSNLYMSMSSWCYTHSLDGAGLFLFDHAAEEYEHAKKLIIFLNENNVPVQLTSISAPEHKFEGLTQIFQKAYEHEQHISESINNIVDHAIKSKDHATFNFLQWYVAEQHEEEVLFKDILDKIELIGNENHGLYLADQYVKGIAKSRKS

SEQ ID NO: 8894 - protein, 1315 aa, Artificial Sequence
  SARS-CoV-2/USA/WA-UW291/2020__EPI_ISL_418076 spike protein (1-1147)(K986P_V987P_P1069F) Ferritin construct
MFVFLVLLPLVSSQCVNLTTRTQLPPAYTNSFTRGVYYPDKVFRSSVLHSTQDLFLPFFSNVTWFHAIHVSGTNGTKRFDNPVLPFNDGVYFASTEKSNIIRGWIFGTTLDSKTQSLLIVNNATNVVIKVCEFQFCNDPFLGVYYHKNNKSWMESEFRVYSSANNCTFEYVSQPFLMDLEGKQGNFKNLREFVFKNIDGYFKIYSKHTPINLVRDLPQGFSALEPLVDLPIGINITRFQTLLALHRSYLTPGDSSSGWTAGAAAYYVGYLQPRTFLLKYNENGTITDAVDCALDPLSETKCTLKSFTVEKGIYQTSNFRVQPTESIVRFPNITNLCPFGEVFNATRFASVYAWNRKRISNCVADYSVLYNSASFSTFKCYGVSPTKLNDLCFTNVYADSFVIRGDEVRQIAPGQTGKIADYNYKLPDDFTGCVIAWNSNNLDSKVGGNYNYLYRLFRKSNLKPFERDISTEIYQAGSTPCNGVEGFNCYFPLQSYGFQPTNGVGYQPYRVVVLSFELLHAPATVCGPKKSTNLVKNKCVNFNFNGLTGTGVLTESNKKFLPFQQFGRDIADTTDAVRDPQTLEILDITPCSFGGVSVITPGTNTSNQVAVLYQGVNCTEVPVAIHADQLTPTWRVYSTGSNVFQTRAGCLIGAEHVNNSYECDIPIGAGICASYQTQTNSPRRARSVASQSIIAYTMSLGAENSVAYSNNSIAIPTNFTISVTTEILPVSMTKTSVDCTMYICGDSTECSNLLLQYGSFCTQLNRALTGIAVEQDKNTQEVFAQVKQIYKTPPIKDFGGFNFSQILPDPSKPSKRSFIEDLLFNKVTLADAGFIKQYGDCLGDIAARDLICAQKFNGLTVLPPLLTDEMIAQYTSALLAGTITSGWTFGAGAALQIPFAMQMAYRFNGIGVTQNVLYENQKLIANQFNSAIGKIQYSLSSTASALGKLQDVVNQNAQALNTLVKQLSSNFGAISSVLNDILSRLDPPEAEVQIDRLITGRLQSLQTYVTQQLIRAAEIRASANLAATKMSECVLGQSKRVDFCGKGYHLMSFPQSAPHGVVFLHVTYVFAQEKNFTTAPAICHDGKAHFPREGVFVSNGTHWFVTQRNFYEPQIITTDNTFVSGNCDVVIGIVNNTVYDPLQPELDSGGGGSDIIKLLNEQVNKEMQSSNLYMSMSSWCYTHSLDGAGLFLFDHAAEEYEHAKKLIIFLNENNVPVQLTSISAPEHKFEGLTQIFQKAYEHEQHISESINNIVDHAIKSKDHATFNFLQWYVAEQHEEEVLFKDILDKIELIGNENHGLYLADQYVKGIAKSRKS

SEQ ID NO: 8895 - protein, 1315 aa, Artificial Sequence; identical to SEQ ID NO: 8858
  SARS-CoV-2/Portugal/PT0034/2020__EPI_ISL_418019 spike protein (1-1147)(K986P_V987P_P1069F) Ferritin construct

SEQ ID NO: 8896 - protein, 1315 aa, Artificial Sequence; identical to SEQ ID NO: 8850
  SARS-CoV-2/Iceland/202/2020__EPI_ISL_417750 spike protein (1-1147)(K986P_V987P_P1069F) Ferritin construct

SEQ ID NO: 8897 - protein, 1315 aa, Artificial Sequence
  SARS-CoV-2/USA/WA-UW261/2020__EPI_ISL_418046 spike protein (1-1147)(K986P_V987P_P1069F) Ferritin construct
MFVFLVLLPLVSSQCVNLTTRTQLPPAYTNSFTRGVYYPDKVFRSSVLHSTQDLFLPFFSNVTWFHAIHVSGTNGTKRFDNPVLPFNDGVYFASTEKSNIIRGWIFGTTLDSKTQSLLIVNNATNVVIKVCEFQFCNDPFLGVYYHKNNKSWMESEFRVYSSANNCTFEYVSQPFLMDLEGKQGNFKNLREFVFKNIDGYFKIYSKHTPINLVRDLPQGFSALEPLVDLPIGINITRFQTLLALHRSYLTPGDSSSGWTAGAAAYYVGYLQPRTFLLKYNENGTITDAVDCALDPLSETKCTLKSFTVEKGIYQTSNFRVQPTESIVRFPNITNLCPFGEVFNATRFTSVYAWNRKRISNCVADYSVLYNSASFSTFKCYGVSPTKLNDLCFTNVYADSFVIRGDEVRQIAPGQTGKIADYNYKLPDDFTGCVIAWNSNNLDSKVGGNYNYLYRLFRKSNLKPFERDISTEIYQAGSTPCNGVEGFNCYFPLQSYGFQPTNGVGYQPYRVVVLSFELLHAPATVCGPKKSTNLVKNKCVNFNFNGLTGTGVLTESNKKFLPFQQFGRDIADTTDAVRDPQTLEILDITPCSFGGVSVITPGTNTSNQVAVLYQDVNCTEVPVAIHADQLTPTWRVYSTGSNVFQTRAGCLIGAEHVNNSYECDIPIGAGICASYQTQTNSPRRARSVASQSIIAYTMSLGAENSVAYSNNSIAIPTNFTISVTTEILPVSMTKTSVDCTMYICGDSTECSNLLLQYGSFCTQLNRALTGIAVEQDKNTQEVFAQVKQIYKTPPIKDFGGFNFSQILPDPSKPSKRSFIEDLLFNKVTLADAGFIKQYGDCLGDIAARDLICAQKFNGLTVLPPLLTDEMIAQYTSALLAGTITSGWTFGAGAALQIPFAMQMAYRFNGIGVTQNVLYENQKLIANQFNSAIGKIQDSLSSTASALGKLQDVVNQNAQALNTLVKQLSSNFGAISSVLNDILSRLDPPEAEVQIDRLITGRLQSLQTYVTQQLIRAAEIRASANLAATKMSECVLGQSKRVDFCGKGYHLMSFPQSAPHGVVFLHVTYVFAQEKNFTTAPAICHDGKAHFPREGVFVSNGTHWFVTQRNFYEPQIITTDNTFVSGNCDVVIGIVNNTVYDPLQPELDSGGGGSDIIKLLNEQVNKEMQSSNLYMSMSSWCYTHSLDGAGLFLFDHAAEEYEHAKKLIIFLNENNVPVQLTSISAPEHKFEGLTQIFQKAYEHEQHISESINNIVDHAIKSKDHATFNFLQWYVAEQHEEEVLFKDILDKIELIGNENHGLYLADQYVKGIAKSRKS

SEQ ID NO: 8898 - protein, 1315 aa, Artificial Sequence
  SARS-CoV-2/Portugal/PT0035/2020__EPI_ISL_418020 spike protein (1-1147)(K986P_V987P_P1069F) Ferritin construct
MFVFLVLLPLVSSQCVNLTTRTQLPPAYTNSFTRGVYYPDKVFRSSVLHSTQDLFLPFFSNVTWFHAIHVSGTNGTKRFDNPVLPFNDGVYFASTEKSNIIRGWIFGTTLDSKTQSLLIVNNATNVVIKVCEFQFCNDPFLGVYYHKNNKSWMESEFRVYSSANNCTFEYVSQPFLMDLEGKQGNFKNLREFVFKNIDGYFKIYSKHTPINLVRDLPQGFSALEPLVDLPIGINITRFQTLLALHRSYLTPGDSSSGWTAGAAAYYVGYLQPRTFLLKYNENGTITDAVDCALDPLSETKCTLKSFTVEKGIYQTSNFRVQPTESIVRFPNITNLCPFGEVFNATRFASVYAWNRKRISNCVADYSVLYNSASFSTFKCYGVSPTKLNDLCFTNVYADSFVIRGDEVRQIAPGQTGKIADYNYKLPDDFTGCVIAWNSNNLDSKVGGNYNYLYRLFRKSNLKPFERDISTEIYQAGSTPCNGVEGFNCYFPLQSYGFQPTNGVGYQPYRVVVLSFELLHAPATVCGPKKSTNLVKNKCVNFNFNGLTGTGVLTESNKKFLPFQQFGRDIADTTDAVRDPQTLEILDITPCSFGGVSVITPGTNTSNQVAVLYQDVNCTEVPVAIHADQLTPTWRVYSTGSNVFQTRAGCLIGAEHVNNSYECDIPIGAGICASYQTQTNSPRRARSVASQSIIAYTMSLGAENSVAYSNNSIAIPTNFTISVTTEILPVSMTKTSVDCTMYICGDSTECSNLLLQYGSFCTQLNRALTGIAVEQDKNTQEVFAQVKQIYKTPPIKDFGGFNFSQILPDPSKPSKRSFIEDLLFNKVTLADAGFIKQYGDCLGDISARDLICAQKFNGLTVLPPLLTDEMIAQYTSALLAGTITSGWTFGAGAALQIPFAMQMAYRFNGIGVTQNVLYENQKLIANQFNSAIGKIQDSLSSTASALGKLQDVVNQNAQALNTLVKQLSSNFGAISSVLNDILSRLDPPEAEVQIDRLITGRLQSLQTYVTQQLIRAAEIRASANLAATKMSECVLGQSKRVDFCGKGYHLMSFPQSAPHGVVFLHVTYVFAQEKNFTTAPAICHDGKAHFPREGVFVSNGTHWFVTQRNFYEPQIITTDNTFVSGNCDVVIGIVNNTVYDPLQPELDSGGGGSDIIKLLNEQVNKEMQSSNLYMSMSSWCYTHSLDGAGLFLFDHAAEEYEHAKKLIIFLNENNVPVQLTSISAPEHKFEGLTQIFQKAYEHEQHISESINNIVDHAIKSKDHATFNFLQWYVAEQHEEEVLFKDILDKIELIGNENHGLYLADQYVKGIAKSRKS

SEQ ID NO: 8899 - protein, 1315 aa, Artificial Sequence
  SARS-CoV-2/USA/NY-NYUMC7/2020__EPI_ISL_418192 spike protein (1-1147)(K986P_V987P_P1069F) Ferritin construct
MFVFLVLLPLVSSQCVNLTTRTQLPPAYTNSFTRGVYYPDKVFRSSVLHSTQDLFLPFFSNVTWFHAIHVSGTNGTKRFDNPVLPFNDGVYFASTEKSNIIRGWIFGTTLDSKTQSLLIVNNATNVVIKVCEFQFCNDPFLGVYHHKNNKSWMESEFRVYSSANNCTFEYVSQPFLMDLEGKQGNFKNLREFVFKNIDGYFKIYSKHTPINLVRDLPQGFSALEPLVDLPIGINITRFQTLLALHRSYLTPGDSSSGWTAGAAAYYVGYLQPRTFLLKYNENGTITDAVDCALDPLSETKCTLKSFTVEKGIYQTSNFRVQPTESIVRFPNITNLCPFGEVFNATRFASVYAWNRKRISNCVADYSVLYNSASFSTFKCYGVSPTKLNDLCFTNVYADSFVIRGDEVRQIAPGQTGKIADYNYKLPDDFTGCVIAWNSNNLDSKVGGNYNYLYRLFRKSNLKPFERDISTEIYQAGSTPCNGVEGFNCYFPLQSYGFQPTNGVGYQPYRVVVLSFELLHAPATVCGPKKSTNLVKNKCVNFNFNGLTGTGVLTESNKKFLPFQQFGRDIADTTDAVRDPQTLEILDITPCSFGGVSVITPGTNTSNQVAVLYQGVNCTEVPVAIHADQLTPTWRVYSTGSNVFQTRAGCLIGAEHVNNSYECDIPIGAGICASYQTQTNSPRRARSVASQSIIAYTMSLGAENSVAYSNNSIAIPTNFTISVTTEILPVSMTKTSVDCTMYICGDSTECSNLLLQYGSFCTQLNRALTGIAVEQDKNTQEVFAQVKQIYKTPPIKDFGGFNFSQILPDPSKPSKRSFIEDLLFNKVTLADAGFIKQYGDCLGDIAARDLICAQKFNGLTVLPPLLTDEMIAQYTSALLAGTITSGWTFGAGAALQIPFAMQMAYRFNGIGVTQNVLYENQKLIANQFNSAIGKIQDSLSSTASALGKLQDVVNQNAQALNTLVKQLSSNFGAISSVLNDILSRLDPPEAEVQIDRLITGRLQSLQTYVTQQLIRAAEIRASANLAATKMSECVLGQSKRVDFCGKGYHLMSFPQSAPHGVVFLHVTYVFAQEKNFTTAPAICHDGKAHFPREGVFVSNGTHWFVTQRNFYEPQIITTDNTFVSGNCDVVIGIVNNTVYDPLQPELDSGGGGSDIIKLLNEQVNKEMQSSNLYMSMSSWCYTHSLDGAGLFLFDHAAEEYEHAKKLIIFLNENNVPVQLTSISAPEHKFEGLTQIFQKAYEHEQHISESINNIVDHAIKSKDHATFNFLQWYVAEQHEEEVLFKDILDKIELIGNENHGLYLADQYVKGIAKSRKS

SEQ ID NO: 8900 - protein, 1315 aa, Artificial Sequence
  SARS-CoV-2/Iceland/189/2020__EPI_ISL_417709 spike protein (1-1147)(K986P_V987P_P1069F) Ferritin construct
MFVFLVLLPLVSSQCVNLTTRTQLPPAYTNSFTRGVYYPDKVFRSSVLHSTQDLFLPFFSNVTWFHAIHVSGTNGTKRFDNPVLPFNDGVYFASTEKSNIIRGWIFGTTLDSKTQSLLIVNNATNVVIKVCEFQFCNDPFLGVYYHKNNKSWMESEFRVYSSANNCTFEYVSQPFLMDLEGKQGNFKNLREFVFKNIDGYFKIYSKHTPINLVRDLPQGFSALEPLVDLPIGINITRFQTLLALHRSYLTPGDSSSGWTAGAAAYYVGYLQPRTFLLKYNENGTITDAVDCALDPLSETKCTLKSFTVEKGIYQTSNFRVQPTESIVRFPNITNLCPFGEVFNATRFASVYAWNRKRISNCVADYSVLYNSASFSTFKCYGVSPTKLNDLCFTNVYADSFVIRGDEVRQIAPGQTGKIADYNYKLPDDFTGCVIAWNSNNLDSKVGGNYNYLYRLFRKSNLKPFERDISTEIYQAGSTPCNGVEGFNCYFPLQSYGFQPTNGVGYQPYRVVVLSFELLHAPATVCGPKKSTNLVKNKCVNFNFNGLTGTGVLTESNKKFLPFQQFGRDIADTTDAVRDPQTLEILDITPCSFGGVSVITPGTNTSNQVAVLYQGVNCTEVPVAIHADQLTPTWRVYSTGSNVFQTRAGCLIGAEHVNNSYECDIPIGAGICASYQTQTNSPRRARSVASQSIIAYTMSLGAENSVAYSNNSIAIPTNFTISVTTEILPVSMTKTSVDCTMYICGDSTECSNLLLQYGSFCTQLNRALTGIAVEQDKNTQEVFAQVKQIYKTPPIKDFGGFNFSQILPDPSKPSKRSFIEDLLFNKVTLADAGFTKQYGDCLGDIAARDLICAQKFNGLTVLPPLLTDEMIAQYTSALLAGTITSGWTFGAGAALQIPFAMQMAYRFNGIGVTQNVLYENQKLIANQFNSAIGKIQDSLSSTASALGKLQDVVNQNAQALNTLVKQLSSNFGAISSVLNDILSRLDPPEAEVQIDRLITGRLQSLQTYVTQQLIRAAEIRASANLAATKMSECVLGQSKRVDFCGKGYHLMSFPQSAPHGVVFLHVTYVFAQEKNFTTAPAICHDGKAHFPREGVFVSNGTHWFVTQRNFYEPQIITTDNTFVSGNCDVVIGIVNNTVYDPLQPELDSGGGGSDIIKLLNEQVNKEMQSSNLYMSMSSWCYTHSLDGAGLFLFDHAAEEYEHAKKLIIFLNENNVPVQLTSISAPEHKFEGLTQIFQKAYEHEQHISESINNIVDHAIKSKDHATFNFLQWYVAEQHEEEVLFKDILDKIELIGNENHGLYLADQYVKGIAKSRKS

SEQ ID NO: 8901 - protein, 1315 aa, Artificial Sequence
  SARS-CoV-2/Australia/NSW56/2020__EPI_ISL_417408 spike protein (1-1147)(K986P_V987P_P1069F) Ferritin construct
MFVFLVLLPLVSSQCVNLTTRTQLPPAYTNSFTRGVYYPDKVFRSSVLHSTQDLFLPFFSNVTWFHAIHVSGTNGTKRFDNPVLPFNDGVYFASTEKSNIIRGWIFGTTLDSKTQSLLIVNNATNVVIKVCEFQFCNDPFLGVYYHKNNKSWMESEFRVYSSANNCTFEYVSQPFLMDLEGKQGNFKNLREFVFKNIDGYFKIYSKHTPINLVRDLPQGFSALEPLVDLPIGINITRFQTLLALHRSYLTPGDSSSGWTAGAAAYYVGYLQPRTFLLKYNENGTITDAVDCALDPLSETKCTLKSFTVEKGIYQTSNFRVQPTESIVRFPNITNLCPFGEVFNATRFASVYAWNRKRISNCVADYSVLYNSASFSTFKCYGVSPTKLNDLCFTNVYADSFVIRGDEVRQIAPGQTGKIADYNYKLPDDFTGCVIAWNSNNLDSKVGGNYNYLYRLFRKSNLKPFERDISTEIYQAGSTPCNGVEGFNCYFPLQSYGFQPTNGVGYQPYRVVVLSFELLHAPATVCGPKKSTNLVKNKCVNFNFNGLTGTGVLTESNKKFLPFQQFGRDIADTTDAVRDPQTLEILDITPCSFGGVSVITPGTNTSNQVAVLYQDVNCTEVPVAIHADQLTPTWRVYSTGSNVFQTRAGCLIGAEHVNNSYECDIPIGAGICASYQTQTNSPRRARSVASQSIIAYTMSLGAENSVAYSNNSIAIPTNFTISVTTEILPVSMTKTSVDCTMYICGDSTECSNLLLQYGSFCTQLNRALTGIAVEQDKNTQEVFAQVKQIYKTPPIKDFGGFNFSQILPDSSKPSKRSFIEDLLFNKVTLADAGFIKQYGDCLGDIAARDLICAQKFNGLTVLPPLLTDEMIAQYTSALLAGTITSGWTFGAGAALQIPFAMQMAYRFNGIGVTQNVLYENQKLIANQFNSAIGKIQDSLSSTASALGKLQDVVNQNAQALNTLVKQLSSNFGAISSVLNDILSRLDPPEAEVQIDRLITGRLQSLQTYVTQQLIRAAEIRASANLAATKMSECVLGQSKRVDFCGKGYHLMSFPQSAPHGVVFLHVTYVFAQEKNFTTAPAICHDGKAHFPREGVFVSNGTHWFVTQRNFYEPQIITTDNTFVSGNCDVVIGIVNNTVYDPLQPELDSGGGGSDIIKLLNEQVNKEMQSSNLYMSMSSWCYTHSLDGAGLFLFDHAAEEYEHAKKLIIFLNENNVPVQLTSISAPEHKFEGLTQIFQKAYEHEQHISESINNIVDHAIKSKDHATFNFLQWYVAEQHEEEVLFKDILDKIELIGNENHGLYLADQYVKGIAKSRKS

SEQ ID NO: 8902 - protein, 1315 aa, Artificial Sequence
  SARS-CoV-2/Iceland/280/2020__EPI_ISL_417608 spike protein (1-1147)(K986P_V987P_P1069F) Ferritin construct
MFVFLVLLPLVSSQCVNLTTRTQLPPAYTNSFTRGVYYPDKVFRSSVLHSTQDLFLPFFSNVTWFHAIHVSGTNGTKRFDNPVLPFNDGVYFASTEKSNIIRGWIFGTTLDSKTQSLLIVNNATNVVIKVCEFQFCNDPFLGVYYHKNNKSWMESEFRVYSSANNCTFEYVSQPFLMDLEGKQGNFKNLREFVFKNIDGYFKIYSKHTPINLVRDLPQGFSALEPLVDLPIGINITRFQTLLALHRSYLTPGDSSSGWTAGAAAYYVGYLQPRTFLLKYNENGTITDAVDCALDPLSETKCTLKSFTVEKGIYQTSNFRVQPTESIVRFPNITNLCPFGEVFNATRFASVYAWNRKRISNCVADYSVLYNSASFSTFKCYGVSPTKLNDLCFTNVYADSFVIRGDEVRQIAPGQTGKIADYNYKLPDDFTGCVIAWNSNNLDSKVGGNYNYLYRLFRKSNLKPFERDISTEIYQAGSTPCNGVEGFNCYFPLQSYGFQPTNGVGYQPYRVVVLSFELLHAPATVCGPKKSTNLVKNKCVNFNFNGLTGTGVLTESNKKFLPFQQFGRDIADTTDAVRDPQTLEILDITPCSFGGVSVITPGTNTSNQVAVLYQGVNCTEVPVAIHADQLTPTWRVYSTGSNVFQTRAGCLIGAEHVNNSYECDIPIGAGICASYHTQTNSPRRARSVASQSIIAYTMSLGAENSVAYSNNSIAIPTNFTISVTTEILPVSMTKTSVDCTMYICGDSTECSNLLLQYGSFCTQLNRALTGIAVEQDKNTQEVFAQVKQIYKTPPIKDFGGFNFSQILPDPSKPSKRSFIEDLLFNKVTLADAGFIKQYGDCLGDIAARDLICAQKFNGLTVLPPLLTDEMIAQYTSALLAGTITSGWTFGAGAALQIPFAMQMAYRFNGIGVTQNVLYENQKLIANQFNSAIGKIQDSLSSTASALGKLQDVVNQNAQALNTLVKQLSSNFGAISSVLNDILSRLDPPEAEVQIDRLITGRLQSLQTYVTQQLIRAAEIRASANLAATKMSECVLGQSKRVDFCGKGYHLMSFPQSAPHGVVFLHVTYVFAQEKNFTTAPAICHDGKAHFPREGVFVSNGTHWFVTQRNFYEPQIITTDNTFVSGNCDVVIGIVNNTVYDPLQPELDSGGGGSDIIKLLNEQVNKEMQSSNLYMSMSSWCYTHSLDGAGLFLFDHAAEEYEHAKKLIIFLNENNVPVQLTSISAPEHKFEGLTQIFQKAYEHEQHISESINNIVDHAIKSKDHATFNFLQWYVAEQHEEEVLFKDILDKIELIGNENHGLYLADQYVKGIAKSRKS

SEQ ID NO: 8903 - protein, 1315 aa, Artificial Sequence; identical to SEQ ID NO: 8858
  SARS-CoV-2/Iceland/247/2020__EPI_ISL_417575 spike protein (1-1147)(K986P_V987P_P1069F) Ferritin construct

SEQ ID NO: 8904 - protein, 1315 aa, Artificial Sequence
  SARS-CoV-2/Iceland/238/2020__EPI_ISL_417566 spike protein (1-1147)(K986P_V987P_P1069F) Ferritin construct
MFVFLVLLPLVSSQCVNLTTRTQLPPAYTNSFTRGVYYPDKVFRSSVLHSTQDLFLPFFSNVTWFHAIHVSGTNGTKRFDNPVLPFNDGVYFASTEKSNIIRGWIFGTTLDSKTQSLLIVNNATNVVIKVCEFQFCNDPFLGVYYHKNNKSWMESEFRVYSSANNCTFEYVSQPFLMDLEGKQGNFKNLREFVFKNIDGYFKIYSKHTPINLVRDLPQGFSALEPLVDLPIGINITRFQTLLALHRSYLTPGDSSSGWTAGAAAYYVGYLQPRTFLLKYNENGTITDAVDCALDPLSETKCTLKSFTVEKGIYQTSNFRVQPTESIVRFPNITNLCPFGEVFNATRFASVYAWNRKRISNCVADYSVLYNSASFSTFKCYGVSPTKLNDLCFTNVYADSFVIRGDEVRQIAPGQTGKIADYNYKLPDDFTGCVIAWNSNNLDSKVGGNYNYLYRLFRKSNLKPFERDISTEIYQAGSTPCNGVEGFNCYFPLQSYGFQPTNGVGYQPYRVVVLSFELLHAPATVCGPKKSTNLVKNKCVNFNFNGLTGTGVLTESNKKFLPFQQFGRDIADTTDAVRDPQTLEILDITPCSFGGVSVITPGTNTSNQVAVLYQGVNCTEVPVAIHADQLTPTWRVYSTGSNVFQTRAGCLIGAEHVNNSYECDIPIGAGICASYQTQTNSPRRARSVASQSIIAYTMSLGAENSVAYSNNSIAIPTNFTISVTTEILPVSMTKTSVDCTMYICGDSTECSNLLLQYGSFCTQLNRALTGIAVEQDKNTQEVFAQVKQIYKTPPIKDFGGFNFSQILPDPSKPSKRSFIEDLLFNKVTLADVGFIKQYGDCLGDIAARDLICAQKFNGLTVLPPLLTDEMIAQYTSALLAGTITSGWTFGAGAALQIPFAMQMAYRFNGIGVTQNVLYENQKLIANQFNSAIGKIQDSLSSTASALGKLQDVVNQNAQALNTLVKQLSSNFGAISSVLNDILSRLDPPEAEVQIDRLITGRLQSLQTYVTQQLIRAAEIRASANLAATKMSECVLGQSKRVDFCGKGYHLMSFPQSAPHGVVFLHVTYVFAQEKNFTTAPAICHDGKAHFPREGVFVSNGTHWFVTQRNFYEPQIITTDNTFVSGNCDVVIGIVNNTVYDPLQPELDSGGGGSDIIKLLNEQVNKEMQSSNLYMSMSSWCYTHSLDGAGLFLFDHAAEEYEHAKKLIIFLNENNVPVQLTSISAPEHKFEGLTQIFQKAYEHEQHISESINNIVDHAIKSKDHATFNFLQWYVAEQHEEEVLFKDILDKIELIGNENHGLYLADQYVKGIAKSRKS

SEQ ID NO: 8905 - protein, 1315 aa, Artificial Sequence
  SARS-CoV-2/Greece/16/2020__EPI_ISL_418265 spike protein (1-1147)(K986P_V987P_P1069F) Ferritin construct
MFVFLVLLPLVSSQCVNLTTRTQLPPAYTNSFTRGVYYPDKVFRSSVLHSTQDLFLPFFSNVTWFHAIHVSGTNGTKRFDNPVLPFNDGVYFASTEKSNIIRGWIFGTTLDSKTQSLLIVNNATNVVIKVCEFQFCNDPFLGVYYHKNNKSWMESEFRVYSSANNCTFEYVSQPFLMDLEGKQGNFKNLREFVFKNVDGYFKIYSKHTPINLVRDLPQGFSALEPLVDLPIGINITRFQTLLALHRSYLTPGDSSSGWTAGAAAYYVGYLQPRTFLLKYNENGTITDAVDCALDPLSETKCTLKSFTVEKGIYQTSNFRVQPTESIVRFPNITNLCPFGEVFNATRFASVYAWNRKRISNCVADYSVLYNSASFSTFKCYGVSPTKLNDLCFTNVYADSFVIRGDEVRQIAPGQTGKIADYNYKLPDDFTGCVIAWNSNNLDSKVGGNYNYLYRLFRKSNLKPFERDISTEIYQAGSTPCNGVEGFNCYFPLQSYGFQPTNGVGYQPYRVVVLSFELLHAPATVCGPKKSTNLVKNKCVNFNFNGLTGTGVLTESNKKFLPFQQFGRDIADTTDAVRDPQTLEILDITPCSFGGVSVITPGTNTSNQVAVLYQDVNCTEVPVAIHADQLTPTWRVYSTGSNVFQTRAGCLIGAEHVNNSYECDIPIGAGICASYQTQTNSPRRARSVASQSIIAYTMSLGAENSVAYSNNSIAIPTNFTISVTTEILPVSMTKTSVDCTMYICGDSTECSNLLLQYGSFCTQLNRALTGIAVEQDKNTQEVFAQVKQIYKTPPIKDFGGFNFSQILPDPSKPSKRSFIEDLLFNKVTLADAGFIKQYGDCLGDIAARDLICAQKFNGLTVLPPLLTDEMIAQYTSALLAGTITSGWTFGAGAALQIPFAMQMAYRFNGIGVTQNVLYENQKLIANQFNSAIGKIQDSLSSTASALGKLQDVVNQNAQALNTLVKQLSSNFGAISSVLNDILSRLDPPEAEVQIDRLITGRLQSLQTYVTQQLIRAAEIRASANLAATKMSECVLGQSKRVDFCGKGYHLMSFPQSAPHGVVFLHVTYVFAQEKNFTTAPAICHDGKAHFPREGVFVSNGTHWFVTQRNFYEPQIITTDNTFVSGNCDVVIGIVNNTVYDPLQPELDSGGGGSDIIKLLNEQVNKEMQSSNLYMSMSSWCYTHSLDGAGLFLFDHAAEEYEHAKKLIIFLNENNVPVQLTSISAPEHKFEGLTQIFQKAYEHEQHISESINNIVDHAIKSKDHATFNFLQWYVAEQHEEEVLFKDILDKIELIGNENHGLYLADQYVKGIAKSRKS

SEQ ID NO: 8906 - protein, 1315 aa, Artificial Sequence
  SARS-CoV-2/Iceland/319/2020__EPI_ISL_417648 spike protein (1-1147)(K986P_V987P_P1069F) Ferritin construct
MFVFLVLLPLVSSQCVNLTTRTQLPPAYTNSFTRGVYYPDKVFRSSVLHSTQDLFLPFFSNVTWFHAIHVSGTNGTKRFDNPVLPFNDGVYFASTEKSNIIRGWIFGTTLDSKTQSLLIVNNATNVVIKVCEFQFCNDPFLGVYYHKNNKSWMESEFRVYSSANNCTFEYVSQPFLIDLEGKQGNFKNLREFVFKNIDGYFKIYSKHTPINLVRDLPQGFSALEPLVDLPIGINITRFQTLLALHRSYLTPGDSSSGWTAGAAAYYVGYLQPRTFLLKYNENGTITDAVDCALDPLSETKCTLKSFTVEKGIYQTSNFRVQPTESIVRFPNITNLCPFGEVFNATRFASVYAWNRKRISNCVADYSVLYNSASFSTFKCYGVSPTKLNDLCFTNVYADSFVIRGDEVRQIAPGQTGKIADYNYKLPDDFTGCVIAWNSNNLDSKVGGNYNYLYRLFRKSNLKPFERDISTEIYQAGSTPCNGVEGFNCYFPLQSYGFQPTNGVGYQPYRVVVLSFELLHAPATVCGPKKSTNLVKNKCVNFNFNGLTGTGVLTESNKKFLPFQQFGRDIADTTDAVRDPQTLEILDITPCSFGGVSVITPGTNTSNQVAVLYQGVNCTEVPVAIHADQLTPTWRVYSTGSNVFQTRAGCLIGAEHVNNSYECDIPIGAGICASYQTQTNSPRRARSVASQSIIAYTMSLGAENSVAYSNNSIAIPTNFTISVTTEILPVSMTKTSVDCTMYICGDSTECSNLLLQYGSFCTQLNRALTGIAVEQDKNTQEVFAQVKQIYKTPPIKDFGGFNFSQILPDPSKPSKRSFIEDLLFNKVTLADAGFIKQYGDCLGDIAARDLICAQKFNGLTVLPPLLTDEMIAQYTSALLAGTITSGWTFGAGAALQIPFAMQMAYRFNGIGVTQNVLYENQKLIANQFNSAIGKIQDSLSSTASALGKLQDVVNQNAQALNTLVKQLSSNFGAISSVLNDILSRLDPPEAEVQIDRLITGRLQSLQTYVTQQLIRAAEIRASANLAATKMSECVLGQSKRVDFCGKGYHLMSFPQSAPHGVVFLHVTYVFAQEKNFTTAPAICHDGKAHFPREGVFVSNGTHWFVTQRNFYEPQIITTDNTFVSGNCDVVIGIVNNTVYDPLQPELDSGGGGSDIIKLLNEQVNKEMQSSNLYMSMSSWCYTHSLDGAGLFLFDHAAEEYEHAKKLIIFLNENNVPVQLTSISAPEHKFEGLTQIFQKAYEHEQHISESINNIVDHAIKSKDHATFNFLQWYVAEQHEEEVLFKDILDKIELIGNENHGLYLADQYVKGIAKSRKS

SEQ ID NO: 8907 - protein, 1315 aa, Artificial Sequence
  SARS-CoV-2/Congo/94/2020__EPI_ISL_417947 spike protein (1-1147)(K986P_V987P_P1069F) Ferritin construct
MFVFLVLLPLVSSQCVNLTTRTQLPPAYTNSFTRGVYYPDKVFRSSVLHSTQDLFLPFFSNVTWFHAIHVSGTNGTKRFDNPVLPFNDGVYFASTEKSNIIRGWIFGTTLDSKTQSLLIVNNATNVVIKVCEFQFCNDPFLGVYYHKNNKSWMESEFRVYSSANNCTFEYVSQPFLMDLEGKQGNFKNLREFVFKNIDGYFKIYSKHTPINLVRDLPQGFSALEPLVDLPIGINITRFQTLLALHRSYLTPGDSSSGWTAGAAAYYVGYLQPRTFLLKYNENGTITDAVDCALDPLSETKCTLKSFTVEKGIYQTSNFRVQPTESIVRFPNITNLCPFGEVFNATRFASVYAWNRKRISNCVADYSVLYNSASFSTFKCYGVSPTKLNDLCFTNVYADSFVIRGDEVRQIAPGQTGKIADYNYKLPDDFTGCVIAWNSNNLDSKVGGNYNYLYRLFRKSNLKPFERDISTEIYQAGSTPCNGVEGFNCYFPLQSYGFQPTNGVGYQPYRVVVLSFELLHAPATVCGPKKSTNLVKNKCVNFNFNGLTGTGVLTESNKKFLPFQQFGRDIADTTDAVRDPQTLEILDITPCSFGGVSVITPGTNTSNQVAVLYQGVNCTEVPVAIHADQLTPTWRVYSTGSNVFQTRAGCLIGAEHVNNSYECDIPIGAGICASYQTQTNSPRRARSVASQSIIAYTMSLGAENSVAYSNNSIAIPTNFTISVTTEILPVSMTKTSVDCTMYICGDSTECSNLLLQYGSFCTQLNRALTGIAVEQDKNTQEVFAQVKQIYKTPPIKDFGGFNFSQILPDPSKPSKRSFIEDILFNKVTLADAGFIKQYGDCLGDIAARDLICAQKFNGLTVLPPLLTDEMIAQYTSALLAGTITSGWTFGAGAALQIPFAMQMAYRFNGIGVTQNVLYENQKLIANQFNSAIGKIQDSLSSTASALGKLQDVVNQNAQALNTLVKQLSSNFGAISSVLNDILSRLDPPEAEVQIDRLITGRLQSLQTYVTQQLIRAAEIRASANLAATKMSECVLGQSKRVDFCGKGYHLMSFPQSAPHGVVFLHVTYVFAQEKNFTTAPAICHDGKAHFPREGVFVSNGTHWFVTQRNFYEPQIITTDNTFVSGNCDVVIGIVNNTVYDPLQPELDSGGGGSDIIKLLNEQVNKEMQSSNLYMSMSSWCYTHSLDGAGLFLFDHAAEEYEHAKKLIIFLNENNVPVQLTSISAPEHKFEGLTQIFQKAYEHEQHISESINNIVDHAIKSKDHATFNFLQWYVAEQHEEEVLFKDILDKIELIGNENHGLYLADQYVKGIAKSRKS

SEQ ID NO: 8908 - protein, 1315 aa, Artificial Sequence
  SARS-CoV-2/Congo/158/2020__EPI_ISL_417950 spike protein (1-1147)(K986P_V987P_P1069F) Ferritin construct
MFVFLVLLPLVSSQCVNLTTRTQLPPAYTNSFTRGVYYPDKVFRSSVLHSTQDLFLPFFSNVTWFHAIHVSGTNGTKRFDNPVLPFNDGVYFASTEKSNIIRGWIFGTTLDSKTQSLLIVNNATNVVIKVCEFQFCNDPFLGVYYHKNNKSWMESEFRVYSSANNCTFEYVSQPFLMDLEGKQGNFKNLREFVFKNIDGYFKIYSKHTPINLVRDLPQGFSALEPLVDLPIGINITRFQTLLALHRSYLTPGDSSSGWTAGAAAYYVGYLQPRTFLLKYNENGTITDAVDCALDPLSETKCTLKSFTVEKGIYQTSNFRVQPTESIVRFPNITNLCPFGEVFNATRFASVYAWNRKRISNCVADYSVLYNSASFSTFKCYGVSPTKLNDLCFTNVYADSFVIRGDEVRQIAPGQTGKIADYNYKLPDDFTGCVIAWNSNNLDSKVGGNYNYLYRLFRKSNLKPFERDISTEIYQAGSTPCNGVEGFNCYFPLQSYGFQPTNGVGYQPYRVVVLSFELLHAPATVCGPKKSTNLVKNKCVNFNFNGLTGTGVLTESNKKFLPFQQFGRDIADTTDAVRDPQTLEILDITPCSFGGVSVITPGTNTSNQVAVLYQDVNCTEVPVAIHADQLTPTWRVYSTGSNVFQTRAGCLIGAEHVNNSYECDIPIGAGICASYQTQTNSPRRARSVASQSIIAYTMSLGAENSVAYSNNSIAIPTNFTISVTTEILPVSMTKTSVDCTMYICGDSTECSNLLLQYGSFCTQLNRALTGIAVEQDKNTQEVFAQVKQIYKTPPIKDFGGFNFSQILPDPSKPSKRSFIEDLLFNKVTLADAGFIKQYGDCLGDIAARDLICAQKFNGLTVLPPLLTDEMIAQYTSALLAGTITSGWTFGAGAALQIPFAMQMAYRFNGIGVTQNVLYENQKLIANQFNSAIGKIQDSLSSTASALGKLQDVVNQNAQALNTLVKQLSSNFGAISSVLNDILSRLDPPEAEVQIDRLITGRLQSLQTYVTQQLIRAAEIRASANLAATKMSECVLGQSKRVDFCGKGYHLMSFPQSAPHGVVFLHVTYVFAQEKNFTTAPAICHDGKAHFPREGVFVSNGTHWFVTQRNFYEPQIITTDNTFLSGNCDVVIGIVNNTVYDPLQPELDSGGGGSDIIKLLNEQVNKEMQSSNLYMSMSSWCYTHSLDGAGLFLFDHAAEEYEHAKKLIIFLNENNVPVQLTSISAPEHKFEGLTQIFQKAYEHEQHISESINNIVDHAIKSKDHATFNFLQWYVAEQHEEEVLFKDILDKIELIGNENHGLYLADQYVKGIAKSRKS

SEQ ID NO: 8909 - protein, 1315 aa, Artificial Sequence
  SARS-CoV-2/USA/UT-00034/2020__EPI_ISL_417977 spike protein (1-1147)(K986P_V987P_P1069F) Ferritin construct
MFVFLVLLPLVSSQCVNLTTRTQLPPAYTNSFTRGVYYPDKVFRSSVLHSTQDLFLPFFSNVTWFHAIHVSGTNGTKRFDNPVLPFNDGVYFASTEKSNIIRGWIFGTTLDSKTQSLLIVNNATNVVIKVCEFQFCNDPFLGVYYYKNNKSWMESEFRVYSSANNCTFEYVSQPFLMDLEGKQGNFKNLREFVFKNIDGYFKIYSKHTPINLVRDLPQGFSALEPLVDLPIGINITRFQTLLALHRSYLTPGDSSSGWTAGAAAYYVGYLQPRTFLLKYNENGTITDAVDCALDPLSETKCTLKSFTVEKGIYQTSNFRVQPTESIVRFPNITNLCPFGEVFNATRFASVYAWNRKRISNCVADYSVLYNSASFSTFKCYGVSPTKLNDLCFTNVYADSFVIRGDEVRQIAPGQTGKIADYNYKLPDDFTGCVIAWNSNNLDSKVGGNYNYLYRLFRKSNLKPFERDISTEIYQAGSTPCNGVEGFNCYFPLQSYGFQPTNGVGYQPYRVVVLSFELLHAPATVCGPKKSTNLVKNKCVNFNFNGLTGTGVLTESNKKFLPFQQFGRDIADTTDAVRDPQTLEILDITPCSFGGVSVITPGTNTSNQVAVLYQGVNCTEVPVAIHADQLTPTWRVYSTGSNVFQTRAGCLIGAEHVNNSYECDIPIGAGICASYQTQTNSPRRARSVASQSIIAYTMSLGAENSVAYSNNSIAIPTNFTISVTTEILPVSMTKTSVDCTMYICGDSTECSNLLLQYGSFCTQLNRALTGIAVEQDKNTQEVFAQVKQIYKTPPIKDFGGFNFSQILPDPSKPSKRSFIEDLLFNKVTLADAGFIKQYGDCLGDIAARDLICAQKFNGLTVLPPLLTDEMIAQYTSALLAGTITSGWTFGAGAALQIPFAMQMAYRFNGIGVTQNVLYENQKLIANQFNSAIGKIQDSLSSTASALGKLQDVVNQNAQALNTLVKQLSSNFGAISSVLNDILSRLDPPEAEVQIDRLITGRLQSLQTYVTQQLIRAAEIRASANLAATKMSECVLGQSKRVDFCGKGYHLMSFPQSAPHGVVFLHVTYVFAQEKNFTTAPAICHDGKAHFPREGVFVSNGTHWFVTQRNFYEPQIITTDNTFVSGNCDVVIGIVNNTVYDPLQPELDSGGGGSDIIKLLNEQVNKEMQSSNLYMSMSSWCYTHSLDGAGLFLFDHAAEEYEHAKKLIIFLNENNVPVQLTSISAPEHKFEGLTQIFQKAYEHEQHISESINNIVDHAIKSKDHATFNFLQWYVAEQHEEEVLFKDILDKIELIGNENHGLYLADQYVKGIAKSRKS

SEQ ID NO: 8910 - protein, 1315 aa, Artificial Sequence
  SARS-CoV-2/USA/UT-00033/2020__EPI_ISL_417976 spike protein (1-1147)(K986P_V987P_P1069F) Ferritin construct
MFVFLVLLPLVSSQCVNLTTRTQLPPAYTNSFTRGVYYPDKVFRSSVLHSTQDLFLPFFSNVTWFHAIHVSGTNGTKRFDNPVLPFNDGVYFASTEKSNIIRGWIFGTTLDSKTQSLLIVNNATNVVIKVCEFQFCNDPFLGVYYHKNNKSWMESEFRVYSSANNCTFEYVSQPFLMDLEGKQGNFKNLREFVFKNIDGYFKIYSKHTPINLVRDLPQGFSALEPLVDLPIGINITRFQTLLALHRSYLTPGDSSSGLTAGAAAYYVGYLQPRTFLLKYNENGTITDAVDCALDPLSETKCTLKSFTVEKGIYQTSNFRVQPTESIVRFPNITNLCPFGEVFNATRFASVYAWNRKRISNCVADYSVLYNSASFSTFKCYGVSPTKLNDLCFTNVYADSFVIRGDEVRQIAPGQTGKIADYNYKLPDDFTGCVIAWNSNNLDSKVGGNYNYLYRLFRKSNLKPFERDISTEIYQAGSTPCNGVEGFNCYFPLQSYGFQPTNGVGYQPYRVVVLSFELLHAPATVCGPKKSTNLVKNKCVNFNFNGLTGTGVLTESNKKFLPFQQFGRDIADTTDAVRDPQTLEILDITPCSFGGVSVITPGTNTSNQVAVLYQGVNCTEVPVAIHADQLTPTWRVYSTGSNVFQTRAGCLIGAEHVNNSYECDIPIGAGICASYQTQTNSPRRARSVASQSIIAYTMSLGAENSVAYSNNSIAIPTNFTISVTTEILPVSMTKTSVDCTMYICGDSTECSNLLLQYGSFCTQLNRALTGIAVEQDKNTQEVFAQVKQIYKTPPIKDFGGFNFSQILPDPSKPSKRSFIEDLLFNKVTLADAGFIKQYGDCLGDIAARDLICAQKFNGLTVLPPLLTDEMIAQYTSALLAGTITSGWTFGAGAALQIPFAMQMAYRFNGIGVTQNVLYENQKLIANQFNSAIGKIQDSLSSTASALGKLQDVVNQNAQALNTLVKQLSSNFGAISSVLNDILSRLDPPEAEVQIDRLITGRLQSLQTYVTQQLIRAAEIRASANLAATKMSECVLGQSKRVDFCGKGYHLMSFPQSAPHGVVFLHVTYVFAQEKNFTTAPAICHDGKAHFPREGVFVSNGTHWFVTQRNFYEPQIITTDNTFVSGNCDVVIGIVNNTVYDPLQPELDSGGGGSDIIKLLNEQVNKEMQSSNLYMSMSSWCYTHSLDGAGLFLFDHAAEEYEHAKKLIIFLNENNVPVQLTSISAPEHKFEGLTQIFQKAYEHEQHISESINNIVDHAIKSKDHATFNFLQWYVAEQHEEEVLFKDILDKIELIGNENHGLYLADQYVKGIAKSRKS

SEQ ID NO: 8911 - protein, 1315 aa, Artificial Sequence
  SARS-CoV-2/USA/WI-13/2020__EPI_ISL_417516 spike protein (1-1147)(K986P_V987P_P1069F) Ferritin construct
MFVFLVLLPLVSSQCVNLTTRTQLPPAYTNSFTRGVYYPDKVFRSSVLHSTQDLFLPFFSNVTWFHAIHVSGTNGTKRFDNPVLPFNDGVYFASTEKSNIIRGWIFGTTLDSKTQSLLIVNNATNVVIKVCEFQFCNDPFLGVYYHKNNKSWMESEFRVYSSANNCTFEYVSQPFLMDLEGKQGNFKNLREFVFKNIDGYFKIYSKHTPINLVRDLPQGFSALEPLVDLPIGINITRFQTLLALHRSYLTPGDSSSGWTAGAAAYYVGYLQPRTFLLKYNENGTITDAVDCALDPLSETKCTLKSFTVEKGIYQTSNFRVLPTESIVRFPNITNLCPFGEVFNATRFASVYAWNRKRISNCVADYSVLYNSASFSTFKCYGVSPTKLNDLCFTNVYADSFVIRGDEVRQIAPGQTGKIADYNYKLPDDFTGCVIAWNSNNLDSKVGGNYNYLYRLFRKSNLKPFERDISTEIYQAGSTPCNGVEGFNCYFPLQSYGFQPTNGVGYQPYRVVVLSFELLHAPATVCGPKKSTNLVKNKCVNFNFNGLTGTGVLTESNKKFLPFQQFGRDIADTTDAVRDPQTLEILDITPCSFGGVSVITPGTNTSNQVAVLYQGVNCTEVPVAIHADQLTPTWRVYSTGSNVFQTRAGCLIGAEHVNNSYECDIPIGAGICASYQTQTNSPRRARSVASQSIIAYTMSLGAENSVAYSNNSIAIPTNFTISVTTEILPVSMTKTSVDCTMYICGDSTECSNLLLQYGSFCTQLNRALTGIAVEQDKNTQEVFAQVKQIYKTPPIKDFGGFNFSQILPDPSKPSKRSFIEDLLFNKVTLADAGFIKQYGDCLGDIAARDLICAQKFNGLTVLPPLLTDEMIAQYTSALLAGTITSGWTFGAGAALQIPFAMQMAYRFNGIGVTQNVLYENQKLIANQFNSAIGKIQDSLSSTASALGKLQDVVNQNAQALNTLVKQLSSNFGAISSVLNDILSRLDPPEAEVQIDRLITGRLQSLQTYVTQQLIRAAEIRASANLAATKMSECVLGQSKRVDFCGKGYHLMSFPQSAPHGVVFLHVTYVFAQEKNFTTAPAICHDGKAHFPREGVFVSNGTHWFVTQRNFYEPQIITTDNTFVSGNCDVVIGIVNNTVYDPLQPELDSGGGGSDIIKLLNEQVNKEMQSSNLYMSMSSWCYTHSLDGAGLFLFDHAAEEYEHAKKLIIFLNENNVPVQLTSISAPEHKFEGLTQIFQKAYEHEQHISESINNIVDHAIKSKDHATFNFLQWYVAEQHEEEVLFKDILDKIELIGNENHGLYLADQYVKGIAKSRKS

SEQ ID NO: 8912 - protein, 1314 aa, Artificial Sequence
  SARS-CoV-2/India/1-27/2020__EPI_ISL_413522 spike protein (1-1146)(K985P_V986P_P1068F) Ferritin construct
MFVFLVLLPLVSSQCVNLTTRTQLPPAYTNSFTRGVYYPDKVFRSSVLHSTQDLFLPFFSNVTWFHAIHVSGTNGTKRFDNPVLPFNDGVYFASTEKSNIIRGWIFGTTLDSKTQSLLIVNNATNVVIKVCEFQFCNDPFLGVYHKNNKSWMESEFRVYSSANNCTFEYVSQPFLMDLEGKQGNFKNLREFVFKNIDGYFKIYSKHTPINLVRDLPQGFSALEPLVDLPIGINITRFQTLLALHRSYLTPGDSSSGWTAGAAAYYVGYLQPRTFLLKYNENGTITDAVDCALDPLSETKCTLKSFTVEKGIYQTSNFRVQPTESIVRFPNITNLCPFGEVFNATRFASVYAWNRKRISNCVADYSVLYNSASFSTFKCYGVSPTKLNDLCFTNVYADSFVIRGDEVIQIAPGQTGKIADYNYKLPDDFTGCVIAWNSNNLDSKVGGNYNYLYRLFRKSNLKPFERDISTEIYQAGSTPCNGVEGFNCYFPLQSYGFQPTNGVGYQPYRVVVLSFELLHAPATVCGPKKSTNLVKNKCVNFNFNGLTGTGVLTESNKKFLPFQQFGRDIADTTDAVRDPQTLEILDITPCSFGGVSVITPGTNTSNQVAVLYQDVNCTEVPVAIHADQLTPTWRVYSTGSNVFQTRAGCLIGAEHVNNSYECDIPIGAGICASYQTQTNSPRRARSVASQSIIAYTMSLGAENSVAYSNNSIAIPTNFTISVTTEILPVSMTKTSVDCTMYICGDSTECSNLLLQYGSFCTQLNRALTGIAVEQDKNTQEVFAQVKQIYKTPPIKDFGGFNFSQILPDPSKPSKRSFIEDLLFNKVTLADAGFIKQYGDCLGDIAARDLICAQKFNGLTVLPPLLTDEMIAQYTSALLAGTITSGWTFGAGAALQIPFAMQMAYRFNGIGVTQNVLYENQKLIANQFNSAIGKIQDSLSSTASALGKLQDVVNQNAQALNTLVKQLSSNFGAISSVLNDILSRLDPPEAEVQIDRLITGRLQSLQTYVTQQLIRAAEIRASANLAATKMSECVLGQSKRVDFCGKGYHLMSFPQSAPHGVVFLHVTYVFAQEKNFTTAPAICHDGKAHFPREGVFVSNGTHWFVTQRNFYEPQIITTDNTFVSGNCDVVIGIVNNTVYDPLQPELDSGGGGSDIIKLLNEQVNKEMQSSNLYMSMSSWCYTHSLDGAGLFLFDHAAEEYEHAKKLIIFLNENNVPVQLTSISAPEHKFEGLTQIFQKAYEHEQHISESINNIVDHAIKSKDHATFNFLQWYVAEQHEEEVLFKDILDKIELIGNENHGLYLADQYVKGIAKSRKS

SEQ ID NO: 8913 - protein, 1309 aa, Artificial Sequence
  SARS-CoV-2/pangolin/Guangxi/P4L/2017__EPI_ISL_410538 spike protein (1-1141)(K980P_V981P_P1063F) Ferritin construct
MFVFLFVLPLVSSQCVNLTTRTGIPPGYTNSSTRGVYYPDKVFRSSILHLTQDLFLPFFSNVTWFNTINYQGGFKKFDNPVLPFNDGVYFASTEKSNIIRGWIFGTTLDARTQSLLIVNNATNVVIKVCEFQFCTDPFLGVYYHNNNKTWVENEFRVYSSANNCTFEYISQPFLMDLEGKQGNFKNLREFVFKNVDGYFKIYSKHTPIDLVRDLPRGFAALEPLVDLPIGINITRFQTLLALHRSYLTPGNLESGWTTGAAAYYVGYLQQRTFLLSYNQNGTITDAVDCSLDPLSETKCTLKSLTVEKGIYQTSNFRVQPTISIVRFPNITNLCPFGEVFNASKFASVYAWNRKRISNCVADYSVLYNSTSFSTFKCYGVSPTKLNDLCFTNVYADSFVVKGDEVRQIAPGQTGVIADYNYKLPDDFTGCVIAWNSVKQDALTGGNYGYLYRLFRKSKLKPFERDISTEIYQAGSTPCNGQVGLNCYYPLERYGFHPTTGVNYQPFRVVVLSFELLNGPATVCGPKLSTTLVKDKCVNFNFNGLTGTGVLTTSKKQFLPFQQFGRDISDTTDAVRDPQTLEILDITPCSFGGVSVITPGTNTSNQVAVLYQDVNCTEVPMAIHAEQLTPAWRVYSAGANVFQTRAGCLVGAEHVNNSYECDIPVGAGICASYHSMSSLRSVNQRSIIAYTMSLGAENSVAYSNNSIAIPTNFTISVTTEILPVSMTKTSVDCTMYICGDSIECSNLLLQYGSFCTQLNRALTGIAVEQDKNTQEVFAQVKQIYKTPPIKDFGGFNFSQILPDPSKPSKRSFIEDLLFNKVTLADAGFIKQYGDCLGDIAARDLICAQKFNGLTVLPPLLTDEMIAQYTSALLAGTITSGWTFGAGAALQIPFAMQMAYRFNGIGVTQNVLYENQKLIANQFNSAIGKIQDSLSSTASALGKLQDVVNQNAQALNTLVKQLSSNFGAISSVLNDILSRLDPPEAEVQIDRLITGRLQSLQTYVTQQLIRAAEIRASANLAATKMSECVLGQSKRVDFCGKGYHLMSFPQSAPHGVVFLHVTYVFAQEKNFTTAPAICHEGKAHFPREGVFVSNGTHWFITQRNFYEPQIITTDNTFVSGSCDVVIGIVNNTVYDPLQPELDSGGGGSDIIKLLNEQVNKEMQSSNLYMSMSSWCYTHSLDGAGLFLFDHAAEEYEHAKKLIIFLNENNVPVQLTSISAPEHKFEGLTQIFQKAYEHEQHISESINNIVDHAIKSKDHATFNFLQWYVAEQHEEEVLFKDILDKIELIGNENHGLYLADQYVKGIAKSRKS

SEQ ID NO: 8914 - protein, 1309 aa, Artificial Sequence
  SARS-CoV-2/pangolin/Guangxi/P5L/2017__EPI_ISL_410540 spike protein (1-1141)(K980P_V981P_P1063F) Ferritin construct
MFVFLFVLPLVSSQCVNLTTRTGIPPGYTNSSTRGVYYPDKVFRSSILHLTQDLFLPFFSNVTWFNTINYQGGFKKFDNPVLPFNDGVYFASTEKSNIIRGWIFGTTLDARTQSLLIVNNATNVVIKVCEFQFCTDPFLGVYYHNNNKTWVENEFRVYSSANNCTFEYISQPFLMDLEGKQGNFKNLREFVFKNVDGYFKIYSKHTPIDLVRDLPRGFAALEPLVDLPIGINITRFQTLLALHRSYLTPGKLESGWTTGAAAYYVGYLQQRTFLLSYNQNGTITDAVDCSLDPLSETKCTLKSLTVEKGIYQTSNFRVQPTISIVRFPNITNLCPFGEVFNASKFASVYAWNRKRISNCVADYSVLYNSTSFSTFKCYGVSPTKLNDLCFTNVYADSFVVKGDEVRQIAPGQTGVIADYNYKLPDDFTGCVIAWNSVKQDALTGGNYGYLYRLFRKSKLKPFERDISTEIYQAGSTPCNGQVGLNCYYPLERYGFHPTTGVNYQPFRVVVLSFELLNGPATVCGPKLSTTLVKDKCVNFNFNGLTGTGVLTTSKKQFLPFQQFGRDISDTTDAVRDPQTLEILDITPCSFGGVSVITPGTNTSNQVAVLYQDVNCTEVPMAIHAEQLTPAWRVYSAGANVFQTRAGCLVGAEHVNNSYECDIPVGAGICASYHSMSSFRSVNQRSIIAYTMSLGAENSVAYSNNSIAIPTNFTISVTTEILPVSMTKTSVDCTMYICGDSIECSNLLLQYGSFCTQLNRALTGIAVEQDKNTQEVFAQVKQIYKTPPIKDFGGFNFSQILPDPSKPSKRSFIEDLLFNKVTLADAGFIKQYGDCLGDIAARDLICAQKFNGLTVLPPLLTDEMIAQYTSALLAGTITSGWTFGAGAALQIPFAMQMAYRFNGIGVTQNVLYENQKLIANQFNSAIGKIQDSLSSTASALGKLQDVVNQNAQALNTLVKQLSSNFGAISSVLNDILSRLDPPEAEVQIDRLITGRLQSLQTYVTQQLIRAAEIRASANLAATKMSECVLGQSKRVDFCGKGYHLMSFPQSAPHGVVFLHVTYVFAQEKNFTTAPAICHEGKAHFPREGVFVSNGTHWFITQRNFYEPQIITTDNTFVSGSCDVVIGIVNNTVYDPLQPELDSGGGGSDIIKLLNEQVNKEMQSSNLYMSMSSWCYTHSLDGAGLFLFDHAAEEYEHAKKLIIFLNENNVPVQLTSISAPEHKFEGLTQIFQKAYEHEQHISESINNIVDHAIKSKDHATFNFLQWYVAEQHEEEVLFKDILDKIELIGNENHGLYLADQYVKGIAKSRKS

SEQ ID NO: 8915 - protein, 1309 aa, Artificial Sequence
  SARS-CoV-2/pangolin/Guangxi/P5E/2017__EPI_ISL_410541 spike protein (1-1141)(K980P_V981P_P1063F) Ferritin construct
MFVFLFVLPLVSSQCVNLTTRTGIPPGYTNSSTRGVYYPDKVFRSSILHLTQDLFLPFFSNVTWFNTITYQGGSKKFDNPVLPFNDGVYFASTEKSNIIRGWIFGTTLDARTQSLLIVNNATNVVIKVCEFQFCTDPFLGVYYHNNNKTWVENEFRVYSSANNCTFEYISQPFLMDLEGKQGNFKNLREFVFKNVDGYFKIYSKHTPIDLVRDLPRGFAALEPLVDLPIGINITRFQTLLALHRSYLTPGKLESGWTTGAAAYYVGYLQQRTFLLSYNQNGTITDAVDCSLDPLSETKCTLKSLTVEKGIYQTSNFRVQPTISIVRFPNITNLCPFGEVFNASKFASVYAWNRKRISNCVADYSVLYNSTSFSTFKCYGVSPTKLNDLCFTNVYADSFVVKGDEVRQIAPGQTGVIADYNYKLPDDFTGCVIAWNSVKQDALTGDNYGYLYRLFRKSKLKPFERDISTEIYQAGSTPCNGQVGLNCYYPLERYGFHPTTGVNYQPFRVVVLSFELLNGPATVCGPKLSTTLVKDKCVNFNFNGLTGTGVLTTSKKQFLPFQQFGRDISDTTDAVRDPQTLEILDITPCSFGGVSVITPGTNTSNQVAVLYQDVNCTEVPMAIHAEQLTPAWRVYSAGANVFQTRAGCLVGAEHVNNSYECDIPVGAGICASYHSMSSFRSVNQRSIIAYTMSLGAENSVAYSNNSIAIPTNFTISVTTEILPVSMTKTSVDCTMYICGDSIECSNLLLQYGSFCTQLNRALTGIAVEQDKNTQEVFAQVKQIYKTPPIKDFGGFNFSQILPDPSKPSKRSFIEDLLFNKVTLADAGFIKQYGDCLGDIAARDLICAQKFNGLTVLPPLLTDEMIAQYTSALLAGTITSGWTFGAGAALQIPFAMQMAYRFNGIGVTQNVLYENQKLIANQFNSAIGKIQDSLSSTASALGKLQDVVNQNAQALNTLVKQLSSNFGAISSVLNDILSRLDPPEAEVQIDRLITGRLQSLQTYVTQQLIRAAEIRASANLAATKMSECVLGQSKRVDFCGKGYHLMSFPQSAPHGVVFLHVTYVFAQEKNFTTAPAICHEGKAHFPREGVFVSNGTHWFITQRNFYEPQIITTDNTFVSGSCDVVIGIVNNTVYDPLQPELDSGGGGSDIIKLLNEQVNKEMQSSNLYMSMSSWCYTHSLDGAGLFLFDHAAEEYEHAKKLIIFLNENNVPVQLTSISAPEHKFEGLTQIFQKAYEHEQHISESINNIVDHAIKSKDHATFNFLQWYVAEQHEEEVLFKDILDKIELIGNENHGLYLADQYVKGIAKSRKS

SEQ ID NO: 8916 - protein, 1307 aa, Artificial Sequence
  SARS-CoV-2/pangolin/Guangxi/P1E/2017__EPI_ISL_410539 spike protein (1-1139)(K978P_V979P_P1061F) Ferritin construct
MFVFLFVLPLVSSQCVNLTTRTGIQPGYTNSSTRGVYYPDKVFRSSILHLTQDLFLPFFSNVTWFNTINYQGGFKKFDNPVLPFNDGVYFASTEKSNIIRGWIFGTTLDARTQSLLIVNNATNVVIKVCEFQFCTDPFLGVYYHNNNKTWVENEFRVYSSANNCTFEYISQPFLMDLEGKQGNFKNLREFVFKNVDGYFKIYSKHTPIDLVRDLPRGFAALEPLVDLPIGINITRFQTLLALHRSYLTPGKLESGWTTGAAAYYVGYLQQRTFLLSYNQNGTITDAVDCSLDPLSETKCTLKSLTVEKGIYQTSNFRVQPTISIVRFPNITNLCPFGEVFNASKFASVYAWNRKRISNCVADYSVLYNSTSFSTFKCYGVSPTKLNDLCFTNVYADSFVVKGDEVRQIAPGQTGVIADYNYKLPDDFTGCVIAWNSVKQDALTGGNYLYRLFRKSKLKPFERDISTEIYQAGSTPCNGQVGLNCYYPLERYGFHPTTGVNYQPFRVVVLSFELLNGPATVCGPKLSTTLVKDKCVNFNFNGLTGTGVLTTSKKQFLPFQQFGRDISDTTDAVRDPQTLEILDITPCSFGGVSVITPGTNTSNQVAVLYQDVNCTEVPMAIHAEQLTPAWRVYSAGANVFQTRAGCLVGAEHVNNSYECDIPVGAGICASYHSMSSLRSVNQRSIIAYTMSLGAENSVAYSNNSIAIPTNFTISVTTEILPVSMTKTSVDCTMYICGDSIECSNLLLQYGSFCTQLNRALTGIAVEQDKNTQEVFAQVKQIYKTPPIKDFGGFNFSQILPDPSKPSKRSFIEDLLFNKVTLADAGFIKQYGDCLGDIAARDLICAQKFNGLTVLPPLLTDEMIAQYTSALLAGTITSGWTFGAGAALQIPFAMQMAYRFNGIGVTQNVLYENQKLIANQFNSAIGKIQDSLSSTASALGKLQDVVNQNAQALNTLVKQLSSNFGAISSVLNDILSRLDPPEAEVQIDRLITGRLQSLQTYVTQQLIRAAEIRASANLAATKMSECVLGQSKRVDFCGKGYHLMSFPQSAPHGVVFLHVTYVFAQEKNFTTAPAICHEGKAHFPREGVFVSNGTHWFITQRNFYEPQIITTDNTFVSGSCDVVIGIVNNTVYDPLQPELDSGGGGSDIIKLLNEQVNKEMQSSNLYMSMSSWCYTHSLDGAGLFLFDHAAEEYEHAKKLIIFLNENNVPVQLTSISAPEHKFEGLTQIFQKAYEHEQHISESINNIVDHAIKSKDHATFNFLQWYVAEQHEEEVLFKDILDKIELIGNENHGLYLADQYVKGIAKSRKS

SEQ ID NO: 8917 - protein, 1315 aa, Artificial Sequence
  SARS-CoV-2/Wuhan/WIV05/2019__EPI_ISL_402128 spike protein (1-1147)(K986P_V987P_ H1048Q_H1064N_ H1083N_H1101N) Ferritin construct
MFVFLVLLPLVSSQCVNLTTRTQLPPAYTNSFTRGVYYPDKVFRSSVLHSTQDLFLPFFSNVTWFHAIHVSGTNGTKRFDNPVLPFNDGVYFASTEKSNIIRGWIFGTTLDSKTQSLLIVNNATNVVIKVCEFQFCNDPFLGVYYHKNNKSWMESEFRVYSSANNCTFEYVSQPFLMDLEGKQGNFKNLREFVFKNIDGYFKIYSKHTPINLVRDLPQGFSALEPLVDLPIGINITRFQTLLALHRSYLTPGDSSSGWTAGAAAYYVGYLQPRTFLLKYNENGTITDAVDCALDPLSETKCTLKSFTVEKGIYQTSNFRVQPTESIVRFPNITNLCPFGEVFNATRFASVYAWNRKRISNCVADYSVLYNSASFSTFKCYGVSPTKLNDLCFTNVYADSFVIRGDEVRQIAPGQTGKIADYNYKLPDDFTGCVIAWNSNNLDSKVGGNYNYLYRLFRKSNLKPFERDISTEIYQAGSTPCNGVEGFNCYFPLQSYGFQPTNGVGYQPYRVVVLSFELLHAPATVCGPKKSTNLVKNKCVNFNFNGLTGTGVLTESNKKFLPFQQFGRDIADTTDAVRDPQTLEILDITPCSFGGVSVITPGTNTSNQVAVLYQDVNCTEVPVAIHADQLTPTWRVYSTGSNVFQTRAGCLIGAEHVNNSYECDIPIGAGICASYQTQTNSPRRARSVASQSIIAYTMSLGAENSVAYSNNSIAIPTNFTISVTTEILPVSMTKTSVDCTMYICGDSTECSNLLLQYGSFCTQLNRALTGIAVEQDKNTQEVFAQVKQIYKTPPIKDFGGFNFSQILPDPSKPSKRSFIEDLLFNKVTLADAGFIKQYGDCLGDIAARDLICAQKFNGLTVLPPLLTDEMIAQYTSALLAGTITSGWTFGAGAALQIPFAMQMAYRFNGIGVTQNVLYENQKLIANQFNSAIGKIQDSLSSTASALGKLQDVVNQNAQALNTLVKQLSSNFGAISSVLNDILSRLDPPEAEVQIDRLITGRLQSLQTYVTQQLIRAAEIRASANLAATKMSECVLGQSKRVDFCGKGYQLMSFPQSAPHGVVFLNVTYVPAQEKNFTTAPAICNDGKAHFPREGVFVSNGTNWFVTQRNFYEPQIITTDNTFVSGNCDVVIGIVNNTVYDPLQPELDSGGGGSDIIKLLNEQVNKEMQSSNLYMSMSSWCYTHSLDGAGLFLFDHAAEEYEHAKKLIIFLNENNVPVQLTSISAPEHKFEGLTQIFQKAYEHEQHISESINNIVDHAIKSKDHATFNFLQWYVAEQHEEEVLFKDILDKIELIGNENHGLYLADQYVKGIAKSRKS

SEQ ID NO: 8918 - protein, 1311 aa, Artificial Sequence
  SARS-CoV-2/bat/Yunnan/RaTG13/2013__EPI_ISL_402131 spike protein (1-1143)(K982P_V983P_ H1044Q_H1060N_ H1079N_H1097N) Ferritin construct
MFVFLVLLPLVSSQCVNLTTRTQLPPAYTNSSTRGVYYPDKVFRSSVLHLTQDLFLPFFSNVTWFHAIHVSGTNGIKRFDNPVLPFNDGVYFASTEKSNIIRGWIFGTTLDSKTQSLLIVNNATNVVIKVCEFQFCNDPFLGVYYHKNNKSWMESEFRVYSSANNCTFEYVSQPFLMDLEGKQGNFKNLREFVFKNIDGYFKIYSKHTPINLVRDLPPGFSALEPLVDLPIGINITRFQTLLALHRSYLTPGDSSSGWTAGAAAYYVGYLQPRTFLLKYNENGTITDAVDCALDPLSETKCTLKSFTVEKGIYQTSNFRVQPTDSIVRFPNITNLCPFGEVFNATTFASVYAWNRKRISNCVADYSVLYNSTSFSTFKCYGVSPTKLNDLCFTNVYADSFVITGDEVRQIAPGQTGKIADYNYKLPDDFTGCVIAWNSKHIDAKEGGNFNYLYRLFRKANLKPFERDISTEIYQAGSKPCNGQTGLNCYYPLYRYGFYPTDGVGHQPYRVVVLSFELLNAPATVCGPKKSTNLVKNKCVNFNFNGLTGTGVLTESNKKFLPFQQFGRDIADTTDAVRDPQTLEILDITPCSFGGVSVITPGTNASNQVAVLYQDVNCTEVPVAIHADQLTPTWRVYSTGSNVFQTRAGCLIGAEHVNNSYECDIPIGAGICASYQTQTNSRSVASQSIIAYTMSLGAENSVAYSNNSIAIPTNFTISVTTEILPVSMTKTSVDCTMYICGDSTECSNLLLQYGSFCTQLNRALTGIAVEQDKNTQEVFAQVKQIYKTPPIKDFGGFNFSQILPDPSKPSKRSFIEDLLFNKVTLADAGFIKQYGDCLGDIAARDLICAQKFNGLTVLPPLLTDEMIAQYTSALLAGTITSGWTFGAGAALQIPFAMQMAYRFNGIGVTQNVLYENQKLIANQFNSAIGKIQDSLSSTASALGKLQDVVNQNAQALNTLVKQLSSNFGAISSVLNDILSRLDPPEAEVQIDRLITGRLQSLQTYVTQQLIRAAEIRASANLAATKMSECVLGQSKRVDFCGKGYQLMSFPQSAPHGVVFLNVTYVPAQEKNFTTAPAICNDGKAHFPREGVFVSNGTNWFVTQRNFYEPQIITTDNTFVSGSCDVVIGIVNNTVYDPLQPELDSGGGGSDIIKLLNEQVNKEMQSSNLYMSMSSWCYTHSLDGAGLFLFDHAAEEYEHAKKLIIFLNENNVPVQLTSISAPEHKFEGLTQIFQKAYEHEQHISESINNIVDHAIKSKDHATFNFLQWYVAEQHEEEVLFKDILDKIELIGNENHGLYLADQYVKGIAKSRKS

SEQ ID NO: 8919 - protein, 1315 aa, Artificial Sequence
  SARS-CoV-2/Wuhan/HBCDC-HB-01/2019__EPI_ISL_402132 spike protein (1-1147)(K986P_V987P_ H1048Q_H1064N_ H1083N_H1101N) Ferritin construct
MFVFLVLLPLVSSQCVNLTTRTQLPPAYTNSITRGVYYPDKVFRSSVLHSTQDLFLPFFSNVTWFHAIHVSGTNGTKRFDNPVLPFNDGVYFASTEKSNIIRGWIFGTTLDSKTQSLLIVNNATNVVIKVCEFQFCNDPFLGVYYHKNNKSWMESEFRVYSSANNCTFEYVSQPFLMDLEGKQGNFKNLREFVFKNIDGYFKIYSKHTPINLVRDLPQGFSALEPLVDLPIGINITRFQTLLALHRSYLTPGDSSSGWTAGAAAYYVGYLQPRTFLLKYNENGTITDAVDCALDPLSETKCTLKSFTVEKGIYQTSNFRVQPTESIVRFPNITNLCPFGEVFNATRFASVYAWNRKRISNCVADYSVLYNSASFSTFKCYGVSPTKLNDLCFTNVYADSFVIRGDEVRQIAPGQTGKIADYNYKLPDDFTGCVIAWNSNNLDSKVGGNYNYLYRLFRKSNLKPFERDISTEIYQAGSTPCNGVEGFNCYFPLQSYGFQPTNGVGYQPYRVVVLSFELLHAPATVCGPKKSTNLVKNKCVNFNFNGLTGTGVLTESNKKFLPFQQFGRDIADTTDAVRDPQTLEILDITPCSFGGVSVITPGTNTSNQVAVLYQDVNCTEVPVAIHADQLTPTWRVYSTGSNVFQTRAGCLIGAEHVNNSYECDIPIGAGICASYQTQTNSPRRARSVASQSIIAYTMSLGAENSVAYSNNSIAIPTNFTISVTTEILPVSMTKTSVDCTMYICGDSTECSNLLLQYGSFCTQLNRALTGIAVEQDKNTQEVFAQVKQIYKTPPIKDFGGFNFSQILPDPSKPSKRSFIEDLLFNKVTLADAGFIKQYGDCLGDIAARDLICAQKFNGLTVLPPLLTDEMIAQYTSALLAGTITSGWTFGAGAALQIPFAMQMAYRFNGIGVTQNVLYENQKLIANQFNSAIGKIQDSLSSTASALGKLQDVVNQNAQALNTLVKQLSSNFGAISSVLNDILSRLDPPEAEVQIDRLITGRLQSLQTYVTQQLIRAAEIRASANLAATKMSECVLGQSKRVDFCGKGYQLMSFPQSAPHGVVFLNVTYVPAQEKNFTTAPAICNDGKAHFPREGVFVSNGTNWFVTQRNFYEPQIITTDNTFVSGNCDVVIGIVNNTVYDPLQPELDSGGGGSDIIKLLNEQVNKEMQSSNLYMSMSSWCYTHSLDGAGLFLFDHAAEEYEHAKKLIIFLNENNVPVQLTSISAPEHKFEGLTQIFQKAYEHEQHISESINNIVDHAIKSKDHATFNFLQWYVAEQHEEEVLFKDILDKIELIGNENHGLYLADQYVKGIAKSRKS

SEQ ID NO: 8920 - protein, 1315 aa, Artificial Sequence
  SARS-CoV-2/Guangdong/20SF028/2020__EPI_ISL_403936 spike protein (1-1147)(K986P_V987P_ H1048Q_H1064N_ H1083N_H1101N) Ferritin construct
MFVFLVLLPLVSSQCVNLTTRTQLPPAYTNSFTRGVYYPDKVFRSSVLYSTQDLFLPFFSNVTWFHAIHVSGTNGTKRFDNPVLPFNDGVYFASTEKSNIIRGWIFGTTLDSKTQSLLIVNNATNVVIKVCEFQFCNDPFLGVYYHKNNKSWMESEFRVYSSANNCTFEYVSQPFLMDLEGKQGNFKNLREFVFKNIDGYFKIYSKHTPINLVRDLPQGFSALEPLVDLPIGINITRFQTLLALHRSYLTPGDSSSGWTAGAAAYYVGYLQPRTFLLKYNENGTITDAVDCALDPLSETKCTLKSFTVEKGIYQTSNFRVQPTESIVRFPNITNLCPFGEVFNATRFASVYAWNRKRISNCVADYSVLYNSASFSTFKCYGVSPTKLNDLCFTNVYADSFVIRGDEVRQIAPGQTGKIADYNYKLPDDFTGCVIAWNSNNLDSKVGGNYNYLYRLFRKSNLKPFERDISTEIYQAGSTPCNGVEGFNCYFPLQSYGFQPTNGVGYQPYRVVVLSFELLHAPATVCGPKKSTNLVKNKCVNFNFNGLTGTGVLTESNKKFLPFQQFGRDIADTTDAVRDPQTLEILDITPCSFGGVSVITPGTNTSNQVAVLYQDVNCTEVPVAIHADQLTPTWRVYSTGSNVFQTRAGCLIGAEHVNNSYECDIPIGAGICASYQTQTNSPRRARSVASQSIIAYTMSLGAENSVAYSNNSIAIPTNFTISVTTEILPVSMTKTSVDCTMYICGDSTECSNLLLQYGSFCTQLNRALTGIAVEQDKNTQEVFAQVKQIYKTPPIKDFGGFNFSQILPDPSKPSKRSFIEDLLFNKVTLADAGFIKQYGDCLGDIAARDLICAQKFNGLTVLPPLLTDEMIAQYTSALLAGTITSGWTFGAGAALQIPFAMQMAYRFNGIGVTQNVLYENQKLIANQFNSAIGKIQDSLSSTASALGKLQDVVNQNAQALNTLVKQLSSNFGAISSVLNDILSRLDPPEAEVQIDRLITGRLQSLQTYVTQQLIRAAEIRASANLAATKMSECVLGQSKRVDFCGKGYQLMSFPQSAPHGVVFLNVTYVPAQEKNFTTAPAICNDGKAHFPREGVFVSNGTNWFVTQRNFYEPQIITTDNTFVSGNCDVVIGIVNNTVYDPLQPELDSGGGGSDIIKLLNEQVNKEMQSSNLYMSMSSWCYTHSLDGAGLFLFDHAAEEYEHAKKLIIFLNENNVPVQLTSISAPEHKFEGLTQIFQKAYEHEQHISESINNIVDHAIKSKDHATFNFLQWYVAEQHEEEVLFKDILDKIELIGNENHGLYLADQYVKGIAKSRKS

SEQ ID NO: 8921 - protein, 1315 aa, Artificial Sequence
  SARS-CoV-2/Shenzhen/SZTH-001/2020__EPI_ISL_406592 spike protein (1-1147)(K986P_V987P_ H1048Q_H1064N_ H1083N_H1101N) Ferritin construct
MFVFLVLLPLVSSQCVNLTTRTQLPPAYTNSFTRGVYYPDKVFRSSVLHSTQDLFLPFFSNVTWFHAIHVSGTNGTKRFDNPVLPFNDGVYFASTEKSNIIRGWIFGTTLDSKTQSLLIVNNATNVVIKVCEFQFCNDPFLGVYYHKNNKSWMESEFRVYSSANNCTFEYVSQPFLMDLEGKQGNFKNLREFVFKNIDGYFKIYSKHTPINLVRDLPQGFSALEPLVDLPIGINITRFQTLLALHRSYLTPGDSSSGWTAGAAAYYVGYLQPRTFLLKYNENGTITDAVDCALDPLSETKCTLKSFTVEKGIYQTSNFRVQPTESIVRFPNITNLCPFGEVFNATRFASVYAWNRKRISNCVADYSVLYNSASFSTFKCYGVSPTKLNDLCFTNVYADSFVIRGDEVRQIAPGQTGKIADYNYKLPDDFTGCVIAWNSNNLDSKVGGNYNYLYRLFRKSNLKPFERDISTEIYQAGSTPCNGVEGFNCYFPLQSYGFQPTNGVGYQPYRVVVLSFELLHAPATVCGPKKSTNLVKNKCVNFNFNGLTGTGVLTESNKKFLPFQQFGRDIADTTDAVRDPQTLEILDITPCSFGGVSVITPGTNTSNQVAVLYQDVNCTEVPVAIHADQLTPTWRVYSTGSNVFQTRAGCLIGAEHVNNSYECDIPIGAGICASYQTQTNSPRRARSVASQSIIAYTMSLGAENSVAYSNNSIAIPTNFTISVTTEILPVSMTKTSVDCTMYICGDSTECSNLLLQYGSFCTQLNRALTGIAVEQDKNTQEVFAQVKQIYKTPPIKDFGGFNFSQILPDPSKPSKRSFIEDLLFNKVTLADAGFIKQYGDCLGDIAARDLICAQKFNGLTVLPPLLTDEMIAQYTSALLAGTITSGWTFGAGAALQIPFAMQMAYRFNGIGVTQNVLYENQKLIANQFNSAIGKIQDSLSSTASALGKLQDVVNQNAQALNTLVKQLSSNFGAISSVLNDILSRLDPPEAEVQIDRLITGRLQSLQTYVTQQLIRAAEIRASANLAATKMSECVLGQSKRVDFCGKGYQLMSFPQSAPHGVVFLNVTYVPAQEKNFTTAPAICNDGKAHFPREGVFVSNGTNWFVTQRNFYEPQIITTDNTFVSGNCDVLIGIVNNTVYDPLQPELDSGGGGSDIIKLLNEQVNKEMQSSNLYMSMSSWCYTHSLDGAGLFLFDHAAEEYEHAKKLIIFLNENNVPVQLTSISAPEHKFEGLTQIFQKAYEHEQHISESINNIVDHAIKSKDHATFNFLQWYVAEQHEEEVLFKDILDKIELIGNENHGLYLADQYVKGIAKSRKS

SEQ ID NO: 8922 - protein, 1315 aa, Artificial Sequence
  SARS-CoV-2/Shenzhen/SZTH-004/2020__EPI_ISL_406595 spike protein (1-1147)(K986P_V987P_ H1048Q_H1064N_ H1083N_H1101N) Ferritin construct
MFVFLVLLPLVSSQCVNLTTRTQLPPAYTNSFTRGVYYPDKVFRSSVLHSTQDLFLPFFSNVTWFHAIHVSGTNGTKRFDNPVLPFNDGVYFASTEKSNIIRGWIFGTTLDSKTQSLLIVNNATNVVIKVCEFQFCNDPFLGVYYHKNNKSWMESEFRVYSSANNCTFEYVSQPFLMDLEGKQGNFKNLREFVFKNIDGYFKIYSKHTPINLVRDLPQGFSALEPLVDLPIGINITRFQTLLALHRSYLTPGDSSSGWTAGAAAYYVGYLQPRTFLLKYNENGTITDAVDCALDPLSETKCTLKSFTVEKGIYQTSNFRVQPTESIVRFPNITNLCPFGEVFNATRFASVYAWDRKRISNCVAYYSVLYNSASFSTFKCYGVSPTKLNDLCFTNVYADSFVIRGDEVRQIAPGQTGKIADYNYKLPDDFTGCVIAWNSNNLDSKVGGNYNYLYRLFRKSNLKPFERDISTEIYQAGSTPCNGVEGFNCYFPLQSYGFQPTNGVGYQPYRVVVLSFELLHAPATVCGPKKSTNLVKNKCVNFNFNGLTGTGVLTESNKKFLPFQQFGRDIADTTDAVRDPQTLEILDITPCSFGGVSVITPGTNTSNQVAVLYQDVNCTEVPVAIHADQLTPTWRVYSTGSNVFQTRAGCLIGAEHVNNSYECDIPIGAGICASYQTQTNSPRRARSVASQSIIAYTMSLGAENSVAYSNNSIAIPTNFTISVTTEILPVSMTKTSVDCTMYICGDSTECSNLLLQYGSFCTQLNRALTGIAVEQDKNTQEVFAQVKQIYKTPPIKDFGGFNFSQILPDPSKPSKRSFIEDLLFNKVTLADAGFIKQYGDCLGDIAARDLICAQKFNGLTVLPPLLTDEMIAQYTSALLAGTITSGWTFGAGAALQIPFAMQMAYRFNGIGVTQNVLYENQKLIANQFNSAIGKIQDSLSSTASALGKLQDVVNQNAQALNTLVKQLSSNFGAISSVLNDILSRLDPPEAEVQIDRLITGRLQSLQTYVTQQLIRAAEIRASANLAATKMSECVLGQSKRVDFCGKGYQLMSFPQSAPHGVVFLNVTYVPAQEKNFTTAPAICNDGKAHFPREGVFVSNGTNWFVTQRNFYEPQIITTDNTFVSGNCDVVIGIVNNTVYDPLQPELDSGGGGSDIIKLLNEQVNKEMQSSNLYMSMSSWCYTHSLDGAGLFLFDHAAEEYEHAKKLIIFLNENNVPVQLTSISAPEHKFEGLTQIFQKAYEHEQHISESINNIVDHAIKSKDHATFNFLQWYVAEQHEEEVLFKDILDKIELIGNENHGLYLADQYVKGIAKSRKS

SEQ ID NO: 8923 - protein, 1315 aa, Artificial Sequence
  SARS-CoV-2/France/IDF0372/2020__EPI_ISL_406596 spike protein (1-1147)(K986P_V987P_ H1048Q_H1064N_ H1083N_H1101N) Ferritin construct
MFVFLVLLPLVSSQCVNLTTRTQLPPAYTNSFTRGVYYPDKVFRSSVLHSTQDLFLPFFSNVTWFHAIHVSGTNGTKRFDNPVLPFNDGVYFASTEKSNIIRGWIFGTTLDSKTQSLLIVNNATNVVIKVCEFQFCNDPFLGVYYHKNNKSWMESEFRVYSSANNCTFEYVSQPFLMDLEGKQGNFKNLREFVFKNIDGYFKIYSKHTPINLVRDLPQGFSALEPLVDLPIGINITRFQTLLALHRSYLTPGDSSSGWTAGAAAYYVGYLQPRTFLLKYNENGTITDAVDCALDPLSETKCTLKSFTVEKGIYQTSNFRVQPTESIVRFPNITNLCPFGEVFNATRFASVYAWNRKRISNCVADYSFLYNSASFSTFKCYGVSPTKLNDLCFTNVYADSFVIRGDEVRQIAPGQTGKIADYNYKLPDDFTGCVIAWNSNNLDSKVGGNYNYLYRLFRKSNLKPFERDISTEIYQAGSTPCNGVEGFNCYFPLQSYGFQPTNGVGYQPYRVVVLSFELLHAPATVCGPKKSTNLVKNKCVNFNFNGLTGTGVLTESNKKFLPFQQFGRDIADTTDAVRDPQTLEILDITPCSFGGVSVITPGTNTSNQVAVLYQDVNCTEVPVAIHADQLTPTWRVYSTGSNVFQTRAGCLIGAEHVNNSYECDIPIGAGICASYQTQTNSPRRARSVASQSIIAYTMSLGAENSVAYSNNSIAIPTNFTISVTTEILPVSMTKTSVDCTMYICGDSTECSNLLLQYGSFCTQLNRALTGIAVEQDKNTQEVFAQVKQIYKTPPIKDFGGFNFSQILPDPSKPSKRSFIEDLLFNKVTLADAGFIKQYGDCLGDIAARDLICAQKFNGLTVLPPLLTDEMIAQYTSALLAGTITSGWTFGAGAALQIPFAMQMAYRFNGIGVTQNVLYENQKLIANQFNSAIGKIQDSLSSTASALGKLQDVVNQNAQALNTLVKQLSSNFGAISSVLNDILSRLDPPEAEVQIDRLITGRLQSLQTYVTQQLIRAAEIRASANLAATKMSECVLGQSKRVDFCGKGYQLMSFPQSAPHGVVFLNVTYVPAQEKNFTTAPAICNDGKAHFPREGVFVSNGTNWFVTQRNFYEPQIITTDNTFVSGNCDVVIGIVNNTVYDPLQPELDSGGGGSDIIKLLNEQVNKEMQSSNLYMSMSSWCYTHSLDGAGLFLFDHAAEEYEHAKKLIIFLNENNVPVQLTSISAPEHKFEGLTQIFQKAYEHEQHISESINNIVDHAIKSKDHATFNFLQWYVAEQHEEEVLFKDILDKIELIGNENHGLYLADQYVKGIAKSRKS

SEQ ID NO: 8924 - protein, 1315 aa, Artificial Sequence
  SARS-CoV-2/Australia/VIC01/2020__EPI_ISL_406844 spike protein (1-1147)(K986P_V987P_ H1048Q_H1064N_ H1083N_H1101N) Ferritin construct
MFVFLVLLPLVSSQCVNLTTRTQLPPAYTNSFTRGVYYPDKVFRSSVLHSTQDLFLPFFSNVTWFHAIHVSGTNGTKRFDNPVLPFNDGVYFASTEKSNIIRGWIFGTTLDSKTQSLLIVNNATNVVIKVCEFQFCNDPFLGVYYHKNNKSWMESEFRVYSSANNCTFEYVSQPFLMDLEGKQGNFKNLREFVFKNIDGYFKIYSKHTPINLVRDLPQGFSALEPLVDLPIGINITRFQTLLALHRRYLTPGDSSSGWTAGAAAYYVGYLQPRTFLLKYNENGTITDAVDCALDPLSETKCTLKSFTVEKGIYQTSNFRVQPTESIVRFPNITNLCPFGEVFNATRFASVYAWNRKRISNCVADYSVLYNSASFSTFKCYGVSPTKLNDLCFTNVYADSFVIRGDEVRQIAPGQTGKIADYNYKLPDDFTGCVIAWNSNNLDSKVGGNYNYLYRLFRKSNLKPFERDISTEIYQAGSTPCNGVEGFNCYFPLQSYGFQPTNGVGYQPYRVVVLSFELLHAPATVCGPKKSTNLVKNKCVNFNFNGLTGTGVLTESNKKFLPFQQFGRDIADTTDAVRDPQTLEILDITPCSFGGVSVITPGTNTSNQVAVLYQDVNCTEVPVAIHADQLTPTWRVYSTGSNVFQTRAGCLIGAEHVNNSYECDIPIGAGICASYQTQTNSPRRARSVASQSIIAYTMSLGAENSVAYSNNSIAIPTNFTISVTTEILPVSMTKTSVDCTMYICGDSTECSNLLLQYGSFCTQLNRALTGIAVEQDKNTQEVFAQVKQIYKTPPIKDFGGFNFSQILPDPSKPSKRSFIEDLLFNKVTLADAGFIKQYGDCLGDIAARDLICAQKFNGLTVLPPLLTDEMIAQYTSALLAGTITSGWTFGAGAALQIPFAMQMAYRFNGIGVTQNVLYENQKLIANQFNSAIGKIQDSLSSTASALGKLQDVVNQNAQALNTLVKQLSSNFGAISSVLNDILSRLDPPEAEVQIDRLITGRLQSLQTYVTQQLIRAAEIRASANLAATKMSECVLGQSKRVDFCGKGYQLMSFPQSAPHGVVFLNVTYVPAQEKNFTTAPAICNDGKAHFPREGVFVSNGTNWFVTQRNFYEPQIITTDNTFVSGNCDVVIGIVNNTVYDPLQPELDSGGGGSDIIKLLNEQVNKEMQSSNLYMSMSSWCYTHSLDGAGLFLFDHAAEEYEHAKKLIIFLNENNVPVQLTSISAPEHKFEGLTQIFQKAYEHEQHISESINNIVDHAIKSKDHATFNFLQWYVAEQHEEEVLFKDILDKIELIGNENHGLYLADQYVKGIAKSRKS

SEQ ID NO: 8925 - protein, 1315 aa, Artificial Sequence
  SARS-CoV-2/Germany/BavPat1/2020__EPI_ISL_406862 spike protein (1-1147)(K986P_V987P_ H1048Q_H1064N_ H1083N_H1101N) Ferritin construct
MFVFLVLLPLVSSQCVNLTTRTQLPPAYTNSFTRGVYYPDKVFRSSVLHSTQDLFLPFFSNVTWFHAIHVSGTNGTKRFDNPVLPFNDGVYFASTEKSNIIRGWIFGTTLDSKTQSLLIVNNATNVVIKVCEFQFCNDPFLGVYYHKNNKSWMESEFRVYSSANNCTFEYVSQPFLMDLEGKQGNFKNLREFVFKNIDGYFKIYSKHTPINLVRDLPQGFSALEPLVDLPIGINITRFQTLLALHRSYLTPGDSSSGWTAGAAAYYVGYLQPRTFLLKYNENGTITDAVDCALDPLSETKCTLKSFTVEKGIYQTSNFRVQPTESIVRFPNITNLCPFGEVFNATRFASVYAWNRKRISNCVADYSVLYNSASFSTFKCYGVSPTKLNDLCFTNVYADSFVIRGDEVRQIAPGQTGKIADYNYKLPDDFTGCVIAWNSNNLDSKVGGNYNYLYRLFRKSNLKPFERDISTEIYQAGSTPCNGVEGFNCYFPLQSYGFQPTNGVGYQPYRVVVLSFELLHAPATVCGPKKSTNLVKNKCVNFNFNGLTGTGVLTESNKKFLPFQQFGRDIADTTDAVRDPQTLEILDITPCSFGGVSVITPGTNTSNQVAVLYQGVNCTEVPVAIHADQLTPTWRVYSTGSNVFQTRAGCLIGAEHVNNSYECDIPIGAGICASYQTQTNSPRRARSVASQSIIAYTMSLGAENSVAYSNNSIAIPTNFTISVTTEILPVSMTKTSVDCTMYICGDSTECSNLLLQYGSFCTQLNRALTGIAVEQDKNTQEVFAQVKQIYKTPPIKDFGGFNFSQILPDPSKPSKRSFIEDLLFNKVTLADAGFIKQYGDCLGDIAARDLICAQKFNGLTVLPPLLTDEMIAQYTSALLAGTITSGWTFGAGAALQIPFAMQMAYRFNGIGVTQNVLYENQKLIANQFNSAIGKIQDSLSSTASALGKLQDVVNQNAQALNTLVKQLSSNFGAISSVLNDILSRLDPPEAEVQIDRLITGRLQSLQTYVTQQLIRAAEIRASANLAATKMSECVLGQSKRVDFCGKGYQLMSFPQSAPHGVVFLNVTYVPAQEKNFTTAPAICNDGKAHFPREGVFVSNGTNWFVTQRNFYEPQIITTDNTFVSGNCDVVIGIVNNTVYDPLQPELDSGGGGSDIIKLLNEQVNKEMQSSNLYMSMSSWCYTHSLDGAGLFLFDHAAEEYEHAKKLIIFLNENNVPVQLTSISAPEHKFEGLTQIFQKAYEHEQHISESINNIVDHAIKSKDHATFNFLQWYVAEQHEEEVLFKDILDKIELIGNENHGLYLADQYVKGIAKSRKS

SEQ ID NO: 8926 - protein, 1315 aa, Artificial Sequence
  SARS-CoV-2/Wuhan/HBCDC-HB-02/2020__EPI_ISL_412978 spike protein (1-1147)(K986P_V987P_ H1048Q_H1064N_ H1083N_H1101N) Ferritin construct
MFVFLVLLPLVSSQCVNLTTRTQLPPAYTNSFTRGVYYPDKVFRSSVLHSTQDLFLPFFSNVTWFHAIHVSGTNGTKRFDNPVLPFNDGVYFASTEKSNIIRGWIFGTTLDSKTQSLLIVNNATNVVIKVCEFQFCNDPFLGVYYHKNNKSWMESEFRVYSSANNCTFEYVSQPFLMDLEGKQGNFKNLREFVFKNIDGYFKIYSKHTPINLVRDLPQGFSALEPLVDLPIGINITRFQTLLALHRSYLTPGDSSSGWTAGAAAYYVGYLQPRTFLLKYNENGTITDAVDCALDPLSETKCTLKSFTVEKGIYQTSNFRVQPTESIVRFPNITNLCPFGEVFNATRFASVYAWNRKRISNCVADYSVLYNSASFSTFKCYGVSPTKLNDLCFTNVYADSFVIRGDEVRQIAPGQTGKIADYNYKLPDDFTGCVIAWNSNNLDSKVGGNYNYLYRLFRKSNLKPFERDISTEIYQAGSTPCNGVEGFNCYFPLQSYGFQPTNGVGYQPYRVVVLSFELLHAPATVCGPKKSTNLVKNKCVNFNFNGLTGTGVLTESNKKFLPFQQFGRDIADTTDAVRDPQTLEILDITPCSFGGVSVITPGTNTSNQVAVLYQDVNCTEVPVAIHADQLTPTWRVYSTGSNVFQTRAGCLIGAEHVNNSYECDIPIGAGICASYQTQTNSPRRARSVASQSIIAYTMSLGAENSVAYSNNSIAIPTNFTISVTTEILPVSMTKTSVDCTMYICGDSTECSNFLLQYGSFCTQLNRALTGIAVEQDKNTQEVFAQVKQIYKTPPIKDFGGFNFSQILPDPSKPSKRSFIEDLLFNKVTLADAGFIKQYGDCLGDIAARDLICAQKFNGLTVLPPLLTDEMIAQYTSALLAGTITSGWTFGAGAALQIPFAMQMAYRFNGIGVTQNVLYENQKLIANQFNSAIGKIQDSLSSTASALGKLQDVVNQNAQALNTLVKQLSSNFGAISSVLNDILSRLDPPEAEVQIDRLITGRLQSLQTYVTQQLIRAAEIRASANLAATKMSECVLGQSKRVDFCGKGYQLMSFPQSAPHGVVFLNVTYVPAQEKNFTTAPAICNDGKAHFPREGVFVSNGTNWFVTQRNFYEPQIITTDNTFVSGNCDVVIGIVNNTVYDPLQPELDSGGGGSDIIKLLNEQVNKEMQSSNLYMSMSSWCYTHSLDGAGLFLFDHAAEEYEHAKKLIIFLNENNVPVQLTSISAPEHKFEGLTQIFQKAYEHEQHISESINNIVDHAIKSKDHATFNFLQWYVAEQHEEEVLFKDILDKIELIGNENHGLYLADQYVKGIAKSRKS

SEQ ID NO: 8927 - protein, 1315 aa, Artificial Sequence
  SARS-CoV-2/Australia/QLD02/2020__EPI_ISL_407896 spike protein (1-1147)(K986P_V987P_ H1048Q_H1064N_ H1083N_H1101N) Ferritin construct
MFVFLVLLPLVSSQCVNLTTRTQLPPAYTNSFTRGVYYPDKVFRSSVLHSTQDLFLPFFSNVTWFHAIHVSGTNGTKRFDNPVLPFNDGVYFASTEKSNIIRGWIFGTTLDSKTQSLLIVNNATNVVIKVCEFQFCNDPFLGVYYHKNNKSWMESEFRVYSSANNCTFEYVSQPFLMDLEGKQGNFKNLREFVFKNIDGYFKIYSKHTPINLVRDLPQGFSALEPLVDLPIGINITRFQTLLALHRSYLTPGDSSSGWTAGAAAYYVGYLQPRTFLLKYNENGTITDAVDCALDPLSETKCTLKSFTVEKGIYQTSNFRVQPTESIVRFPNITNLCPFGEVFNATRFASVYAWNRKRISNCVADYSVLYNSASFSTFKCYGVSPTKLNDLCFTNVYADSFVIRGDEVRQIAPGQTGKIADYNYKLPDDFTGCVIAWNSNNLDSKVGGNYNYLYRLFRKSNLKPFERDISTEIYQAGSTPCNGVEGFNCYFPLQSYGFQPTNGVGYQPYRVVVLSFELLHAPATVCGPKKSTNLVKNKCVNFNFNGLTGTGVLTESNKKFLPFQQFGRDIADTTDAVRDPQTLEILDITPCSFGGVSVITPGTNTSNQVAVLYQDVNCTEVPVAIHADQLTPTWRVYSTGSNVFQTRAGCLIGAEHVNNSYECDIPIGAGICASYQTQTNSPRRARSVASQSIIAYTMSLGAENSVAYSNNSIAIPTNFTISVTTEILPVSMTKTSVDCTMYICGDSTECSNLLLQYGSFCTQLNRALTGIAVEQDKNTQEVFAQVKQIYKTPPIKDFGGFNFSQILPDPSKPSKRSFIEDLLFNKVTLADAGFIKQYGDCLGDIAARDLICAQKFNGLTVLPPLLTDEMIAQYTSALLAGTITSGWTFGAGAALQIPFAMQMAYRFNGIGVTQNVLYENQKLIANQFNSAIGKIQDSLSSTASALGKLQDVVNQNAQALNTLVKQLSSNFGAISSVLNDILSRLDPPEAEVQIDRLITGRLQSLQTYVTQQLIRAAEIRASANLAATKMSECVLGQSKRVDFCGKGYQLMSFPQSAPHGVVFLNVTYVPAQEKNFTTAPAICNDGKAHFPREGVFVSNGTNWFVTQRNFYEPQIITTDNTFVSGNCDVVIGIVNNTVYDPLQLELDSGGGGSDIIKLLNEQVNKEMQSSNLYMSMSSWCYTHSLDGAGLFLFDHAAEEYEHAKKLIIFLNENNVPVQLTSISAPEHKFEGLTQIFQKAYEHEQHISESINNIVDHAIKSKDHATFNFLQWYVAEQHEEEVLFKDILDKIELIGNENHGLYLADQYVKGIAKSRKS

SEQ ID NO: 8928 - protein, 1315 aa, Artificial Sequence
  SARS-CoV-2/India/1-31/2020__EPI_ISL_413523 spike protein (1-1147)(K986P_V987P_ H1048Q_H1064N_ H1083N_H1101N) Ferritin construct
MFVFLVLLPLVSSQCVNLTTRTQLPPAYTNSFTRGVYYPDKVFRSSVLHSTQDLFLPFFSNVTWFHAIHVSGTNGTKRFDNPVLPFNDGVYFASTEKSNIIRGWIFGTTLDSKTQSLLIVNNATNVVIKVCEFQFCNDPFLGVYYHKNNKSWMESEFRVYSSANNCTFEYVSQPFLMDLEGKQGNFKNLREFVFKNIDGYFKIYSKHTPINLVRDLPQGFSALEPLVDLPIGINITRFQTLLALHRSYLTPGDSSSGWTAGAAAYYVGYLQPRTFLLKYNENGTITDAVDCALDPLSETKCTLKSFTVEKGIYQTSNFRVQPTESIVRFPNITNLCPFGEVFNATRFASVYAWNRKRISNCVADYSVLYNSASFSTFKCYGVSPTKLNDLCFTNVYADSFVIRGDEVRQIAPGQTGKIADYNYKLPDDFTGCVIAWNSNNLDSKVGGNYNYLYRLFRKSNLKPFERDISTEIYQAGSTPCNGVEGFNCYFPLQSYGFQPTNGVGYQPYRVVVLSFELLHAPATVCGPKKSTNLVKNKCVNFNFNGLTGTGVLTESNKKFLPFQQFGRDIADTTDAVRDPQTLEILDITPCSFGGVSVITPGTNTSNQVAVLYQDVNCTEVPVAIHADQLTPTWRVYSTGSNVFQTRAGCLIGAEHVNNSYECDIPIGAGICASYQTQTNSPRRARSVASQSIIAYTMSLGAENSVAYSNNSIAIPTNFTISVTTEILPVSMTKTSVDCTMYICGDSTECSNLLLQYGSFCTQLNRALTGIAVEQDKNTQEVFAQVKQIYKTPPIKDFGGFNFSQILPDPSKPSKRSFIEDLLFNKVTLADAGFIKQYGDCLGDIAARDLICAQKFNGLTVLPPLLTDEMIAQYTSALLAGTITSGWTFGAGAALQIPFAMQMAYRFNGIGVTQNVLYENQKLIANQFNSVIGKIQDSLSSTASALGKLQDVVNQNAQALNTLVKQLSSNFGAISSVLNDILSRLDPPEAEVQIDRLITGRLQSLQTYVTQQLIRAAEIRASANLAATKMSECVLGQSKRVDFCGKGYQLMSFPQSAPHGVVFLNVTYVPAQEKNFTTAPAICNDGKAHFPREGVFVSNGTNWFVTQRNFYEPQIITTDNTFVSGNCDVVIGIVNNTVYDPLQPELDSGGGGSDIIKLLNEQVNKEMQSSNLYMSMSSWCYTHSLDGAGLFLFDHAAEEYEHAKKLIIFLNENNVPVQLTSISAPEHKFEGLTQIFQKAYEHEQHISESINNIVDHAIKSKDHATFNFLQWYVAEQHEEEVLFKDILDKIELIGNENHGLYLADQYVKGIAKSRKS

SEQ ID NO: 8929 - protein, 1315 aa, Artificial Sequence
  SARS-CoV-2/Guangdong/GD2020087-P0008/2020__EPI_ISL_413863 spike protein (1-1147)(K986P_V987P_ H1048Q_H1064N_ H1083N_H1101N) Ferritin construct
MFVFLVLLPLVSSQCVNLTTRTQLPPAYTNSFTRGVYYPDKVFRSSVLHSTQDLFLPFFSNVTWFHAIHVSGTNGTKRFDNPVLPFNDGVYFASTEKSNIIRGWIFGTTLDSKTQSLLIVNNATNVVIKVCEFQFCNDPFLGVYYHKNNKSWMESEFRVYSSANNCTFEYVSQPFLMDLEGKQGNFKNLREFVFKNIDGYFKIYSKHTPINLVRDLPQGFSALEPLVDLPIGINITRFQTLLALHRSYLTPGDSSSGWTAGAAAYYVGYLQPRTFLLKYNENGTITDAVDCALDPLSETKCTLKSFTVEKGIYQTSNFRVQPTESIVRFPNITNLCPFGEVFNATRFASVYAWNRKRISNCVADYSVLYNSASFSTFKCYGVSPTKLNDLCFTNVYADSFVIRGDEVREIAPGQTGKIADYNYKLPDDFTGCVIAWNSNNLDSKVGGNYNYLYRLFRKSNLKPFERDISTEIYQAGSTPCNGVEGFNCYFPLQSYGFQPTNGVGYQPYRVVVLSFELLHAPATVCGPKKSTNLVKNKCVNFNFNGLTGTGVLTESNKKFLPFQQFGRDIADTTDAVRDPQTLEILDITPCSFGGVSVITPGTNTSNQVAVLYQDVNCTEVPVAIHADQLTPTWRVYSTGSNVFQTRAGCLIGAEHVNNSYECDIPIGAGICASYQTQTNSPRRARSVASQSIIAYTMSLGAENSVAYSNNSIAIPTNFTISVTTEILPVSMTKTSVDCTMYICGDSTECSNLLLQYGSFCTQLNRALTGIAVEQDKNTQEVFAQVKQIYKTPPIKDFGGFNFSQILPDPSKPSKRSFIEDLLFNKVTLADAGFIKQYGDCLGDIAARDLICAQKFNGLTVLPPLLTDEMIAQYTSALLAGTITSGWTFGAGAALQIPFAMQMAYRFNGIGVTQNVLYENQKLIANQFNSAIGKIQDSLSSTASALGKLQDVVNQNAQALNTLVKQLSSNFGAISSVLNDILSRLDPPEAEVQIDRLITGRLQSLQTYVTQQLIRAAEIRASANLAATKMSECVLGQSKRVDFCGKGYQLMSFPQSAPHGVVFLNVTYVPAQEKNFTTAPAICNDGKAHFPREGVFVSNGTNWFVTQRNFYEPQIITTDNTFVSGNCDVVIGIVNNTVYDPLQPELDSGGGGSDIIKLLNEQVNKEMQSSNLYMSMSSWCYTHSLDGAGLFLFDHAAEEYEHAKKLIIFLNENNVPVQLTSISAPEHKFEGLTQIFQKAYEHEQHISESINNIVDHAIKSKDHATFNFLQWYVAEQHEEEVLFKDILDKIELIGNENHGLYLADQYVKGIAKSRKS

SEQ ID NO: 8930 - protein, 1315 aa, Artificial Sequence
  SARS-CoV-2/Sweden/01/2020__EPI_ISL_411951 spike protein (1-1147)(K986P_V987P_ H1048Q_H1064N_ H1083N_H1101N) Ferritin construct
MFVFLVLLPLVSSQCVNLTTRTQLPPAYTNSFTRGVYYPDKVFRSSVLHSTQDLFLPFFSNVTWFHAIHVSGTNGTKRFDNPVLPFNDGVYFASTEKSNIIRGWIFGTTLDSKTQSLLIVNNATNVVIKVCEFQFCNDPFLGVYYHKNNKSWMESEFRVYSSANNCTFEYVSQPFLMDLEGKQGNFKNLREFVFKNIDGYFKIYSKHTPINLVRDLPQGFSALEPLVDLPIGINITRFQTLLALHRSYLTPGDSSSGWTAGAAAYYVGYLQPRTFLLKYNENGTITDAVDCALDPLSETKCTLKSFTVEKGIYQTSNFRVQPTESIVRFPNITNLCPFGEVFNATRFASVYAWNRKRISNCVADYSVLYNSASFSTFKCYGVSPTKLNDLCFTNVYADSFVIRGDEVRQIAPGQTGKIADYNYKLPDDFTGCVIAWNSNNLDSKVGGNYNYLYRLFRKSNLKPFERDISTEIYQAGSTPCNGVEGFNCYFPLQSYGFQPTNGVGYQPYRVVVLSFELLHAPATVCGPKKSTNLVKNKCVNFNFNGLTGTGVLTESNKKFLPFQQFGRDIADTTDAVRDPQTLEILDITPCSFGGVSVITPGTNTSNQVAVLYQDVNCTEVPVAIHADQLTPTWRVYSTGSNVFQTRAGCLIGAEHVNNSYECDIPIGAGICASYQTQTNSPRRARSVASQSIIAYTMSLGAENSVAYSNNSIAIPTNFTISVTTEILPVSMTKTSVDCTMYICGDSTECSNLLLQYGSFCTQLNRALTGIAVEQDKNTQEVFAQVKQIYKTPPIKDCGGFNFSQILPDPSKPSKRSFIEDLLFNKVTLADAGFIKQYGDCLGDIAARDLICAQKFNGLTVLPPLLTDEMIAQYTSALLAGTITSGWTFGAGAALQIPFAMQMAYRFNGIGVTQNVLYENQKLIANQFNSAIGKIQDSLSSTASALGKLQDVVNQNAQALNTLVKQLSSNFGAISSVLNDILSRLDPPEAEVQIDRLITGRLQSLQTYVTQQLIRAAEIRASANLAATKMSECVLGQSKRVDFCGKGYQLMSFPQSAPHGVVFLNVTYVPAQEKNFTTAPAICNDGKAHFPREGVFVSNGTNWFVTQRNFYEPQIITTDNTFVSGNCDVVIGIVNNTVYDPLQPELDSGGGGSDIIKLLNEQVNKEMQSSNLYMSMSSWCYTHSLDGAGLFLFDHAAEEYEHAKKLIIFLNENNVPVQLTSISAPEHKFEGLTQIFQKAYEHEQHISESINNIVDHAIKSKDHATFNFLQWYVAEQHEEEVLFKDILDKIELIGNENHGLYLADQYVKGIAKSRKS

SEQ ID NO: 8931 - protein, 1315 aa, Artificial Sequence
  SARS-CoV-2/Tianmen/HBCDC-HB-07/2020__EPI_ISL_412983 spike protein (1-1147)(K986P_V987P_ H1048Q_H1064N_ H1083N_H1101N) Ferritin construct
MFVFLVLLPLVSSQCVNLTTRTQLPPAYTNSFTRGVYYPDKVFRSSVLHSTQDLFLPFFSNVTWFHAIHVSGTNGTKRFDNPVLPFNDGVYFASTEKSNIIRGWIFGTTLDSKTQSLLIVNNATNVVIKVCEFQFCNDPFLGVYYHKNNKSWMESEFRVYSSANNCTFEYVSQPFLMDLEGKQGNFKNLREFVFKNIDGYFKIYSKHTPINLVRDLPQGFSALEPLVDLPIGINITRFQTLLALHRSYLTPGDSSSGWTAGAAAYYVGYLQPRTFLLKYNENGTITDAVDCALDPLSETKCTLKSFTVEKGIYQTSNFRVQPTESIVRFPNITNLCPFGEVFNATRFASVYAWNRKRISNCVADYSVLYNSASFSTFKCYGVSPTKLNDLCFTNVYADSFVIRGDEVRQIAPGQTGKIADYNYKLPDDFTGCVIAWNSNNLDSKVGGNYNYLYRLFRKSNLKPFERDISTEIYQAGSTPCNGVEGFNCYFPLQSYGFQPTNGVGYQPYRVVVLSFELLHAPATVCGPKKSTNLVKNKCVNFNFNGLTGTGVLTESNKKFLPFQQFGRDIADTTDAVRDPQTLEILDITPCSFGGVSVITPGTNTSNQVAVLYQDLNCTEVPVAIHADQLTPTWRVYSTGSNVFQTRAGCLIGAEHVNNSYECDIPIGAGICASYQTQTNSPRRARSVASQSIIAYTMSLGAENSVAYSNNSIAIPTNFTISVTTEILPVSMTKTSVDCTMYICGDSTECSNLLLQYGSFCTQLNRALTGIAVEQDKNTQEVFAQVKQIYKTPPIKDFGGFNFSQILPDPSKPSKRSFIEDLLFNKVTLADAGFIKQYGDCLGDIAARDLICAQKFNGLTVLPPLLTDEMIAQYTSALLAGTITSGWTFGAGAALQIPFAMQMAYRFNGIGVTQNVLYENQKLIANQFNSAIGKIQDSLSSTASALGKLQDVVNQNAQALNTLVKQLSSNFGAISSVLNDILSRLDPPEAEVQIDRLITGRLQSLQTYVTQQLIRAAEIRASANLAATKMSECVLGQSKRVDFCGKGYQLMSFPQSAPHGVVFLNVTYVPAQEKNFTTAPAICNDGKAHFPREGVFVSNGTNWFVTQRNFYEPQIITTDNTFVSGNCDVVIGIVNNTVYDPLQPELDSGGGGSDIIKLLNEQVNKEMQSSNLYMSMSSWCYTHSLDGAGLFLFDHAAEEYEHAKKLIIFLNENNVPVQLTSISAPEHKFEGLTQIFQKAYEHEQHISESINNIVDHAIKSKDHATFNFLQWYVAEQHEEEVLFKDILDKIELIGNENHGLYLADQYVKGIAKSRKS

SEQ ID NO: 8932 - protein, 1315 aa, Artificial Sequence
  SARS-CoV-2/Hong Kong/case42_VM20002493/2020__EPI_ISL_414527 spike protein (1-1147)(K986P_V987P_ H1048Q_H1064N_ H1083N_H1101N) Ferritin construct
MFVFLVLLPLVSSQCVNLTTRTQLPPAYTNSFTRGVYYPDKVFRSSVLHSTQDLFLPFFSNVTWFHAIHVSGTNGTKRFDNPVLPFNDGVYFASTEKSNIIRGWIFGTTLDSKTQSLLIVNNATNVVIKVCEFQFCNDPFLGVYYHKNNKSWMESEFRVYSSANNCTFEYVSQPFLMDLEGKQGNFKNLREFVFKNIDGYFKIYSKHTPINLVRDLPQGFSALEPLVDLPIGINITRFQTLLALHRSYLTPGDSSSGWTAGAAAYYVGYLQPRTFLLKYNENGTITDAVDCALDPLSETKCTLKSFTVEKGIYQTSNFRVQPTESIVRFPNITNLCPFGEVFNATRFASVYAWNRKRISNCVADYSVLYNSASFSTFKCYGVSPTKLNDLCFTNVYADSFVIRGDEVRQIAPGQTGKIADYNYKLPDDFTGCVIAWNSNNLDSKVGGNYNYLYRLFRKSNLKPFERDISTEIYQAGSTPCNGVEGFNCYFPLQSYGFQPTNGVGYQPYRVVVLSFELLHAPATVCGPKKSTNLVKNKCVNFNFNGLTGTGVLTESNKKFLPFQQFGRDIADTTDAVRDPQTLEILDITPCSFGGVSVITPGTNTSNQVAVLYQDVNCTEVPVAIHADQLTPTWRVYSTGSNVFQTRAGCLIGAEHVNNSYECDIPIGAGICASYQTQTNSPRRARSVASQSIIAYTMSLGAENSVAYSNNSIAIPTNFAISVTTEILPVSMTKTSVDCTMYICGDSTECSNLLLQYGSFCTQLNRALTGIAVEQDKNTQEVFAQVKQIYKTPPIKDFGGFNFSQILPDPSKPSKRSFIEDLLFNKVTLADAGFIKQYGDCLGDIAARDLICAQKFNGLTVLPPLLTDEMIAQYTSALLAGTITSGWTFGAGAALQIPFAMQMAYRFNGIGVTQNVLYENQKLIANQFNSAIGKIQDSLSSTASALGKLQDVVNQNAQALNTLVKQLSSNFGAISSVLNDILSRLDPPEAEVQIDRLITGRLQSLQTYVTQQLIRAAEIRASANLAATKMSECVLGQSKRVDFCGKGYQLMSFPQSAPHGVVFLNVTYVPAQEKNFTTAPAICNDGKAHFPREGVFVSNGTNWFVTQRNFYEPQIITTDNTFVSGNCDVVIGIVNNTVYDPLQPELDSGGGGSDIIKLLNEQVNKEMQSSNLYMSMSSWCYTHSLDGAGLFLFDHAAEEYEHAKKLIIFLNENNVPVQLTSISAPEHKFEGLTQIFQKAYEHEQHISESINNIVDHAIKSKDHATFNFLQWYVAEQHEEEVLFKDILDKIELIGNENHGLYLADQYVKGIAKSRKS

SEQ ID NO: 8933 - protein, 1315 aa, Artificial Sequence
  SARS-CoV-2/USA/CruiseA-23/2020__EPI_ISL_414482 spike protein (1-1147)(K986P_V987P_ H1048Q_H1064N_ H1083N_H1101N) Ferritin construct
MFVFLVLLPLVSSQCVNLTTRTQLPPAYTNSFTRGVYYPDKVFRSSVLHSTQDLFLPFFSNVTWFHAIHVSGTNGTKRFDNPVLPFNDGVYFASTEKSNIIRGWIFGTTLDSKTQSLLIVNNATNVVIKVCEFQFCNDPFLGVYYHKNNKSWMESEFRVYSSANNCTFEYVSQPFLMDLEVKQGNFKNLREFVFKNIDGYFKIYSKHTPINLVRDLPQGFSALEPLVDLPIGINITRFQTLLALHRSYLTPGDSSSGWTAGAAAYYVGYLQPRTFLLKYNENGTITDAVDCALDPLSETKCTLKSFTVEKGIYQTSNFRVQPTESIVRFPNITNLCPFGEVFNATRFASVYAWNRKRISNCVADYSVLYNSASFSTFKCYGVSPTKLNDLCFTNVYADSFVIRGDEVRQIAPGQTGKIADYNYKLPDDFTGCVIAWNSNNLDSKVGGNYNYLYRLFRKSNLKPFERDISTEIYQAGSTPCNGVEGFNCYFPLQSYGFQPTNGVGYQPYRVVVLSFELLHAPATVCGPKKSTNLVKNKCVNFNFNGLTGTGVLTESNKKFLPFQQFGRDIADTTDAVRDPQTLEILDITPCSFGGVSVITPGTNTSNQVAVLYQDVNCTEVPVAIHADQLTPTWRVYSTGSNVFQTRAGCLIGAEHVNNSYECDIPIGAGICASYQTQTNSPRRARSVASQSIIAYTMSLGAENSVAYSNNSIAIPTNFTISVTTEILPVSMTKTSVDCTMYICGDSTECSNLLLQYGSFCTQLNRALTGIAVEQDKNTQEVFAQVKQIYKTPPIKDFGGFNFSQILPDPSKPSKRSFIEDLLFNKVTLADAGFIKQYGDCLGDIAARDLICAQKFNGLTVLPPLLTDEMIAQYTSALLAGTITSGWTFGAGAALQIPFAMQMAYRFNGIGVTQNVLYENQKLIANQFNSAIGKIQDSLSSTASALGKLQDVVNQNAQALNTLVKQLSSNFGAISSVLNDILSRLDPPEAEVQIDRLITGRLQSLQTYVTQQLIRAAEIRASANLAATKMSECVLGQSKRVDFCGKGYQLMSFPQSAPHGVVFLNVTYVPAQEKNFTTAPAICNDGKAHFPREGVFVSNGTNWFVTQRNFYEPQIITTDNTFVSGNCDVVIGIVNNTVYDPLQPELDSGGGGSDIIKLLNEQVNKEMQSSNLYMSMSSWCYTHSLDGAGLFLFDHAAEEYEHAKKLIIFLNENNVPVQLTSISAPEHKFEGLTQIFQKAYEHEQHISESINNIVDHAIKSKDHATFNFLQWYVAEQHEEEVLFKDILDKIELIGNENHGLYLADQYVKGIAKSRKS

SEQ ID NO: 8934 - protein, 1315 aa, Artificial Sequence
  SARS-CoV-2/Hong Kong/case85_VM20002868/2020__EPI_ISL_414519 spike protein (1-1147)(K986P_V987P_ H1048Q_H1064N_ H1083N_H1101N) Ferritin construct
MFVFLVLVPLVSSQCVNLTTRTQLPPAYTNSFTRGVYYPDKVFRSSVLHSTQDLFLPFFSNVTWFHAIHVSGTNGTKRFDNPVLPFNDGVYFASTEKSNIIRGWIFGTTLDSKTQSLLIVNNATNVVIKVCEFQFCNDPFLGVYYHKNNKSWMESEFRVYSSANNCTFEYVSQPFLMDLEGKQGNFKNLREFVFKNIDGYFKIYSKHTPINLVRDLPQGFSALEPLVDLPIGINITRFQTLLALHRSYLTPGDSSSGWTAGAAAYYVGYLQPRTFLLKYNENGTITDAVDCALDPLSETKCTLKSFTVEKGIYQTSNFRVQPTESIVRFPNITNLCPFGEVFNATRFASVYAWNRKRISNCVADYSVLYNSASFSTFKCYGVSPTKLNDLCFTNVYADSFVIRGDEVRQIAPGQTGKIADYNYKLPDDFTGCVIAWNSNNLDSKVGGNYNYLYRLFRKSNLKPFERDISTEIYQAGSTPCNGVEGFNCYFPLQSYGFQPTNGVGYQPYRVVVLSFELLHAPATVCGPKKSTNLVKNKCVNFNFNGLTGTGVLTESNKKFLPFQQFGRDIADTTDAVRDPQTLEILDITPCSFGGVSVITPGTNTSNQVAVLYQDVNCTEVPVAIHADQLTPTWRVYSTGSNVFQTRAGCLIGAEHVNNSYECDIPIGAGICASYQTQTNSPRRARSVASQSIIAYTMSLGAENSVAYSNNSIAIPTNFTISVTTEILPVSMTKTSVDCTMYICGDSTECSNLLLQYGSFCTQLNRALTGIAVEQDKNTQEVFAQVKQIYKTPPIKDFGGFNFSQILPDPSKPSKRSFIEDLLFNKVTLADAGFIKQYGDCLGDIAARDLICAQKFNGLTVLPPLLTDEMIAQYTSALLAGTITSGWTFGAGAALQIPFAMQMAYRFNGIGVTQNVLYENQKLIANQFNSAIGKIQDSLSSTASALGKLQDVVNQNAQALNTLVKQLSSNFGAISSVLNDILSRLDPPEAEVQIDRLITGRLQSLQTYVTQQLIRAAEIRASANLAATKMSECVLGQSKRVDFCGKGYQLMSFPQSAPHGVVFLNVTYVPAQEKNFTTAPAICNDGKAHFPREGVFVSNGTNWFVTQRNFYEPQIITTDNTFVSGNCDVVIGIVNNTVYDPLQPELDSGGGGSDIIKLLNEQVNKEMQSSNLYMSMSSWCYTHSLDGAGLFLFDHAAEEYEHAKKLIIFLNENNVPVQLTSISAPEHKFEGLTQIFQKAYEHEQHISESINNIVDHAIKSKDHATFNFLQWYVAEQHEEEVLFKDILDKIELIGNENHGLYLADQYVKGIAKSRKS

SEQ ID NO: 8935 - protein, 1315 aa, Artificial Sequence; identical to SEQ ID NO: 8925
  SARS-CoV-2/England/200990660/2020__EPI_ISL_414523 spike protein (1-1147)(K986P_V987P_ H1048Q_H1064N_ H1083N_H1101N) Ferritin construct

SEQ ID NO: 8936 - protein, 1315 aa, Artificial Sequence
  SARS-CoV-2/Australia/NSW09/2020__EPI_ISL_413595 spike protein (1-1147)(K986P_V987P_ H1048Q_H1064N_ H1083N_H1101N) Ferritin construct
MFVFLVLLPLVSSQCVNLTTRTQLPPAYTNSFTRGVYYPDKVFRSSVLHSTQDLFLPFFSNVTWFHAIHVSGTNGTKRFDNPVLPFNDGVYFASTEKSNIIRGWIFGTTLDSKTQSLLIVNNATNVVIKVCEFQFCNDPFLGVYYHKNNKSWMESEFRVYSSANNCTFEYVSQPFLMDLEGKQGNFKNLREFVFKNIDGYFKIYSKHTPINLVRDLPQGFSALEPLVDLPIGINITRFQTLLALHRSYLTPGDSSSGWTAGAAAYYVGYLQPRTFLLKYNENGTITDAVDCALDPLSETKCTLKSFTVEKGIYQTSNFRVQPTESIVRFPNITNLCPFGEVFNATRFASVYAWNRKRISNCVADYSVLYNSASFSTFKCYGVSPTKLNDLCFTNVYADSFVIRGDEVRQIAPGQTGKIADYNYKLPDDFTGCVIAWNSNNLDSKVGGNYNYLYRLFRKSNLKPFERDISTEIYQAGSTPCNGVEGFNCYFPLQSYGFQPTNGVGYQPYRVVVLSFELLHAPATVCGPKKSTNLVKNKCVNFNFNGLTGTGVLTESNKKFLPFQQFGRDIADTTDAVRDPQTLEILDITPCSFGGVSVITPGTNTSNQVAVLYQDVNCTEVPVAIHADQLTPTWRVYSTGSNVFQTRAGCLIGAEHVNNSYECDIPIGAGICASYQTQTNSPRRARSVASQSIIAYTMSLGAENSVAYSNNSIAIPTNFTISVTTEILPVSMTKTSVDCTMYICGDSTECSNLLLQYGSFCTQLNRALTGIAVEQDKNTQEVFAQVKQIYKTPPIKDFGGFNFSQILPDPSKPSKRSFIEDLLFNKVTLADAGFIKQYGDCLGDIAARDLICAQKFNGLTVLPPLLTDEMIAQYTSALLAGTITSGWTFGAGAALQIPFAMQMAYRFNGIGVTQNVLYENQKLIANQFNSAIGKIQDSLSFTASALGKLQDVVNQNAQALNTLVKQLSSNFGAISSVLNDILSRLDPPEAEVQIDRLITGRLQSLQTYVTQQLIRAAEIRASANLAATKMSECVLGQSKRVDFCGKGYQLMSFPQSAPHGVVFLNVTYVPAQEKNFTTAPAICNDGKAHFPREGVFVSNGTNWFVTQRNFYEPQIITTDNTFVSGNCDVVIGIVNNTVYDPLQPELDSGGGGSDIIKLLNEQVNKEMQSSNLYMSMSSWCYTHSLDGAGLFLFDHAAEEYEHAKKLIIFLNENNVPVQLTSISAPEHKFEGLTQIFQKAYEHEQHISESINNIVDHAIKSKDHATFNFLQWYVAEQHEEEVLFKDILDKIELIGNENHGLYLADQYVKGIAKSRKS

SEQ ID NO: 8937 - protein, 1315 aa, Artificial Sequence; identical to SEQ ID NO: 8917
  SARS-CoV-2/Australia/NSW10/2020__EPI_ISL_413596 spike protein (1-1147)(K986P_V987P_ H1048Q_H1064N_ H1083N_H1101N) Ferritin construct

SEQ ID NO: 8938 - protein, 1315 aa, Artificial Sequence
  SARS-CoV-2/Switzerland/1000477797/2020__EPI_ISL_413023 spike protein (1-1147)(K986P_V987P_ H1048Q_H1064N_ H1083N_H1101N) Ferritin construct
MFVFLVLLPLVSSQCVNLTTRTQLPPAYTNSFTRGVYYPDKVFRSSVLHSTQDLFLPFFSNVTWFHAIHVSGTNGTKRFDNPVLPFNDGVYFASTEKSNIIRGWIFGTTLDSKTQSLLIVNNATNVVIKVCEFQFCNDPFLGVYYHKNNKSWMESEFRVYSSANNCTFEYVSQPFLMDLEGKQGNFKNLREFVFKNIDGYFNIYSKHTPINLVRDLPQGFSALEPLVDLPIGINITRFQTLLALHRSYLTPGDSSSGWTAGAAAYYVGYLQPRTFLLKYNENGTITDAVDCALDPLSETKCTLKSFTVEKGIYQTSNFRVQPTESIVRFPNITNLCPFGEVFNATRFASVYAWNRKRISNCVADYSVLYNSASFSTFKCYGVSPTKLNDLCFTNVYADSFVIRGDEVRQIAPGQTGKIADYNYKLPDDFTGCVIAWNSNNLDSKVGGNYNYLYRLFRKSNLKPFERDISTEIYQAGSTPCNGVEGFNCYFPLQSYGFQPTNGVGYQPYRVVVLSFELLHAPATVCGPKKSTNLVKNKCVNFNFNGLTGTGVLTESNKKFLPFQQFGRDIADTTDAVRDPQTLEILDITPCSFGGVSVITPGTNTSNQVAVLYQGVNCTEVPVAIHADQLTPTWRVYSTGSNVFQTRAGCLIGAEHVNNSYECDIPIGAGICASYQTQTNSPRRARSVASQSIIAYTMSLGAENSVAYSNNSIAIPTNFTISVTTEILPVSMTKTSVDCTMYICGDSTECSNLLLQYGSFCTQLNRALTGIAVEQDKNTQEVFAQVKQIYKTPPIKDFGGFNFSQILPDPSKPSKRSFIEDLLFNKVTLADAGFIKQYGDCLGDIAARDLICAQKFNGLTVLPPLLTDEMIAQYTSALLAGTITSGWTFGAGAALQIPFAMQMAYRFNGIGVTQNVLYENQKLIANQFNSAIGKIQDSLSSTASALGKLQDVVNQNAQALNTLVKQLSSNFGAISSVLNDILSRLDPPEAEVQIDRLITGRLQSLQTYVTQQLIRAAEIRASANLAATKMSECVLGQSKRVDFCGKGYQLMSFPQSAPHGVVFLNVTYVPAQEKNFTTAPAICNDGKAHFPREGVFVSNGTNWFVTQRNFYEPQIITTDNTFVSGNCDVVIGIVNNTVYDPLQPELDSGGGGSDIIKLLNEQVNKEMQSSNLYMSMSSWCYTHSLDGAGLFLFDHAAEEYEHAKKLIIFLNENNVPVQLTSISAPEHKFEGLTQIFQKAYEHEQHISESINNIVDHAIKSKDHATFNFLQWYVAEQHEEEVLFKDILDKIELIGNENHGLYLADQYVKGIAKSRKS

SEQ ID NO: 8939 - protein, 1315 aa, Artificial Sequence
  SARS-CoV-2/Belgium/BA-02291/2020__EPI_ISL_415159 spike protein (1-1147)(K986P_V987P_ H1048Q_H1064N_ H1083N_H1101N) Ferritin construct
MFVFLVLLPLVSSQCVNLTTRTQLPPAYTNSFTRGVYYPDKVFRSSVLHSTQDLFLPFFSNVTWFHAIHVSGTNGTKRFDNPVLPFNDGVYFASTEKSNIIRGWIFGTTLDSKTQSLLIVNNATNVVIKVCEFQFCNDPFLGVYYHKNNKSWMESEFRVYSSANNCTFEYVSQPFLMDLEGKQGNFKNLREFVFKNIDGYFKIYSKHTPINLVRDLPQGFSALEPLVDLPIGINITRFQTLLALHRSYLTPGDSSSGWTAGAAAYYVGYLQPRTFLLKYNENGTITDAVDCALDPLSETKCTLKSFTVEKGIYQTSNFRVQPTESIVRFPNITNLCPFGEVFNATRFASVYAWNRKRISNCVADYSVLYNSASFSTFKCYGVSPTKLNDLCFTNVYADSFVIRGDEVRQIAPGQTGKIADYNYKLPDDFTGCVIAWNSNNLDSKVGGNYNYLYRLFRRSNLKPFERDISTEIYQAGSTPCNGVEGFNCYFPLQSYGFQPTNGVGYQPYRVVVLSFELLPAPATVCGPKKSTNLVKNKCVNFNFNGLTGTGVLTESNKKFLPFQQFGRDIADTTDAVRDPQTLEILDITPCSFGGVSVITPGTNTSNQVAVLYQGVNCTEVPVAIHADQLTPTWRVYSTGSNVFQTRAGCLIGAEHVNNSYECDIPIGAGICASYQTQTNSPRRARSVASQSIIAYTMSLGAENSVAYSNNSIAIPTNFTISVTTEILPVSMTKTSVDCTMYICGDSTECSNLLLQYGSFCTQLNRALTGIAVEQDKNTQEVFAQVKQIYKTPPIKDFGGFNFSQILPDPSKPSKRSFIEDLLFNKVTLADAGFIKQYGDCLGDIAARDLICAQKFNGLTVLPPLLTDEMIAQYTSALLAGTITSGWTFGAGAALQIPFAMQMAYRFNGIGVTQNVLYENQKLIANQFNSAIGKIQDSLSSAAPALGKLQDVVNQNAQALNTLVKQLSSNFGAISSVLNDILSRLDPPEAEVQIDRLITGRLQSLQTYVTQQLIRAAEIRASANLAATKMSECVLGQSKRVDFCGKGYQLMSFPQSAPHGVVFLNVTYVPAQEKNFTTAPAICNDGKAHFPREGVFVSNGTNWFVTQRNFYEPQIITTDNTFVSGNCDVVIGIVNNTVYDPLQPELDSGGGGSDIIKLLNEQVNKEMQSSNLYMSMSSWCYTHSLDGAGLFLFDHAAEEYEHAKKLIIFLNENNVPVQLTSISAPEHKFEGLTQIFQKAYEHEQHISESINNIVDHAIKSKDHATFNFLQWYVAEQHEEEVLFKDILDKIELIGNENHGLYLADQYVKGIAKSRKS

SEQ ID NO: 8940 - protein, 1315 aa, Artificial Sequence
  SARS-CoV-2/USA/WA8-UW5/2020__EPI_ISL_413486 spike protein (1-1147)(K986P_V987P_ H1048Q_H1064N_ H1083N_H1101N) Ferritin construct
MFVFLVLLPLVSSQCVNLTTRTQLPPAYTNSFTRGVYYPDKVFRSSVLHSTQDLFLPFFSNVTWFHAIHVSGTNGTKRFDNPVLPFNDGVYFASTEKSNIIRGWIFGTTLDSKTQSLLIVNNATNVVIKVCEFQFCNDPFLGVYYHKNNKSWMESEFRVYSSANNCTFEYVSQPFLMDLEGKQGNFKNLREFVFKNIDGYFKIYSKHTPINLVRDLPQGFSALEPLVDLPIGINITRFQTLLALHRSYLTPGDSSSGWTAGAAAYYVGYLQPRTFLLKYNENGTITDAVDCALDPLSETKCTLKSFTVEKGIYQTSNFRVQPTESIVRFPNITNLCPFGEVFNATRFASVYAWNRKRISNCVADYSVLYNSASFSTFKCYGVSPTKLNDLCFTNVYADSFVIRGDEVRQIAPGQTGKIADYNYKLPDDFTGCVIAWNSNNLDSKVGGNYNYLYRLFRKSNLKPFERDISTEIYQAGSTPCNGVEGFNCYFPLQSYGFQPTNGVGYQPYRVVVLSFELLHAPATVCGPKKSTNLVKNKCVNFNFNGLTGTGVLTESNKKFLPFQQFGRDIADTTDAVRDPQTLEILDITPCSFGGVSVITPGTNTSNQVAVLYQDVNCTEVPVAIHADQLTPTWRVYSTGSNVFQTRAGCLIGAEYVNNSYECDIPIGAGICASYQTQTNSPRRARSVASQSIIAYTMSLGAENSVAYSNNSIAIPTNFTISVTTEILPVSMTKTSVDCTMYICGDSTECSNLLLQYGSFCTQLNRALTGIAVEQDKNTQEVFAQVKQIYKTPPIKDFGGFNFSQILPDPSKPSKRSFIEDLLFNKVTLADAGFIKQYGDCLGDIAARDLICAQKFNGLTVLPPLLTDEMIAQYTSALLAGTITSGWTFGAGAALQIPFAMQMAYRFNGIGVTQNVLYENQKLIANQFNSAIGKIQDSLSSTASALGKLQDVVNQNAQALNTLVKQLSSNFGAISSVLNDILSRLDPPEAEVQIDRLITGRLQSLQTYVTQQLIRAAEIRASANLAATKMSECVLGQSKRVDFCGKGYQLMSFPQSAPHGVVFLNVTYVPAQEKNFTTAPAICNDGKAHFPREGVFVSNGTNWFVTQRNFYEPQIITTDNTFVSGNCDVVIGIVNNTVYDPLQPELDSGGGGSDIIKLLNEQVNKEMQSSNLYMSMSSWCYTHSLDGAGLFLFDHAAEEYEHAKKLIIFLNENNVPVQLTSISAPEHKFEGLTQIFQKAYEHEQHISESINNIVDHAIKSKDHATFNFLQWYVAEQHEEEVLFKDILDKIELIGNENHGLYLADQYVKGIAKSRKS

SEQ ID NO: 8941 - protein, 1315 aa, Artificial Sequence
  SARS-CoV-2/England/20102000506/2020__EPI_ISL_415147 spike protein (1-1147)(K986P_V987P_ H1048Q_H1064N_ H1083N_H1101N) Ferritin construct
MFVFLVLLPLVSSQCVNLTTRTQLPPAYTNSFTRGVYYPDKVFRSSVLHSTQDLFLPFFSNVTWFHAIHVSGTNGTKRFDNPVLPFNDGVYFASTEKSNIIRGWIFGTTLDSKTQSLLIVNNATNVVIKVCEFQFCNDPFLGVYYHKNNKSWMESEFRVYSSANNCTFEYVSQPFLMDLEGKQGNFKNLREFVFKNIDGYFKIYSKHTPINLVRDLPQGFSALEPLVDLPIGINITRFQTLLALHRSYLTPGDSSSGWTAGAAAYYVGYLQPRTFLLKYNENGTITDAVDCALDPLSETKCTLKSFTVEKGIYQTSNFRVQPTESIVRFPNITNLCPFGEVFNATRFASVYAWNRKRISNCVADYSVLYNSASFSTFKCYGVSPTKLNDLCFTNVYADSFVIRGDEVRQIAPGQTGKIADYNYKLPDDFTGCVIAWNSNNLDSKVGGNYNYLYRLFRKSNLKPFERDISTEIYQAGSTPCNGVEGFNCYFPLQSYGFQPTNGVGYQPYRVVVLSFELLHAPATVCGPKKSTNLVKNKCVNFNFNGLTGTGVLTESNKKFLPFQQFGRDIADTTDAVRDPQTLEILDITPCSFGGVSVITPGTNTSNQVAVLYQGVNCTEVPVAIHADQLTPTWRVYSTGSNVFQTRAGCLIGAEHVNNSYECDIPIGAGICASYQTQTNSPRRARSVASQSIIAYTMSLGAENSVAYSNNSIAIPTNFTISVTTEILPVSMTKTSVDCTMYICGDSTECSNLLLQYGSFCTQLNRALTGIAVEQDKNTQEVFAQVKQIYKTPPIKDFGGFNFSQILPDPSKPSKRSFIEDLLFNKVTLADAGFIKQYGYCLGDIAARDLICAQKFNGLTVLPPLLTDEMIAQYTSALLAGTITSGWTFGAGAALQIPFAMQMAYRFNGIGVTQNVLYENQKLIANQFNSAIGKIQDSLSSTASALGKLQDVVNQNAQALNTLVKQLSSNFGAISSVLNDILSRLDPPEAEVQIDRLITGRLQSLQTYVTQQLIRAAEIRASANLAATKMSECVLGQSKRVDFCGKGYQLMSFPQSAPHGVVFLNVTYVPAQEKNFTTAPAICNDGKAHFPREGVFVSNGTNWFVTQRNFYEPQIITTDNTFVSGNCDVVIGIVNNTVYDPLQPELDSGGGGSDIIKLLNEQVNKEMQSSNLYMSMSSWCYTHSLDGAGLFLFDHAAEEYEHAKKLIIFLNENNVPVQLTSISAPEHKFEGLTQIFQKAYEHEQHISESINNIVDHAIKSKDHATFNFLQWYVAEQHEEEVLFKDILDKIELIGNENHGLYLADQYVKGIAKSRKS

SEQ ID NO: 8942 - protein, 1315 aa, Artificial Sequence
  SARS-CoV-2/Belgium/VAG-03013/2020__EPI_ISL_415155 spike protein (1-1147)(K986P_V987P_ H1048Q_H1064N_ H1083N_H1101N) Ferritin construct
MFVFLVLLPLVSSQCVNLTTRTQLPPAYTNSFTRGVYYPDKVFRSSVLHSTQDLFLPFFSNVTWFHAIHVSGTNGTKRFDNPVLPFNDGVYFASTEKSNIIRGWIFGTTLDSKTQSLLIVNNATNVVIKVCEFQFCNDPFLGVYYHKNNKSWMESEFRVYSSANNCTFEYVSQPFLMDLEGKQGNFKNLREFVFKNIDGYFKIYSKHTPINLVRDLPQGFSALEPLVDLPIGINITRFQTLLALHRSYLTPGDSSSGWTAGAAAYYVGYLQPRTFLLKYNENGTITDAVDCALDPLSETKCTLKSFTVEKGIYQTSNFRVQPTESIVRFPNITNLCPFGEVFNATRFASVYAWNRKRISNCVADYSVLYNSASFSTFKCYGVSPTKLNDLCFTNVYADSFVIRGDEVRQIAPGQTGKIADYNYKLPDDFTGCVIAWNSNNLDSKVGGNYNYLYRLFRKSNLKPFERDISTEIYQAGSTPCNGVEGFNCYFPLQSYGFQPTNGVGYQPYRVVVLSFELLHAPATVCGPKKSTNLVKNKCVNFNFNGLTGTGVLTESNKKFLPFQQFGRDIADTTDAVRDPQTLEILDITPCSFGGVSVITPGTNTSNQVAVLYQGVNCTEVPVAIHADQLTPTWRVYSTGSNVFQTRAGCLIGAEHVNNSYECDIPIGAGICASYQTQTNSPRRARSVASQSIIAYTMSLGAENSVAYSNNSIAIPTNFTISVTTEILPVSMTKTSVDCTMYICGDSTECSNLLLQYGSFCTQLNRALTGIAVEQDKNTQEVFAQVKQIYKTPPIKDFGGFNFSQILPDPSKPSKRSFIEDLLFNKVTLADAGFIKQYGDCLGDIAARDLICAQKFNGLTVLPPLLTDEMIAQYTSALLAGTITSGWTFGAGAALQIPFAMQMAYRFNGIGVTQNVLYENQKLIANQFNSAIGKIQDSLSSTATALGKLQDVVNQNAQALNTLVKQLSSNFGAISSVLNDILSRLDPPEAEVQIDRLITGRLQSLQTYVTQQLIRAAEIRASANLAATKMSECVLGQSKRVDFCGKGYQLMSFPQSAPHGVVFLNVTYVPAQEKNFTTAPAICNDGKAHFPREGVFVSNGTNWFVTQRNFYEPQIITTDNTFVSGNCDVVIGIVNNTVYDPLQPELDSGGGGSDIIKLLNEQVNKEMQSSNLYMSMSSWCYTHSLDGAGLFLFDHAAEEYEHAKKLIIFLNENNVPVQLTSISAPEHKFEGLTQIFQKAYEHEQHISESINNIVDHAIKSKDHATFNFLQWYVAEQHEEEVLFKDILDKIELIGNENHGLYLADQYVKGIAKSRKS

SEQ ID NO: 8943 - protein, 1315 aa, Artificial Sequence
  SARS-CoV-2/Belgium/BC-03016/2020__EPI_ISL_415157 spike protein (1-1147)(K986P_V987P_ H1048Q_H1064N_ H1083N_H1101N) Ferritin construct
MFVFLVLLPLVSSQCVNLTTRTQLPPAYTNSFTRGVYYPDKVFRSSVLHSTQDLFLPFFSNVTWFHAIHVSGTNGTKRFDNPVLPFNDGVYFASTEKSNIIRGWIFGTTLDSKTQSLLIVNNATNVVIKVCEFQFCNDPFLGVYYHKNNKSWMESEFRVYSSANNCTFEYVSQPFLMDLEGKQGNFKNLREFVFKNIDGYFKIYSKHTPINLVRDLPQGFSALEPLVDLPIGINITRFQTLLALHRSYLTPGDSSSGWTAGAAAYYVGYLQPRTFLLKYNENGTITDAVDCALDPLSETKCTLKSFTVEKGIYQTSNFRVQPTESIVRFPNITNLCPFGEVFNATRFASVYAWNRKRISNCVADYSVLYNSASFSTFKCYGVSPTKLNDLCFTNVYADSFVIRGDEVRQIAPGQTGKIADYNYKLPDDFTGCVIAWNSNNLDSKVGGNYNYLYRLFRKSNLKPFERDISTEIYQAGSTPCNGVEGFNCYFPLQSYGFQPTNGVGYQPYRVVVLSFELLHAPATVCGPKKSTNLVKNKCVNFNFNGLTGTGVLTESNKKFLPFQQFGRDIADTTDAVRDPQTLEILDITPCSFGGVSVITPGTNTSNQVAVLYQGVNCTEVPVAIHADQLTPTWRVYSTGSNVFQTRAGCLIGAEHVNNSYECDIPIGAGICASYQTQTNSPRRARSVASQSIIAYTMSLGAENSVAYSNNSIAIPTNFTISVTTEILPVSMTKTSVDCTMYICGDSTECSNLLLQYGSFCTQLNRALTGIAVEQDKNTQEVFAQVKQIYKTPPIKDFGGFNFSQILPDPSKPSKRSFIEDLLFNKVTLADAGFIKQYGDCLGDIAARDLICAQKFNGLTVLPPLLTDEMIAQYTSALLAGTITSGWTFGAGAALQIPFAMQMAYRFNGIGVTQNVLYENQKLIANQFNSAIGKIQDSLSSTAPALGKLQDVVNQNAQALNTLVKQLSSNFGAISSVLNDILSRLDPPEAEVQIDRLITGRLQSLQTYVTQQLIRAAEIRASANLAATKMSECVLGQSKRVDFCGKGYQLMSFPQSAPHGVVFLNVTYVPAQEKNFTTAPAICNDGKAHFPREGVFVSNGTNWFVTQRNFYEPQIITTDNTFVSGNCDVVIGIVNNTVYDPLQPELDSGGGGSDIIKLLNEQVNKEMQSSNLYMSMSSWCYTHSLDGAGLFLFDHAAEEYEHAKKLIIFLNENNVPVQLTSISAPEHKFEGLTQIFQKAYEHEQHISESINNIVDHAIKSKDHATFNFLQWYVAEQHEEEVLFKDILDKIELIGNENHGLYLADQYVKGIAKSRKS

SEQ ID NO: 8944 - protein, 1315 aa, Artificial Sequence
  SARS-CoV-2/Germany/BavPat3/2020__EPI_ISL_414521 spike protein (1-1147)(K986P_V987P_ H1048Q_H1064N_ H1083N_H1101N) Ferritin construct
MFVFLVLLPLVSSQCVNLTTRTQLPPAYTNSFTRGVYYPDKVFRSSVLHSTQDLFLPFFSNVTWFHAIHVSGTNGTKRFDNPVLPFNDGVYFASTEKSNIIRGWIFGTTLDSKTQSLLIVNNATNVVIKVCEFQFCNDPFLGVYYHKNNKSWMESEFRVYSSANNCTFEYVSQPFLMDLEGKQGNFKNLREFVFKNIDGYFKIYSKHTPINLVRDLPQGFSALEPLVDLPIGINITRFQTLLALHRSYLTPGDSSSGWTAGAAAYYVGYLQPRTFLLKYNENGTITDAVDCALDPLSETKCTLKSFTVEKGIYQTSNFRVQPTESIVRFPNITNLCPFGEVFNATRFASVYAWNRKRISNCVADYSVLYNSASFSTFKCYGVSPTKLNDLCFTNVYADSFVIRGDEVRQIAPGQTGKIADYNYKLPDDFTGCVIAWNSNNLDSKVGGNYNYLYRLFRKSNLKPFERDISTEIYQAGSTPCNGVEGFNCYFPLQSYGFQPTNGVGYQPYRVVVLSFELLHAPATVCGPKKSTNLVKNKCVNFNFNGLTGTGVLTESNKKFLPFQQFGRDIADTTDAVRDPQTLEILDITPCSFGGVSVITPGTNTSNQVAVLYQDVNCTEVPVAIHADQLTPTWRVYSTGSNVFQTRAGCLIGAEHVNNSYECDIPIGAGICASYQTQTNSPRRARSVASQSIIAYTMSLGAENSVAYSNNSIAIPTNFTISVTTEILPVSMTKTSVDCTMYICGDSTECSNLLLQYGSFCTQLNRALTGIAVEQDKNTQQVFAQVKQIYKTPPIKDFGGFNFSQILPDPSKPSKRSFIEDLLFNKVTLADAGFIKQYGDCLGDIAARDLICAQKFNGLTVLPPLLTDEMIAQYTSALLAGTITSGWTFGAGAALQIPFAMQMAYRFNGIGVTQNVLYENQKLIANQFNSAIGKIQDSLSSTASALGKLQDVVNQNAQALNTLVKQLSSNFGAISSVLNDILSRLDPPEAEVQIDRLITGRLQSLQTYVTQQLIRAAEIRASANLAATKMSECVLGQSKRVDFCGKGYQLMSFPQSAPHGVVFLNVTYVPAQEKNFTTAPAICNDGKAHFPREGVFVSNGTNWFVTQRNFYEPQIITTDNTFVSGNCDVVIGIVNNTVYDPLQPELDSGGGGSDIIKLLNEQVNKEMQSSNLYMSMSSWCYTHSLDGAGLFLFDHAAEEYEHAKKLIIFLNENNVPVQLTSISAPEHKFEGLTQIFQKAYEHEQHISESINNIVDHAIKSKDHATFNFLQWYVAEQHEEEVLFKDILDKIELIGNENHGLYLADQYVKGIAKSRKS

SEQ ID NO: 8945 - protein, 1315 aa, Artificial Sequence
  SARS-CoV-2/France/HF1805/2020__EPI_ISL_414628 spike protein (1-1147)(K986P_V987P_ H1048Q_H1064N_ H1083N_H1101N) Ferritin construct
MFVFLVLLPLVSSQCVNLTTRTQLPPAYTNSFTRGVYYPDKVFRSSVLHSTQDLFLPFFSNVTWFHAIHVSGTNGTKRFDNPVLPFNDGVYFASTEKSNIIRGWIFGTTLDSKTQSLLIVNNATNVVIKVCEFQFCNDPFLGVYYHKNNKSWMESEFRVYSSANNCTFEYVSQPFLMDLEGKQGNFKNLREFVFKNIDGYFKIYSKHTPINLVRDLPQGFSALEPLVDLPIGINITRFQTLLALHRSYLTPGDSSSGWTAGAAAYYVGYLQPRTFLLKYNENGTITDAVDCALDPLSETKCTLKSFTVEKGIYQTSNFRVQPTESIVRFPNITNLCPFGEVFNATRFASVYAWNRKRISNCVADYSVLYNSASFSTFKCYGVSPTKLNDLCFTNVYADSFVIRGDEVRQIAPGQTGKIADYNYKLPDDFTGCVIAWNSNNLDSKVGGNYNYLYRLFRKSNLKPFERDISTEIYQAGSTPCNGVEGFNCYFPLQSYGFQPTNGVGYQPYRVVVLSFELLHAPATVCGPKKSTNLVKNKCVNFNFNGLTGTGVLTESNKKFLPFQQFGRDIADTTDAVRDPQTLEILDITPCSFGGVSVITPGTNTSNQVAVLYQGVNCTEVPVAIHADQLTPTWRVYSTGSNVFQTRAGCLIGAEHVNNSYECDIPIGAGICASYQTQTNSPRRARSVASQSIIAYTMSLGAENSVAYSNNSIAIPTNFTISVTTEILPVSMTKTSVDCTMYICGDSTECSNLLLQYGSFCTQLNRALTGIAVEQDKNTQEVFAQVKQIYKTPPIKDFGGFNFSQILPDPSKPSKRSFIEDLLFNKVTLADAGFIKQYGDCLGDIAARDLICAQKFNGLTVLPPLLTDEMIAQYTSALLAGTITSGWTFGAGAALQIPFAMQMAYRFNGIGVTQNVLYENQKLIANQFNSAIGKIQDSLSSTASALGKLQDVVNQNAQALNTLVKQLSSNFGAISSVLNDILSRLDPPEAEVQIDRLITGRLQSLQTYVTQQLIRAAEIRASANLAATKMSECVLGQSKRVDFCGKGYQLMSFPQSAPHGVVFLNVTYVPAQEKNFTTAPAICNDGKAHFPREGVFVSNGTNWFVTQRNFYEPQIITTDNTFVSGNCDVVIGVVNNTVYDPLQPELDSGGGGSDIIKLLNEQVNKEMQSSNLYMSMSSWCYTHSLDGAGLFLFDHAAEEYEHAKKLIIFLNENNVPVQLTSISAPEHKFEGLTQIFQKAYEHEQHISESINNIVDHAIKSKDHATFNFLQWYVAEQHEEEVLFKDILDKIELIGNENHGLYLADQYVKGIAKSRKS

SEQ ID NO: 8946 - protein, 1315 aa, Artificial Sequence
  SARS-CoV-2/Netherlands/ZuidHolland_9/2020__EPI_ISL_414445 spike protein (1-1147)(K986P_V987P_ H1048Q_H1064N_ H1083N_H1101N) Ferritin construct
MFVFLVLLPLVSSQCVNLTTRTQLPPAYTNSFTRGVYYPDKVFRSSVLHSTQDLFLPFFSNVTWFHAIHVSGTNGTKRFDNPVLPFNDGVYFASTEKSNIIRGWIFGTTLDSKTQSLLIVNNATNVVIKVCEFQFCNDPFLGVYYHKNNKSWMESEFRVYSSANNCTFEYVSQPFLMDLEGKQGNFKNLREFVFKNIDGYFKIYSKHTPINLVRDLPQGFSALEPLVDLPIGINITRFQTLLALHRSYLTPGDSSSGWTAGAAAYYVGYLQPRTFLLKYNENGTITDAVDCALDPLSETKCTLKSFTVEKGIYQTSNFRVQPTESIVRFPNITNLCPFGEVFNATRFASVYAWNRKRISNCVADYSVLYNSASFSTFKCYGVSPTKLNDLCFTNVYADSFVIRGDEVRQIAPGQTGKIADYNYKLPDDFTGCVIAWNSNNLDSKVGGNYNYLYRLFRKSNLKPFERDISTEIYQAGSTPCNGVEGFNCYFPLQSYGFQPTNGVGYQPYRVVVLSFELLHAPATVCGPKKSTNLVKNKCVNFNFNGLTGTGVLTESNKKFLPFQQFGRDIADTTDAVRDPQTLEILDITPCSFGGVSVITPGTNTSNQVAVLYQGVNCTEVPVAIHADQLTPTWRVYSTGSNVFQTRAGCLIGAEHVNNSYECDIPIGAGICASYQTQTNSPRRARSVASQSIIAYTMSLGAENSVAYSNNSIAIPTNFTISVTTEILPVSMTKTSVDCTMYICGDSTECSNLLLQYGSFCTQLNRALTGIAVEQDKNTQEVFAQVKQIYKTPPIKDFGGFNFSQILPDPSKPSKRSFIEDLLFNKVTLADAGFIKQYGDCLGDIAARDLICVQKFNGLTVLPPLLTDEMIAQYTSALLAGTITSGWTFGAGAALQIPFAMQMAYRFNGIGVTQNVLYENQKLIANQFNSAIGKIQDSLSSTASALGKLQDVVNQNAQALNTLVKQLSSNFGAISSVLNDILSRLDPPEAEVQIDRLITGRLQSLQTYVTQQLIRAAEIRASANLAATKMSECVLGQSKRVDFCGKGYQLMSFPQSAPHGVVFLNVTYVPAQEKNFTTAPAICNDGKAHFPREGVFVSNGTNWFVTQRNFYEPQIITTDNTFVSGNCDVVIGIVNNTVYDPLQPELDSGGGGSDIIKLLNEQVNKEMQSSNLYMSMSSWCYTHSLDGAGLFLFDHAAEEYEHAKKLIIFLNENNVPVQLTSISAPEHKFEGLTQIFQKAYEHEQHISESINNIVDHAIKSKDHATFNFLQWYVAEQHEEEVLFKDILDKIELIGNENHGLYLADQYVKGIAKSRKS

SEQ ID NO: 8947 - protein, 1315 aa, Artificial Sequence
  SARS-CoV-2/Finland/FIN03032020A/2020__EPI_ISL_413602 spike protein (1-1147)(K986P_V987P_ H1048Q_H1064N_ H1083N_H1101N) Ferritin construct
MFVFLVLLPLVSSQCVNLTTRTQLPPAYTNSFTRGVYYPDKVFRSSVLHSTQDLFLPFFSNVTWFHAIHVSGTNGTKRFDNPVLPFNDGVYFASTEKSNIIRGWIFGTTLDSKTQSLLIVNNATNVVIKVCEFQFCNDPFLGVYYHKNNKSWMESEFRVYSSANNCTFEYVSQPFLMDLEGKQGNFKNLREFVFKNIDGYFKIYSKHTPINLVRDLPQGFSALEPLVDLPIGINITRFQTLLALHRSYLTPGDSSSGWTAGAAAYYVGYLQPRTFLLKYNENGTITDAVDCALDPLSETKCTLKSFTVEKGIYQTSNFRVQPTESIVRFPNITNLCPFGEVFNATRFASVYAWNRKRISNCVADYSVLYNSASFSTFKCYGVSPTKLNDLCFTNVYADSFVIRGDEVRQIAPGQTGKIADYNYKLPDDFTGCVISWNSNNLDSKVGGNYNYLYRLFRKSNLKPFERDISTEIYQAGSTPCNGVEGFNCYFPLQSYGFQPTNGVGYQPYRVVVLSFELLHAPATVCGPKKSTNLVKNKCVNFNFNGLTGTGVLTESNKKFLPFQQFGRDIADTTDAVRDPQTLEILDITPCSFGGVSVITPGTNTSNQVAVLYQGVNCTEVPVAIHADQLTPTWRVYSTGSNVFQTRAGCLIGAEHVNNSYECDIPIGAGICASYQTQTNSPRRARSVASQSIIAYTMSLGAENSVAYSNNSIAIPTNFTISVTTEILPVSMTKTSVDCTMYICGDSTECSNLLLQYGSFCTQLNRALTGIAVEQDKNTQEVFAQVKQIYKTPPIKDFGGFNFSQILPDPSKPSKRSFIEDLLFNKVTLADAGFIKQYGDCLGDIAARDLICAQKFNGLTVLPPLLTDEMIAQYTSALLAGTITSGWTFGAGAALQIPFAMQMAYRFNGIGVTQNVLYENQKLIANQFNSAIGKIQDSLSSTASALGKLQDVVNQNAQALNTLVKQLSSNFGAISSVLNDILSRLDPPEAEVQIDRLITGRLQSLQTYVTQQLIRAAEIRASANLAATKMSECVLGQSKRVDFCGKGYQLMSFPQSAPHGVVFLNVTYVPAQEKNFTTAPAICNDGKAHFPREGVFVSNGTNWFVTQRNFYEPQIITTDNTFVSGNCDVVIGIVNNTVYDPLQPELDSGGGGSDIIKLLNEQVNKEMQSSNLYMSMSSWCYTHSLDGAGLFLFDHAAEEYEHAKKLIIFLNENNVPVQLTSISAPEHKFEGLTQIFQKAYEHEQHISESINNIVDHAIKSKDHATFNFLQWYVAEQHEEEVLFKDILDKIELIGNENHGLYLADQYVKGIAKSRKS

SEQ ID NO: 8948 - protein, 1315 aa, Artificial Sequence
  SARS-CoV-2/France/GE1977/2020__EPI_ISL_414632 spike protein (1-1147)(K986P_V987P_ H1048Q_H1064N_ H1083N_H1101N) Ferritin construct
MFVFLVLLPLVSSQCVNLTTRTQLPPAYTNSFTRGVYYPDKVFRSSVLHSTQDLFLPFFSNVTWFHAIHVSGTNGTKRFDNPVLPFNDGVYFASTEKSNIIRGWIFGTTLDSKTQSLLIVNNATNVVIKVCEFQFCNDPFLGVYYHKNNKSWMESEFRVYSSANNCTFEYVSQPFLMDLEGKQGNFKNLREFVFKNIDGYFKIYSKHTPINLVRDLPQGFSALEPLVDLPIGINITRFQTLLALHRSYLTPGDSSSGWTAGAAAYYVGYLQPRTFLLKYNENGTITDAVDCALDPLSETKCTLKSFTVEKGIYQTSNFRVQPTESIVRFPNITNLCPFGEVFNATRFASVYAWNRKRISNCVADYSVLYNSASFSTFKCYGVSPTKLNDLCFTNVYADSFVIRGDEVRQIAPGQTGKIADYNYKLPDDFTGCVIAWNSNNLDSKVGGNYNYLYRLFRKSNLKPFERDISTEIYQAGSTPCNGVEGFNCYFPLQSYGFQPTNGVGYQPYRVVVLSFELLHAPATVCGPKKSTNLVKNKCVNFNFNGLTGTGVLTESNKKFLPFQQFGRDIADTTDAVRDPQTLEILDITPCSFGGVSVITPGTNTSNQVAVLYQGVNCTEVPVAIHADQLTPTWRVYSTGSNVFQTRAGCLIGAEHVNNSYECDIPIGAGICASYQTQTNSPRRARSVASQSIIAYTMSLGAENSVAYSNNSIAIPTNFTISVTTEILPVSMTKTSVDCTMYICGDSTECSNLLLQYGSFCTQLNRALTGIAVEQDKNTQEVFAQVKQIYKTPPIKDFGGFNFSQILPDPSKPSKRSFIEDLLFNKVTLADAGFIKQYGDCLGDIAARDLICAQKFNGLTVLPPLLTDEMIAQYTSALLAGTITSGWTFGAGAALQIPFAMQMAYRFNGIGVTQNVLYENQKLIANQFNSAIGKIQDSLFSTASALGKLQDVVNQNAQALNTLVKQLSSNFGAISSVLNDILSRLDPPEAEVQIDRLITGRLQSLQTYVTQQLIRAAEIRASANLAATKMSECVLGQSKRVDFCGKGYQLMSFPQSAPHGVVFLNVTYVPAQEKNFTTAPAICNDGKAHFPREGVFVSNGTNWFVTQRNFYEPQIITTDNTFVSGNCDVVIGIVNNTVYDPLQPELDSGGGGSDIIKLLNEQVNKEMQSSNLYMSMSSWCYTHSLDGAGLFLFDHAAEEYEHAKKLIIFLNENNVPVQLTSISAPEHKFEGLTQIFQKAYEHEQHISESINNIVDHAIKSKDHATFNFLQWYVAEQHEEEVLFKDILDKIELIGNENHGLYLADQYVKGIAKSRKS

SEQ ID NO: 8949 - protein, 1315 aa, Artificial Sequence
  SARS-CoV-2/Finland/FIN-313/2020__EPI_ISL_414641 spike protein (1-1147)(K986P_V987P_ H1048Q_H1064N_ H1083N_H1101N) Ferritin construct
MFVFLVLLPLVSSQCVNLTTRTQLPPAYTNSFTRGVYYPDKVFRSSVLHSTQDLFLPFFSNVTWFHAIHVSGTNGTKRFDNPVLPFNDGVYFASTEKSNIIRGWIFGTTLDSKTQSLLIVNNATNVVIKVCEFQFCNDPFLGVYYHKNNKSWMESEFRVYSSANNCTFEYVSQPFLMDLEGKQGNFKNLREFVFKNIDGYFKIYSKHTPINLVRDLPQGFSALEPLVDLPIGINITRFKTLLALHRSYLTPGDSSSGWTAGAAAYYVGYLQPRTFLLKYNENGTITDAVDCALDPLSETKCTLKSFTVEKGIYQTSNFRVQPTESIVRFPNITNLCPFGEVFNATRFASVYAWNRKRISNCVADYSVLYNSASFSTFKCYGVSPTKLNDLCFTNVYADSFVIRGDEVRQIAPGQTGKIADYNYKLPDDFTGCVIAWNSNNLDSKVGGNYNYLYRLFRKSNLKPFERDISTEIYQAGSTPCNGVEGFNCYFPLQSYGFQPTNGVGYQPYRVVVLSFELLHAPATVCGPKKSTNLVKNKCVNFNFNGLTGTGVLTESNKKFLPFQQFGRDIADTTDAVRDPQTLEILDITPCSFGGVSVITPGTNTSNQVAVLYQGVNCTEVPVAIHADQLTPTWRVYSTGSNVFQTRAGCLIGAEHVNNSYECDIPIGAGICASYQTQTNSPRRARSVASQSIIAYTMSLGAENSVAYSNNSIAIPTNFTISVTTEILPVSMTKTSVDCTMYICGDSTECSNLLLQYGSFCTQLNRALTGIAVEQDKNTQEVFAQVKQIYKTPPIKDFGGFNFSQILPDPSKPSKRSFIEDLLFNKVTLADAGFIKQYGDCLGDIAARDLICAQKFNGLTVLPPLLTDEMIAQYTSALLAGTITSGWTFGAGAALQIPFAMQMAYRFNGIGVTQNVLYENQKLIANQFNSAIGKIQDSLSSTASALGKLQDVVNQNAQALNTLVKQLSSNFGAISSVLNDILSRLDPPEAEVQIDRLITGRLQSLQTYVTQQLIRAAEIRASANLAATKMSECVLGQSKRVDFCGKGYQLMSFPQSAPHGVVFLNVTYVPAQEKNFTTAPAICNDGKAHFPREGVFVSNGTNWFVTQRNFYEPQIITTDNTFVSGNCDVVIGIVNNTVYDPLQPELDSGGGGSDIIKLLNEQVNKEMQSSNLYMSMSSWCYTHSLDGAGLFLFDHAAEEYEHAKKLIIFLNENNVPVQLTSISAPEHKFEGLTQIFQKAYEHEQHISESINNIVDHAIKSKDHATFNFLQWYVAEQHEEEVLFKDILDKIELIGNENHGLYLADQYVKGIAKSRKS

SEQ ID NO: 8950 - protein, 1315 aa, Artificial Sequence
  SARS-CoV-2/Netherlands/ZuidHolland_2/2020__EPI_ISL_414556 spike protein (1-1147)(K986P_V987P_ H1048Q_H1064N_ H1083N_H1101N) Ferritin construct
MFVFLVLLPLVSSQCVNLTTRTQLPPAYTNSFTRGVYYPDKVFRSSVLHSTQDLFLPFFSNVTWFHAIHVSGTNGTKRFDNPVLPFNDGVYFASTEKSNIIRGWIFGTTLDSKTQSLLIVNNATNVVIKVCEFQFCNDPFLGVYYHKNNKSWMESEFRVYSSANNCTFEYVSQPFLMDLEGKQGNFKNLREFVFKNIDGYFKIYSKHTPINLVRDLPQGFSALEPLVDLPIGINITRFQTLLALHRSYLTPGDSSSGWTAGAAAYYVGYLQPRTFLLKYNENGTITDAVDCALDPLSETKCTLKSFTVEKGIYQTSNFRVQPTESIVRFPNITNLCPFGEVFNATRFASVYAWNRKRISNCVADYSVLYNSASFSTFKCYGVSPTKLNDLCFTNVYADSFVIRGDEVRQIAPGQTGKIADYNYKLPDDFTGCVIAWNSNNLDSKVGGNYNYLYRLFRKSNLKPFERDISTEIYQAGSTPCNGVEGFNCYFPLQSYGFQPTNGVGYQPYRVVVLSFELLHAPATVCGPKKSTNLVKNKCVNFNFNGLTGTGVLTESNKKFLPFQQFGRDIADTTDAVRDPQTLEILDITPCSFGGVSVITPGTNTSNQVAVLYQGVNCTEVPVAIHADQLTPTWRVYSTGSNVFQTRAGCLIGAEHVNNSYECDIPIGAGICASYQTQTNSPRRARSVASQSIIAYTMSLGAENSVAYSNNSIAIPTNFTISVTTEILPVSMTKTSVDCTMYICGDSTECSNLLLQYGSFCTQLNRALTGIALEQDKNTQEVFAQVKQIYKTPPIKDFGGFNFSQILPDPSKPSKRSFIEDLLFNKVTLADAGFIKQYGDCLGDIAARDLICAQKFNGLTVLPPLLTDEMIAQYTSALLAGTITSGWTFGAGAALQIPFAMQMAYRFNGIGVTQNVLYENQKLIANQFNSAIGKIQDSLSSTASALGKLQDVVNQNAQALNTLVKQLSSNFGAISSVLNDILSRLDPPEAEVQIDRLITGRLQSLQTYVTQQLIRAAEIRASANLAATKMSECVLGQSKRVDFCGKGYQLMSFPQSAPHGVVFLNVTYVPAQEKNFTTAPAICNDGKAHFPREGVFVSNGTNWFVTQRNFYEPQIITTDNTFVSGNCDVVIGIVNNTVYDPLQPELDSGGGGSDIIKLLNEQVNKEMQSSNLYMSMSSWCYTHSLDGAGLFLFDHAAEEYEHAKKLIIFLNENNVPVQLTSISAPEHKFEGLTQIFQKAYEHEQHISESINNIVDHAIKSKDHATFNFLQWYVAEQHEEEVLFKDILDKIELIGNENHGLYLADQYVKGIAKSRKS

SEQ ID NO: 8951 - protein, 1315 aa, Artificial Sequence
  SARS-CoV-2/USA/WA-UW31/2020__EPI_ISL_414618 spike protein (1-1147)(K986P_V987P_ H1048Q_H1064N_ H1083N_H1101N) Ferritin construct
MFVFLVLLPLVSSQCVNLTTRTQLPPAYTNSFTRGVYYPDKVFRSSVLHSTQDLFLPFFSNVTWFHAIHVSGTNGTKRFDNPVLPFNDGVYFASTEKSNIIRGWIFGTTLDSKTQSLLIVNNATNVVIKVCEFQFCNDPFLGVYYHKNNKSWMESEFRVYSSANNCTFEYVSQPFLMDLEGKQGNFKNLREFVFKNIDGYFKIYSKHTPINLVRDLPQGFSALEPLVDLPIGINITRFQTLLALHRSYLTPGDSSSGWTAGAAAYYVGYLQPRTFLLKYNENGTITDAVDCALDPLSETKCTLKSFTVEKGIYQTSNFRVQPTESIVRFPNITNLCPFGEVFNATRFASVYAWNRKRISNCVADYSVLYNSASFSTFKCYGVSPTKLNDLCFTNVYADSFVIRGDEVRQIAPGQTGKIADYNYKLPDDFTGCVIAWNSNNLDSKVGGNYNYLYRLFRKSNLKPFERDISTEIYQAGSTPCNGAEGFNCYFPLQSYGFQPTNGVGYQPYRVVVLSFELLHAPATVCGPKKSTNLVKNKCVNFNFNGLTGTGVLTESNKKFLPFQQFGRDIADTTDAVRDPQTLEILDITPCSFGGVSVITPGTNTSNQVAVLYQDVNCTEVPVAIHADQLTPTWRVYSTGSNVFQTRAGCLIGAEHVNNSYECDIPIGAGICASYQTQTNSPRRARSVASQSIIAYTMSLGAENSVAYSNNSIAIPTNFTISVTTEILPVSMTKTSVDCTMYICGDSTECSNLLLQYGSFCTQLNRALTGIAVEQDKNTQEVFAQVKQIYKTPPIKDFGGFNFSQILPDPSKPSKRSFIEDLLFNKVTLADAGFIKQYGDCLGDIAARDLICAQKFNGLTVLPPLLTDEMIAQYTSALLAGTITSGWTFGAGAALQIPFAMQMAYRFNGIGVTQNVLYENQKLIANQFNSAIGKIQDSLSSTASALGKLQDVVNQNAQALNTLVKQLSSNFGAISSVLNDILSRLDPPEAEVQIDRLITGRLQSLQTYVTQQLIRAAEIRASANLAATKMSECVLGQSKRVDFCGKGYQLMSFPQSAPHGVVFLNVTYVPAQEKNFTTAPAICNDGKAHFPREGVFVSNGTNWFVTQRNFYEPQIITTDNTFVSGNCDVVIGIVNNTVYDPLQPELDSGGGGSDIIKLLNEQVNKEMQSSNLYMSMSSWCYTHSLDGAGLFLFDHAAEEYEHAKKLIIFLNENNVPVQLTSISAPEHKFEGLTQIFQKAYEHEQHISESINNIVDHAIKSKDHATFNFLQWYVAEQHEEEVLFKDILDKIELIGNENHGLYLADQYVKGIAKSRKS

SEQ ID NO: 8952 - protein, 1315 aa, Artificial Sequence
  SARS-CoV-2/South Korea/SNU01/2020__EPI_ISL_411929 spike protein (1-1147)(K986P_V987P_ H1048Q_H1064N_ H1083N_H1101N) Ferritin construct
MFVFLVLLPLVSSQCVNLTTRTQLPPAYTNSFTRGVYYPDKVFRSSVLHSTQDLFLPFFSNVTWFHAIHVSGTNGTKRFDNPVLPFNDGVYFASTEKSNIIRGWIFGTTLDSKTQSLLIVNNATNVVIKVCEFQFCNDPFLGVYYHKNNKSWMESEFRVYSSANNCTFEYVSQPFLMDLEGKQGNFKNLREFVFKNIDGYFKIYSKHTPINLVRDLPQGFWALEPLVDLPIGINITRFQTLLALHRSYLTPGDSSSGWTAGAAAYYVGYLQPRTFLLKYNENGTITDAVDCALDPLSETKCTLKSFTVEKGIYQTSNFRVQPTESIVRFPNITNLCPFGEVFNATRFASVYAWNRKRISNCVADYSVLYNSASFSTFKCYGVSPTKLNDLCFTNVYADSFVIRGDEVRQIAPGQTGKIADYNYKLPDDFTGCVIAWNSNNLDSKVGGNYNYLYRLFRKSNLKPFERDISTEIYQAGSTPCNGVEGFNCYFPLQSYGFQPTNGVGYQPYRVVVLSFELLHAPATVCGPKKSTNLVKNKCVNFNFNGLTGTGVLTESNKKFLPFQQFGRDIADTTDAVRDPQTLEILDITPCSFGGVSVITPGTNTSNQVAVLYQDVNCTEVPVAIHADQLTPTWRVYSTGSNVFQTRAGCLIGAEHVNNSYECDIPIGAGICASYQTQTNSPRRARSVASQSIIAYTMSLGAENSVAYSNNSIAIPTNFTISVTTEILPVSMTKTSVDCTMYICGDSTECSNLLLQYGSFCTQLNRALTGIAVEQDKNTQEVFAQVKQIYKTPPIKDFGGFNFSQILPDPSKPSKRSFIEDLLFNKVTLADAGFIKQYGDCLGDIAARDLICAQKFNGLTVLPPLLTDEMIAQYTSALLAGTITSGWTFGAGAALQIPFAMQMAYRFNGIGVTQNVLYENQKLIANQFNSAIGKIQDSLSSTASALGKLQDVVNQNAQALNTLVKQLSSNFGAISSVLNDILSRLDPPEAEVQIDRLITGRLQSLQTYVTQQLIRAAEIRASANLAATKMSECVLGQSKRVDFCGKGYQLMSFPQSAPHGVVFLNVTYVPAQEKNFTTAPAICNDGKAHFPREGVFVSNGTNWFVTQRNFYEPQIITTDNTFVSGNCDVVIGIVNNTVYDPLQPELDSGGGGSDIIKLLNEQVNKEMQSSNLYMSMSSWCYTHSLDGAGLFLFDHAAEEYEHAKKLIIFLNENNVPVQLTSISAPEHKFEGLTQIFQKAYEHEQHISESINNIVDHAIKSKDHATFNFLQWYVAEQHEEEVLFKDILDKIELIGNENHGLYLADQYVKGIAKSRKS

SEQ ID NO: 8953 - protein, 1315 aa, Artificial Sequence
  SARS-CoV-2/China/WF0004/2020__EPI_ISL_413694 spike protein (1-1147)(K986P_V987P_ H1048Q_H1064N_ H1083N_H1101N) Ferritin construct
MFVFLVLLPLVSSQCVNLTTRTQLPPAYTNSFTRGVYYPDKVFRSSVLHSTQDLFLPFFSNVTWFHAIHVSGTNGTKRFDNPVLPFNDGVYFASTEKSNIIRGWIFGTTLDSKTQSLLIVNNATNVVIKVCEFQFCNDPFLGVYYHKNNKSWTESEFRVYSSANNCTFEYVSQPFLMDLEGKQGNFKNLREFVFKNIDGYFKIYSKHTPINLVRDLPQGFSALEPLVDLPIGINITRFQTLLALHRSYLTPGDSSSGWTAGAAAYYVGYLQPRTFLLKYNENGTITDAVDCALDPLSETKCTLKSFTVEKGIYQTSNFRVQPTESIVRFPNITNLCPFGEVFNATRFASVYAWNRKRISNCVADYSVLYNSASFSTFKCYGVSPTKLNDLCFTNVYADSFVIRGDEVRQIAPGQTGKIADYNYKLPDDFTGCVIAWNSNNLDSKVGGNYNYLYRLFRKSNLKPFERDISTEIYQAGSTPCNGVEGFNCYFPLQSYGFQPTNGVGYQPYRVVVLSFELLHAPATVCGPKKSTNLVKNKCVNFNFNGLTGTGVLTESNKKFLPFQQFGRDIADTTDAVRDPQTLEILDITPCSFGGVSVITPGTNTSNQVAVLYQDVNCTEVPVAIHADQLTPTWRVYSTGSNVFQTRAGCLIGAEHVNNSYECDIPIGAGICASYQTQTNSPRRARSVASQSIIAYTMSLGAENSVAYSNNSIAIPTNFTISVTTEILPVSMTKTSVDCTMYICGDSTECSNLLLQYGSFCTQLNRALTGIAVEQDKNTQEVFAQVKQIYKTPPIKDFGGFNFSQILPDPSKPSKRSFIEDLLFNKVTLADAGFIKQYGDCLGDIAARDLICAQKFNGLTVLPPLLTDEMIAQYTSALLAGTITSGWTFGAGAALQIPFAMQMAYRFNGIGVTQNVLYENQKLIANQFNSAIGKIQDSLSSTASALGKLQDVVNQNAQALNTLVKQLSSNFGAISSVLNDILSRLDPPEAEVQIDRLITGRLQSLQTYVTQQLIRAAEIRASANLAATKMSECVLGQSKRFDFCGKGYQLMSFPQSAPHGVVFLNVTYVPAQEKNFTTAPAICNDGKAHFPREGVFVSNGTNWFVTQRNFYEPQIITTDNTFVSGNCDVVIGIVNNTVYDPLQPELDSGGGGSDIIKLLNEQVNKEMQSSNLYMSMSSWCYTHSLDGAGLFLFDHAAEEYEHAKKLIIFLNENNVPVQLTSISAPEHKFEGLTQIFQKAYEHEQHISESINNIVDHAIKSKDHATFNFLQWYVAEQHEEEVLFKDILDKIELIGNENHGLYLADQYVKGIAKSRKS

SEQ ID NO: 8954 - protein, 1315 aa, Artificial Sequence
  SARS-CoV-2/China/WF0028/2020__EPI_ISL_413791 spike protein (1-1147)(K986P_V987P_ H1048Q_H1064N_ H1083N_H1101N) Ferritin construct
MFVFLVLLPLVSSQCVNLTTRTQLPPAYTNSFTRGVYYPDKVFRSSVLHSTQDLFLPFFSNVTWFHAIHVSGTNGTKRFDNPVLPFNDGVYFASTEKSNIIRGWIFGTTLDSKTQSLLIVNNATNVVIKVCEFQFCNDPFLGVYYHKNNKSWMESEFRVYSSANNCTFEYVSQPFLMDLEGKQGNFKNLREFVFKNIDGYFKIYSKHTPINLVRDLPQGFSALEPLVDLPIGINITRFQTLLALHRSYLTPGDSSSGWTAGAAAYYVGYLQPRTFLLKYNENGTITDAVDCALDPLSETKCTLKSFTVEKGIYQTSNFRVQPTESIVRFPNITNLCPFGEVFNATRFASVYAWNRKRISNCVADYSVLYNSASFSTFKCYGVSPTKLNDLCFTNVYADSFVIRGDEVRQIAPGQTGKIADYNYKLPDDFTGCVIAWNSNNLDSKVGGNYNYLYRLFRKSNLKPFERDISTEIYQAGSTPCNGVEGFNCYFPLQSYGFQPTNGVGYQPYRVVVLSFELLHAPATVCGPKKSTNLVKNKCVNFNFNGLTGTGVLTESNKKFLPFQQFGRDIADTTDAVRDPQTLEILDITPCSFGGVSVITPGTNTSNQVAVLYQDVNCTEVPVAIHADQLTPTWRVYSTGSNVFQTRAGCLIGAEHVNNSYECDIPIGAGICASYQTQTNSPRRARSVASQSIIAYTMSLGAENSVAYSNNSIAIPTNFTISVTTEILPVSMTKTSVDCTMYICGDSTECSNLLLQYGSFCTQLNRALTGIAVEQDKNTQEVFAQVKQIYKTPPIKDFGGFNFSQILPDPSKPSKRSFIEDLLFNKVTLADAGFIKQYGDCLGDIAARDLICAQKFNGLTVLPPLLTDEMIAQYTSALLAGTITSGWTFGAGAALQIPFAMQMAYRFNGIGVTQNVLYENQKLIANQFNSAIGKIQDSLSSTASALGKLQDVVNQNAQALNTLVKQLSSNFGAISSVLNDILSRLDPPEAEVQIDRLITGRLQSLQTYVTQQLIRAAEIRASANLAATKMSECVLGQSKRVDFCGKGYQLMSFPQSAPHGVVFLNVTYVPAQEKNFTTAPAICNDGKAHFPREGVFVSNGTNWFVTQRNFYEPQIITTDNTFVSGNCDVVIGIVNNTVYDPLQPELESGGGGSDIIKLLNEQVNKEMQSSNLYMSMSSWCYTHSLDGAGLFLFDHAAEEYEHAKKLIIFLNENNVPVQLTSISAPEHKFEGLTQIFQKAYEHEQHISESINNIVDHAIKSKDHATFNFLQWYVAEQHEEEVLFKDILDKIELIGNENHGLYLADQYVKGIAKSRKS

SEQ ID NO: 8955 - protein, 1315 aa, Artificial Sequence
  SARS-CoV-2/2019-nCoV/USA-CruiseA-18/2020__MT159716.1 spike protein (1-1147)(K986P_V987P_ H1048Q_H1064N_ H1083N_H1101N) Ferritin construct
MFVFLVLLPLVSSQCVNLTTRTQLPPAYTNSFTRGVYYPDKVFRSSVLHSTQDLFLPFFSNVTWFHAIHVSGTNGTKRFDNPVLPFNDGVYFASTEKSNIIRGWIFGTTLDSKTQSLLIVNNATNVVIKVCEFQFCNDPFLGVYYHKNNKSWMESELRVYSSANNCTFEYVSQPFLMDLEGKQGNFKNLREFVFKNIDGYFKIYSKHTPINLVRDLPQGFSALEPLVDLPIGINITRFQTLLALHRSYLTPGDSSSGWTAGAAAYYVGYLQPRTFLLKYNENGTITDAVDCALDPLSETKCTLKSFTVEKGIYQTSNFRVQPTESIVRFPNITNLCPFGEVFNATRFASVYAWNRKRISNCVADYSVLYNSASFSTFKCYGVSPTKLNDLCFTNVYADSFVIRGDEVRQIAPGQTGKIADYNYKLPDDFTGCVIAWNSNNLDSKVGGNYNYLYRLFRKSNLKPFERDISTEIYQAGSTPCNGVEGFNCYFPLQSYGFQPTNGVGYQPYRVVVLSFELLHAPATVCGPKKSTNLVKNKCVNFNFNGLTGTGVLTESNKKFLPFQQFGRDIADTTDAVRDPQTLEILDITPCSFGGVSVITPGTNTSNQVAVLYQDVNCTEVPVAIHADQLTPTWRVYSTGSNVFQTRAGCLIGAEHVNNSYECDIPIGAGICASYQTQTNSPRRARSVASQSIIAYTMSLGAENSVAYSNNSIAIPTNFTISVTTEILPVSMTKTSVDCTMYICGDSTECSNLLLQYGSFCTQLNRALTGIAVEQDKNTQEVFAQVKQIYKTPPIKDFGGFNFSQILPDPSKPSKRSFIEDLLFNKVTLADAGFIKQYGDCLGDIAARDLICAQKFNGLTVLPPLLTDEMIAQYTSALLAGTITSGWTFGAGAALQIPFAMQMAYRFNGIGVTQNVLYENQKLIANQFNSAIGKIQDSLSSTASALGKLQDVVNQNAQALNTLVKQLSSNFGAISSVLNDILSRLDPPEAEVQIDRLITGRLQSLQTYVTQQLIRAAEIRASANLAATKMSECVLGQSKRVDFCGKGYQLMSFPQSAPHGVVFLNVTYVPAQEKNFTTAPAICNDGKAHFPREGVFVSNGTNWFVTQRNFYEPQIITTDNTFVSGNCDVVIGIVNNTVYDPLQPELDSGGGGSDIIKLLNEQVNKEMQSSNLYMSMSSWCYTHSLDGAGLFLFDHAAEEYEHAKKLIIFLNENNVPVQLTSISAPEHKFEGLTQIFQKAYEHEQHISESINNIVDHAIKSKDHATFNFLQWYVAEQHEEEVLFKDILDKIELIGNENHGLYLADQYVKGIAKSRKS

SEQ ID NO: 8956 - protein, 1315 aa, Artificial Sequence
  SARS-CoV-2/SARS-CoV-2/Yunnan-01/human/2020/CHN__MT049951.1 spike protein (1-1147)(K986P_V987P_ H1048Q_H1064N_ H1083N_H1101N) Ferritin construct
MFVFLVLLPLVSSQCVNLTTRTQLPPANTNSFTRGVYYPDKVFRSSVLHSTQDLFLPFFSNVTWFHAIHVSGTNGTKRFDNPVLPFNDGVYFASTEKSNIIRGWIFGTTLDSKTQSLLIVNNATNVVIKVCEFQFCNDPFLGVYYHKNNKSWMESEFRVYSSANNCTFEYVSQPFLMDLEGKQGNFKNLREFVFKNIDGYFKIYSKHTPINLVRDLPQGFSALEPLVDLPIGINITRFQTLLALHRSYLTPGDSSSGWTAGAAAYYVGYLQPRTFLLKYNENGTITDAVDCALDPLSETKCTLKSFTVEKGIYQTSNFRVQPTESIVRFPNITNLCPFGEVFNATRFASVYAWNRKRISNCVADYSVLYNSASFSTFKCYGVSPTKLNDLCFTNVYADSFVIRGDEVRQIAPGQTGKIADYNYKLPDDFTGCVIAWNSNNLDSKVGGNYNYLYRLFRKSNLKPFERDISTEIYQAGSTPCNGVEGFNCYFPLQSYGFQPTNGVGYQPYRVVVLSFELLHAPATVCGPKKSTNLVKNKCVNFNFNGLTGTGVLTESNKKFLPFQQFGRDIADTTDAVRDPQTLEILDITPCSFGGVSVITPGTNTSNQVAVLYQDVNCTEVPVAIHADQLTPTWRVYSTGSNVFQTRAGCLIGAEHVNNSYECDIPIGAGICASYQTQTNSPRRARSVASQSIIAYTMSLGAENSVAYSNNSIAIPTNFTISVTTEILPVSMTKTSVDCTMYICGDSTECSNLLLQYGSFCTQLNRALTGIAVEQDKNTQEVFAQVKQIYKTPPIKDFGGFNFSQILPDPSKPSKRSFIEDLLFNKVTLADAGFIKQYGDCLGDIAARDLICAQKFNGLTVLPPLLTDEMIAQYTSALLAGTITSGWTFGAGAALQIPFAMQMAYRFNGIGVTQNVLYENQKLIANQFNSAIGKIQDSLSSTASALGKLQDVVNQNAQALNTLVKQLSSNFGAISSVLNDILSRLDPPEAEVQIDRLITGRLQSLQTYVTQQLIRAAEIRASANLAATKMSECVLGQSKRVDFCGKGYQLMSFPQSAPHGVVFLNVTYVPAQEKNFTTAPAICNDGKAHFPREGVFVSNGTNWFVTQRNFYEPQIITTDNTFVSGNCDVVIGIVNNTVYDPLQPELDSGGGGSDIIKLLNEQVNKEMQSSNLYMSMSSWCYTHSLDGAGLFLFDHAAEEYEHAKKLIIFLNENNVPVQLTSISAPEHKFEGLTQIFQKAYEHEQHISESINNIVDHAIKSKDHATFNFLQWYVAEQHEEEVLFKDILDKIELIGNENHGLYLADQYVKGIAKSRKS

SEQ ID NO: 8957 - protein, 1315 aa, Artificial Sequence
  SARS-CoV-2/USA/WA-UW292/2020__EPI_ISL_418077 spike protein (1-1147)(K986P_V987P_ H1048Q_H1064N_ H1083N_H1101N) Ferritin construct
MFVFLVLLPLVSSQCVNLTTRTQLPPAYTNSFTRGVYYPDKVFRSSVLHSTQDLFLPFFSNVTWFHAIHVSGTNGTKRFDNPVLPFNDGVYFASTEKSNIIRGWIFGTTLDSKTQSLLIVNNATNVVIKVCEFQFCNDPFLGVYYHKNNKSWMESEFRVYSSANNCTFEYVSQPFLMDLEGKQGNFKNLREFVFKNIDGYFKIYSKHTPINLVRDLPQGFSALEPLVDLPIGINITRFQTLLALHRSYLTPGDSSSGWTAGAAAYYVGYLQPRTFLLKYNENGTITDAVDCALDPLSETKCTLKSFTVEKGIYQTSNFRVQPTESIVRFPNITNLCPFGEVFNATRFASVYAWNRKRISNCVADYSVLYNSASFSTFKCYGVSPTKLNDLCFTNVYADSFVIRGDEVRQIAPGQTGKIADYNYKLPDDFTGCVIAWNSNNLDSKVGGNYNYLYRLFRKSNLKPFERDISTEIYQASSTPCNGVEGFNCYFPLQSYGFQPTNGVGYQPYRVVVLSFELLHAPATVCGPKKSTNLVKNKCVNFNFNGLTGTGVLTESNKKFLPFQQFGRDIADTTDAVRDPQTLEILDITPCSFGGVSVITPGTNTSNQVAVLYQDVNCTEVPVAIHADQLTPTWRVYSTGSNVFQTRAGCLIGAEHVNNSYECDIPIGAGICASYQTQTNSPRRARSVASQSIIAYTMSLGAENSVAYSNNSIAIPTNFTISVTTEILPVSMTKTSVDCTMYICGDSTECSNLLLQYGSFCTQLNRALTGIAVEQDKNTQEVFAQVKQIYKTPPIKDFGGFNFSQILPDPSKPSKRSFIEDLLFNKVTLADAGFIKQYGDCLGDIAARDLICAQKFNGLTVLPPLLTDEMIAQYTSALLAGTITSGWTFGAGAALQIPFAMQMAYRFNGIGVTQNVLYENQKLIANQFNSAIGKIQDSLSSTASALGKLQDVVNQNAQALNTLVKQLSSNFGAISSVLNDILSRLDPPEAEVQIDRLITGRLQSLQTYVTQQLIRAAEIRASANLAATKMSECVLGQSKRVDFCGKGYQLMSFPQSAPHGVVFLNVTYVPAQEKNFTTAPAICNDGKAHFPREGVFVSNGTNWFVTQRNFYEPQIITTDNTFVSGNCDVVIGIVNNTVYDPLQPELDSGGGGSDIIKLLNEQVNKEMQSSNLYMSMSSWCYTHSLDGAGLFLFDHAAEEYEHAKKLIIFLNENNVPVQLTSISAPEHKFEGLTQIFQKAYEHEQHISESINNIVDHAIKSKDHATFNFLQWYVAEQHEEEVLFKDILDKIELIGNENHGLYLADQYVKGIAKSRKS

SEQ ID NO: 8958 - protein, 1315 aa, Artificial Sequence
  SARS-CoV-2/Iceland/192/2020__EPI_ISL_417819 spike protein (1-1147)(K986P_V987P_ H1048Q_H1064N_ H1083N_H1101N) Ferritin construct
MFVFFVLLPLVSSQCVNLTTRTQLPPAYTNSFTRGVYYPDKVFRSSVLHSTQDLFLPFFSNVTWFHAIHVSGTNGTKRFDNPVLPFNDGVYFASTEKSNIIRGWIFGTTLDSKTQSLLIVNNATNVVIKVCEFQFCNDPFLGVYYHKNNKSWMESEFRVYSSANNCTFEYVSQPFLMDLEGKQGNFKNLREFVFKNIDGYFKIYSKHTPINLVRDLPQGFSALEPLVDLPIGINITRFQTLLALHRSYLTPGDSSSGWTAGAAAYYVGYLQPRTFLLKYNENGTITDAVDCALDPLSETKCTLKSFTVEKGIYQTSNFRVQPTESIVRFPNITNLCPFGEVFNATRFASVYAWNRKRISNCVADYSVLYNSASFSTFKCYGVSPTKLNDLCFTNVYADSFVIRGDEVRQIAPGQTGKIADYNYKLPDDFTGCVIAWNSNNLDSKVGGNYNYLYRLFRKSNLKPFERDISTEIYQAGSTPCNGVEGFNCYFPLQSYGFQPTNGVGYQPYRVVVLSFELLHAPATVCGPKKSTNLVKNKCVNFNFNGLTGTGVLTESNKKFLPFQQFGRDIADTTDAVRDPQTLEILDITPCSFGGVSVITPGTNTSNQVAVLYQGVNCTEVPVAIHADQLTPTWRVYSTGSNVFQTRAGCLIGAEHVNNSYECDIPIGAGICASYQTQTNSPRRARSVASQSIIAYTMSLGAENSVAYSNNSIAIPTNFTISVTTEILPVSMTKTSVDCTMYICGDSTECSNLLLQYGSFCTQLNRALTGIAVEQDKNTQEVFAQVKQIYKTPPIKDFGGFNFSQILPDPSKPSKRSFIEDLLFNKVTLADAGFIKQYGDCLGDIAARDLICAQKFNGLTVLPPLLTDEMIAQYTSALLAGTITSGWTFGAGAALQIPFAMQMAYRFNGIGVTQNVLYENQKLIANQFNSAIGKIQDSLSSTASALGKLQDVVNQNAQALNTLVKQLSSNFGAISSVLNDILSRLDPPEAEVQIDRLITGRLQSLQTYVTQQLIRAAEIRASANLAATKMSECVLGQSKRVDFCGKGYQLMSFPQSAPHGVVFLNVTYVPAQEKNFTTAPAICNDGKAHFPREGVFVSNGTNWFVTQRNFYEPQIITTDNTFVSGNCDVVIGIVNNTVYDPLQPELDSGGGGSDIIKLLNEQVNKEMQSSNLYMSMSSWCYTHSLDGAGLFLFDHAAEEYEHAKKLIIFLNENNVPVQLTSISAPEHKFEGLTQIFQKAYEHEQHISESINNIVDHAIKSKDHATFNFLQWYVAEQHEEEVLFKDILDKIELIGNENHGLYLADQYVKGIAKSRKS

SEQ ID NO: 8959 - protein, 1315 aa, Artificial Sequence
  SARS-CoV-2/Belgium/ULG-6939/2020__EPI_ISL_417020 spike protein (1-1147)(K986P_V987P_ H1048Q_H1064N_ H1083N_H1101N) Ferritin construct
MFVFLVLLPLVSSQCVNLTTRTQLPPAYTNSFTRGVYYPDKVFRSSVLHSTQDLFLPFFSNVTWFHAIHVSGTNGTKRFDNPVLPFNDGVYFASTEKSNIIRGWIFGTTLDSKTQSLLIVNNATNVVIKVCEFQFCNDPFLGVYYHKNNKSWMESEFRVYSSANNCTFEYVSQPFLMDLEGKQGNFKNLREFVFKNIDGYFKIYSKHTPINLVRDLPQGFSALEPLVDLPIGINITRFQTLLALHRSYLTPGDSSSGWTAGAAAYYVGYLQPRTFLLKYNENGTITDAVDCALDPLSETKCTLKSFTVEKGIYQTSNFRVQPTESIVRFPNITNLCPFGEVFNATRFASVYAWNRKRISNCVADYSVLYNSASFSTFKCYGVSPTKLNDLCFTNVYADSFVIRGDEVRQIAPGQTGKIADYNYKLPDDFTGCVIAWNSNNLDSKVGGNYNYLYRLFRKSNLKPFERDISTEIYQAGSTPCNGVEGFNCYFPLQSYGFQPTNGVGYQPYRVVVLSFELLHAPATVCGPKKSTNLVKNKCVNFNFNGLTGTGVLTESNKKFLPFQQFGRDIADTTDAVRDPQTLEILDITPCSFGGVSVITPGTNTSNQVAVLYQGVNCTEVPVAIHADQLTPTWRVYSTGSNVFQTRAGCLIGAEHVNNSYECDIPIGAGICASYQTQTNSPRRARSVASQSIIAYTMSLGAENSVVYSNNSIAIPTNFTISVTTEILPVSMTKTSVDCTMYICGDSTECSNLLLQYGSFCTQLNRALTGIAVEQDKNTQEVFAQVKQIYKTPPIKDFGGFNFSQILPDPSKPSKRSFIEDLLFNKVTLADAGFIKQYGDCLGDIAARDLICAQKFNGLTVLPPLLTDEMIAQYTSALLAGTITSGWTFGAGAALQIPFAMQMAYRFNGIGVTQNVLYENQKLIANQFNSAIGKIQDSLSSTASALGKLQDVVNQNAQALNTLVKQLSSNFGAISSVLNDILSRLDPPEAEVQIDRLITGRLQSLQTYVTQQLIRAAEIRASANLAATKMSECVLGQSKRVDFCGKGYQLMSFPQSAPHGVVFLNVTYVPAQEKNFTTAPAICNDGKAHFPREGVFVSNGTNWFVTQRNFYEPQIITTDNTFVSGNCDVVIGIVNNTVYDPLQPELDSGGGGSDIIKLLNEQVNKEMQSSNLYMSMSSWCYTHSLDGAGLFLFDHAAEEYEHAKKLIIFLNENNVPVQLTSISAPEHKFEGLTQIFQKAYEHEQHISESINNIVDHAIKSKDHATFNFLQWYVAEQHEEEVLFKDILDKIELIGNENHGLYLADQYVKGIAKSRKS

SEQ ID NO: 8960 - protein, 1315 aa, Artificial Sequence
  SARS-CoV-2/France/HF2496/2020__EPI_ISL_418231 spike protein (1-1147)(K986P_V987P_ H1048Q_H1064N_ H1083N_H1101N) Ferritin construct
MFVFLVLLPLVSSQCVNLTTRTQLPPAYTNSFTRGVYYPDKVFRSSVLHSTQDLFLPFFSNVTWFHAIHVSGTNGTKRFDNPVLPFNDGVYFASTEKSNIIRGWIFGTTLDSKTQSLLIVNNATNVVIKVCEFQFCNDPFLGVYYHKNNKSWMESEFRVYSSANNCTFEYVSQPFLMDLEGKQGNFKNLREFVFKNIDGYFKIYSKHTPINLVRDLPQGFSALEPLVDLPIGINITRFQTLLALHRSYLTPGDSSSGWTAGAAAYYVGYLQPRTFLLKYNENGTITDAVDCALDPLSETKCTLKSFTVEKGIYQTSNFRVQPTESIVRFPNITNLCPFGEVFNATRFASVYAWNRKRISNCVADYSVLYNSASFSTFKCYGVSPTKLNDLCFTNVYADSFVIRGDEVRQIAPGQTGKIADYNYKLPDDFTGCVIAWNSNNLDSKVGGNYNYLYRLFRKSNLKPFERDISTEIYQAGSTPCNGVEGFNCYFPLQSYGFQPTNGVGYQPYRVVVLSFELLHAPATVCGPKKSTNLVKNKCVNFNFNGLTGTGVLTESNKKFLPFQQFGRDIADTTDAVRDPQTLEILDITPCSFGGVSVITPGTNTSNQVAVLYQGVNCTEVPVAIHADQLTPTWRVYSTGSNVFQTRAGCLIGAEHVNNSYECDIPIGAGICASYQTQTNSPRRARSVASQSIIAYTMSLGAENSVAYSNNSIAIPTNFTISVTTEILPVSMTKTSVDCTMYICGDSTECSNLLLQYGSFCTQLNRALTGIAVEQDKNTQEVFAQVKQIYKTPPIKDFGGFNFSQILPDPSKPSKRSFIEDLLFNKVTLADAGFIKQYGDCLGDIVARDLICAQKFNGLTVLPPLLTDEMIAQYTSALLAGTITSGWTFGAGAALQIPFAMQMAYRFNGIGVTQNVLYENQKLIANQFNSAIGKIQDSLSSTASALGKLQDVVNQNAQALNTLVKQLSSNFGAISSVLNDILSRLDPPEAEVQIDRLITGRLQSLQTYVTQQLIRAAEIRASANLAATKMSECVLGQSKRVDFCGKGYQLMSFPQSAPHGVVFLNVTYVPAQEKNFTTAPAICNDGKAHFPREGVFVSNGTNWFVTQRNFYEPQIITTDNTFVSGNCDVVIGIVNNTVYDPLQPELDSGGGGSDIIKLLNEQVNKEMQSSNLYMSMSSWCYTHSLDGAGLFLFDHAAEEYEHAKKLIIFLNENNVPVQLTSISAPEHKFEGLTQIFQKAYEHEQHISESINNIVDHAIKSKDHATFNFLQWYVAEQHEEEVLFKDILDKIELIGNENHGLYLADQYVKGIAKSRKS

SEQ ID NO: 8961 - protein, 1315 aa, Artificial Sequence
  SARS-CoV-2/USA/WA-UW291/2020__EPI_ISL_418076 spike protein (1-1147)(K986P_V987P_ H1048Q_H1064N_ H1083N_H1101N) Ferritin construct
MFVFLVLLPLVSSQCVNLTTRTQLPPAYTNSFTRGVYYPDKVFRSSVLHSTQDLFLPFFSNVTWFHAIHVSGTNGTKRFDNPVLPFNDGVYFASTEKSNIIRGWIFGTTLDSKTQSLLIVNNATNVVIKVCEFQFCNDPFLGVYYHKNNKSWMESEFRVYSSANNCTFEYVSQPFLMDLEGKQGNFKNLREFVFKNIDGYFKIYSKHTPINLVRDLPQGFSALEPLVDLPIGINITRFQTLLALHRSYLTPGDSSSGWTAGAAAYYVGYLQPRTFLLKYNENGTITDAVDCALDPLSETKCTLKSFTVEKGIYQTSNFRVQPTESIVRFPNITNLCPFGEVFNATRFASVYAWNRKRISNCVADYSVLYNSASFSTFKCYGVSPTKLNDLCFTNVYADSFVIRGDEVRQIAPGQTGKIADYNYKLPDDFTGCVIAWNSNNLDSKVGGNYNYLYRLFRKSNLKPFERDISTEIYQAGSTPCNGVEGFNCYFPLQSYGFQPTNGVGYQPYRVVVLSFELLHAPATVCGPKKSTNLVKNKCVNFNFNGLTGTGVLTESNKKFLPFQQFGRDIADTTDAVRDPQTLEILDITPCSFGGVSVITPGTNTSNQVAVLYQGVNCTEVPVAIHADQLTPTWRVYSTGSNVFQTRAGCLIGAEHVNNSYECDIPIGAGICASYQTQTNSPRRARSVASQSIIAYTMSLGAENSVAYSNNSIAIPTNFTISVTTEILPVSMTKTSVDCTMYICGDSTECSNLLLQYGSFCTQLNRALTGIAVEQDKNTQEVFAQVKQIYKTPPIKDFGGFNFSQILPDPSKPSKRSFIEDLLFNKVTLADAGFIKQYGDCLGDIAARDLICAQKFNGLTVLPPLLTDEMIAQYTSALLAGTITSGWTFGAGAALQIPFAMQMAYRFNGIGVTQNVLYENQKLIANQFNSAIGKIQYSLSSTASALGKLQDVVNQNAQALNTLVKQLSSNFGAISSVLNDILSRLDPPEAEVQIDRLITGRLQSLQTYVTQQLIRAAEIRASANLAATKMSECVLGQSKRVDFCGKGYQLMSFPQSAPHGVVFLNVTYVPAQEKNFTTAPAICNDGKAHFPREGVFVSNGTNWFVTQRNFYEPQIITTDNTFVSGNCDVVIGIVNNTVYDPLQPELDSGGGGSDIIKLLNEQVNKEMQSSNLYMSMSSWCYTHSLDGAGLFLFDHAAEEYEHAKKLIIFLNENNVPVQLTSISAPEHKFEGLTQIFQKAYEHEQHISESINNIVDHAIKSKDHATFNFLQWYVAEQHEEEVLFKDILDKIELIGNENHGLYLADQYVKGIAKSRKS

SEQ ID NO: 8962 - protein, 1315 aa, Artificial Sequence; identical to SEQ ID NO: 8925
  SARS-CoV-2/Portugal/PT0034/2020__EPI_ISL_418019 spike protein (1-1147)(K986P_V987P_ H1048Q_H1064N_ H1083N_H1101N) Ferritin construct

SEQ ID NO: 8963 - protein, 1315 aa, Artificial Sequence; identical to SEQ ID NO: 8917
  SARS-CoV-2/Iceland/202/2020__EPI_ISL_417750 spike protein (1-1147)(K986P_V987P_ H1048Q_H1064N_ H1083N_H1101N) Ferritin construct

SEQ ID NO: 8964 - protein, 1315 aa, Artificial Sequence
  SARS-CoV-2/USA/WA-UW261/2020__EPI_ISL_418046 spike protein (1-1147)(K986P_V987P_ H1048Q_H1064N_ H1083N_H1101N) Ferritin construct
MFVFLVLLPLVSSQCVNLTTRTQLPPAYTNSFTRGVYYPDKVFRSSVLHSTQDLFLPFFSNVTWFHAIHVSGTNGTKRFDNPVLPFNDGVYFASTEKSNIIRGWIFGTTLDSKTQSLLIVNNATNVVIKVCEFQFCNDPFLGVYYHKNNKSWMESEFRVYSSANNCTFEYVSQPFLMDLEGKQGNFKNLREFVFKNIDGYFKIYSKHTPINLVRDLPQGFSALEPLVDLPIGINITRFQTLLALHRSYLTPGDSSSGWTAGAAAYYVGYLQPRTFLLKYNENGTITDAVDCALDPLSETKCTLKSFTVEKGIYQTSNFRVQPTESIVRFPNITNLCPFGEVFNATRFTSVYAWNRKRISNCVADYSVLYNSASFSTFKCYGVSPTKLNDLCFTNVYADSFVIRGDEVRQIAPGQTGKIADYNYKLPDDFTGCVIAWNSNNLDSKVGGNYNYLYRLFRKSNLKPFERDISTEIYQAGSTPCNGVEGFNCYFPLQSYGFQPTNGVGYQPYRVVVLSFELLHAPATVCGPKKSTNLVKNKCVNFNFNGLTGTGVLTESNKKFLPFQQFGRDIADTTDAVRDPQTLEILDITPCSFGGVSVITPGTNTSNQVAVLYQDVNCTEVPVAIHADQLTPTWRVYSTGSNVFQTRAGCLIGAEHVNNSYECDIPIGAGICASYQTQTNSPRRARSVASQSIIAYTMSLGAENSVAYSNNSIAIPTNFTISVTTEILPVSMTKTSVDCTMYICGDSTECSNLLLQYGSFCTQLNRALTGIAVEQDKNTQEVFAQVKQIYKTPPIKDFGGFNFSQILPDPSKPSKRSFIEDLLFNKVTLADAGFIKQYGDCLGDIAARDLICAQKFNGLTVLPPLLTDEMIAQYTSALLAGTITSGWTFGAGAALQIPFAMQMAYRFNGIGVTQNVLYENQKLIANQFNSAIGKIQDSLSSTASALGKLQDVVNQNAQALNTLVKQLSSNFGAISSVLNDILSRLDPPEAEVQIDRLITGRLQSLQTYVTQQLIRAAEIRASANLAATKMSECVLGQSKRVDFCGKGYQLMSFPQSAPHGVVFLNVTYVPAQEKNFTTAPAICNDGKAHFPREGVFVSNGTNWFVTQRNFYEPQIITTDNTFVSGNCDVVIGIVNNTVYDPLQPELDSGGGGSDIIKLLNEQVNKEMQSSNLYMSMSSWCYTHSLDGAGLFLFDHAAEEYEHAKKLIIFLNENNVPVQLTSISAPEHKFEGLTQIFQKAYEHEQHISESINNIVDHAIKSKDHATFNFLQWYVAEQHEEEVLFKDILDKIELIGNENHGLYLADQYVKGIAKSRKS

SEQ ID NO: 8965 - protein, 1315 aa, Artificial Sequence
  SARS-CoV-2/Portugal/PT0035/2020__EPI_ISL_418020 spike protein (1-1147)(K986P_V987P_ H1048Q_H1064N_ H1083N_H1101N) Ferritin construct
MFVFLVLLPLVSSQCVNLTTRTQLPPAYTNSFTRGVYYPDKVFRSSVLHSTQDLFLPFFSNVTWFHAIHVSGTNGTKRFDNPVLPFNDGVYFASTEKSNIIRGWIFGTTLDSKTQSLLIVNNATNVVIKVCEFQFCNDPFLGVYYHKNNKSWMESEFRVYSSANNCTFEYVSQPFLMDLEGKQGNFKNLREFVFKNIDGYFKIYSKHTPINLVRDLPQGFSALEPLVDLPIGINITRFQTLLALHRSYLTPGDSSSGWTAGAAAYYVGYLQPRTFLLKYNENGTITDAVDCALDPLSETKCTLKSFTVEKGIYQTSNFRVQPTESIVRFPNITNLCPFGEVFNATRFASVYAWNRKRISNCVADYSVLYNSASFSTFKCYGVSPTKLNDLCFTNVYADSFVIRGDEVRQIAPGQTGKIADYNYKLPDDFTGCVIAWNSNNLDSKVGGNYNYLYRLFRKSNLKPFERDISTEIYQAGSTPCNGVEGFNCYFPLQSYGFQPTNGVGYQPYRVVVLSFELLHAPATVCGPKKSTNLVKNKCVNFNFNGLTGTGVLTESNKKFLPFQQFGRDIADTTDAVRDPQTLEILDITPCSFGGVSVITPGTNTSNQVAVLYQDVNCTEVPVAIHADQLTPTWRVYSTGSNVFQTRAGCLIGAEHVNNSYECDIPIGAGICASYQTQTNSPRRARSVASQSIIAYTMSLGAENSVAYSNNSIAIPTNFTISVTTEILPVSMTKTSVDCTMYICGDSTECSNLLLQYGSFCTQLNRALTGIAVEQDKNTQEVFAQVKQIYKTPPIKDFGGFNFSQILPDPSKPSKRSFIEDLLFNKVTLADAGFIKQYGDCLGDISARDLICAQKFNGLTVLPPLLTDEMIAQYTSALLAGTITSGWTFGAGAALQIPFAMQMAYRFNGIGVTQNVLYENQKLIANQFNSAIGKIQDSLSSTASALGKLQDVVNQNAQALNTLVKQLSSNFGAISSVLNDILSRLDPPEAEVQIDRLITGRLQSLQTYVTQQLIRAAEIRASANLAATKMSECVLGQSKRVDFCGKGYQLMSFPQSAPHGVVFLNVTYVPAQEKNFTTAPAICNDGKAHFPREGVFVSNGTNWFVTQRNFYEPQIITTDNTFVSGNCDVVIGIVNNTVYDPLQPELDSGGGGSDIIKLLNEQVNKEMQSSNLYMSMSSWCYTHSLDGAGLFLFDHAAEEYEHAKKLIIFLNENNVPVQLTSISAPEHKFEGLTQIFQKAYEHEQHISESINNIVDHAIKSKDHATFNFLQWYVAEQHEEEVLFKDILDKIELIGNENHGLYLADQYVKGIAKSRKS

SEQ ID NO: 8966 - protein, 1315 aa, Artificial Sequence
  SARS-CoV-2/USA/NY-NYUMC7/2020__EPI_ISL_418192 spike protein (1-1147)(K986P_V987P_ H1048Q_H1064N_ H1083N_H1101N) Ferritin construct
MFVFLVLLPLVSSQCVNLTTRTQLPPAYTNSFTRGVYYPDKVFRSSVLHSTQDLFLPFFSNVTWFHAIHVSGTNGTKRFDNPVLPFNDGVYFASTEKSNIIRGWIFGTTLDSKTQSLLIVNNATNVVIKVCEFQFCNDPFLGVYHHKNNKSWMESEFRVYSSANNCTFEYVSQPFLMDLEGKQGNFKNLREFVFKNIDGYFKIYSKHTPINLVRDLPQGFSALEPLVDLPIGINITRFQTLLALHRSYLTPGDSSSGWTAGAAAYYVGYLQPRTFLLKYNENGTITDAVDCALDPLSETKCTLKSFTVEKGIYQTSNFRVQPTESIVRFPNITNLCPFGEVFNATRFASVYAWNRKRISNCVADYSVLYNSASFSTFKCYGVSPTKLNDLCFTNVYADSFVIRGDEVRQIAPGQTGKIADYNYKLPDDFTGCVIAWNSNNLDSKVGGNYNYLYRLFRKSNLKPFERDISTEIYQAGSTPCNGVEGFNCYFPLQSYGFQPTNGVGYQPYRVVVLSFELLHAPATVCGPKKSTNLVKNKCVNFNFNGLTGTGVLTESNKKFLPFQQFGRDIADTTDAVRDPQTLEILDITPCSFGGVSVITPGTNTSNQVAVLYQGVNCTEVPVAIHADQLTPTWRVYSTGSNVFQTRAGCLIGAEHVNNSYECDIPIGAGICASYQTQTNSPRRARSVASQSIIAYTMSLGAENSVAYSNNSIAIPTNFTISVTTEILPVSMTKTSVDCTMYICGDSTECSNLLLQYGSFCTQLNRALTGIAVEQDKNTQEVFAQVKQIYKTPPIKDFGGFNFSQILPDPSKPSKRSFIEDLLFNKVTLADAGFIKQYGDCLGDIAARDLICAQKFNGLTVLPPLLTDEMIAQYTSALLAGTITSGWTFGAGAALQIPFAMQMAYRFNGIGVTQNVLYENQKLIANQFNSAIGKIQDSLSSTASALGKLQDVVNQNAQALNTLVKQLSSNFGAISSVLNDILSRLDPPEAEVQIDRLITGRLQSLQTYVTQQLIRAAEIRASANLAATKMSECVLGQSKRVDFCGKGYQLMSFPQSAPHGVVFLNVTYVPAQEKNFTTAPAICNDGKAHFPREGVFVSNGTNWFVTQRNFYEPQIITTDNTFVSGNCDVVIGIVNNTVYDPLQPELDSGGGGSDIIKLLNEQVNKEMQSSNLYMSMSSWCYTHSLDGAGLFLFDHAAEEYEHAKKLIIFLNENNVPVQLTSISAPEHKFEGLTQIFQKAYEHEQHISESINNIVDHAIKSKDHATFNFLQWYVAEQHEEEVLFKDILDKIELIGNENHGLYLADQYVKGIAKSRKS

SEQ ID NO: 8967 - protein, 1315 aa, Artificial Sequence
  SARS-CoV-2/Iceland/189/2020__EPI_ISL_417709 spike protein (1-1147)(K986P_V987P_ H1048Q_H1064N_ H1083N_H1101N) Ferritin construct
MFVFLVLLPLVSSQCVNLTTRTQLPPAYTNSFTRGVYYPDKVFRSSVLHSTQDLFLPFFSNVTWFHAIHVSGTNGTKRFDNPVLPFNDGVYFASTEKSNIIRGWIFGTTLDSKTQSLLIVNNATNVVIKVCEFQFCNDPFLGVYYHKNNKSWMESEFRVYSSANNCTFEYVSQPFLMDLEGKQGNFKNLREFVFKNIDGYFKIYSKHTPINLVRDLPQGFSALEPLVDLPIGINITRFQTLLALHRSYLTPGDSSSGWTAGAAAYYVGYLQPRTFLLKYNENGTITDAVDCALDPLSETKCTLKSFTVEKGIYQTSNFRVQPTESIVRFPNITNLCPFGEVFNATRFASVYAWNRKRISNCVADYSVLYNSASFSTFKCYGVSPTKLNDLCFTNVYADSFVIRGDEVRQIAPGQTGKIADYNYKLPDDFTGCVIAWNSNNLDSKVGGNYNYLYRLFRKSNLKPFERDISTEIYQAGSTPCNGVEGFNCYFPLQSYGFQPTNGVGYQPYRVVVLSFELLHAPATVCGPKKSTNLVKNKCVNFNFNGLTGTGVLTESNKKFLPFQQFGRDIADTTDAVRDPQTLEILDITPCSFGGVSVITPGTNTSNQVAVLYQGVNCTEVPVAIHADQLTPTWRVYSTGSNVFQTRAGCLIGAEHVNNSYECDIPIGAGICASYQTQTNSPRRARSVASQSIIAYTMSLGAENSVAYSNNSIAIPTNFTISVTTEILPVSMTKTSVDCTMYICGDSTECSNLLLQYGSFCTQLNRALTGIAVEQDKNTQEVFAQVKQIYKTPPIKDFGGFNFSQILPDPSKPSKRSFIEDLLFNKVTLADAGFTKQYGDCLGDIAARDLICAQKFNGLTVLPPLLTDEMIAQYTSALLAGTITSGWTFGAGAALQIPFAMQMAYRFNGIGVTQNVLYENQKLIANQFNSAIGKIQDSLSSTASALGKLQDVVNQNAQALNTLVKQLSSNFGAISSVLNDILSRLDPPEAEVQIDRLITGRLQSLQTYVTQQLIRAAEIRASANLAATKMSECVLGQSKRVDFCGKGYQLMSFPQSAPHGVVFLNVTYVPAQEKNFTTAPAICNDGKAHFPREGVFVSNGTNWFVTQRNFYEPQIITTDNTFVSGNCDVVIGIVNNTVYDPLQPELDSGGGGSDIIKLLNEQVNKEMQSSNLYMSMSSWCYTHSLDGAGLFLFDHAAEEYEHAKKLIIFLNENNVPVQLTSISAPEHKFEGLTQIFQKAYEHEQHISESINNIVDHAIKSKDHATFNFLQWYVAEQHEEEVLFKDILDKIELIGNENHGLYLADQYVKGIAKSRKS

SEQ ID NO: 8968 - protein, 1315 aa, Artificial Sequence
  SARS-CoV-2/Australia/NSW56/2020__EPI_ISL_417408 spike protein (1-1147)(K986P_V987P_ H1048Q_H1064N_ H1083N_H1101N) Ferritin construct
MFVFLVLLPLVSSQCVNLTTRTQLPPAYTNSFTRGVYYPDKVFRSSVLHSTQDLFLPFFSNVTWFHAIHVSGTNGTKRFDNPVLPFNDGVYFASTEKSNIIRGWIFGTTLDSKTQSLLIVNNATNVVIKVCEFQFCNDPFLGVYYHKNNKSWMESEFRVYSSANNCTFEYVSQPFLMDLEGKQGNFKNLREFVFKNIDGYFKIYSKHTPINLVRDLPQGFSALEPLVDLPIGINITRFQTLLALHRSYLTPGDSSSGWTAGAAAYYVGYLQPRTFLLKYNENGTITDAVDCALDPLSETKCTLKSFTVEKGIYQTSNFRVQPTESIVRFPNITNLCPFGEVFNATRFASVYAWNRKRISNCVADYSVLYNSASFSTFKCYGVSPTKLNDLCFTNVYADSFVIRGDEVRQIAPGQTGKIADYNYKLPDDFTGCVIAWNSNNLDSKVGGNYNYLYRLFRKSNLKPFERDISTEIYQAGSTPCNGVEGFNCYFPLQSYGFQPTNGVGYQPYRVVVLSFELLHAPATVCGPKKSTNLVKNKCVNFNFNGLTGTGVLTESNKKFLPFQQFGRDIADTTDAVRDPQTLEILDITPCSFGGVSVITPGTNTSNQVAVLYQDVNCTEVPVAIHADQLTPTWRVYSTGSNVFQTRAGCLIGAEHVNNSYECDIPIGAGICASYQTQTNSPRRARSVASQSIIAYTMSLGAENSVAYSNNSIAIPTNFTISVTTEILPVSMTKTSVDCTMYICGDSTECSNLLLQYGSFCTQLNRALTGIAVEQDKNTQEVFAQVKQIYKTPPIKDFGGFNFSQILPDSSKPSKRSFIEDLLFNKVTLADAGFIKQYGDCLGDIAARDLICAQKFNGLTVLPPLLTDEMIAQYTSALLAGTITSGWTFGAGAALQIPFAMQMAYRFNGIGVTQNVLYENQKLIANQFNSAIGKIQDSLSSTASALGKLQDVVNQNAQALNTLVKQLSSNFGAISSVLNDILSRLDPPEAEVQIDRLITGRLQSLQTYVTQQLIRAAEIRASANLAATKMSECVLGQSKRVDFCGKGYQLMSFPQSAPHGVVFLNVTYVPAQEKNFTTAPAICNDGKAHFPREGVFVSNGTNWFVTQRNFYEPQIITTDNTFVSGNCDVVIGIVNNTVYDPLQPELDSGGGGSDIIKLLNEQVNKEMQSSNLYMSMSSWCYTHSLDGAGLFLFDHAAEEYEHAKKLIIFLNENNVPVQLTSISAPEHKFEGLTQIFQKAYEHEQHISESINNIVDHAIKSKDHATFNFLQWYVAEQHEEEVLFKDILDKIELIGNENHGLYLADQYVKGIAKSRKS

SEQ ID NO: 8969 - protein, 1315 aa, Artificial Sequence
  SARS-CoV-2/Iceland/280/2020__EPI_ISL_417608 spike protein (1-1147)(K986P_V987P_ H1048Q_H1064N_ H1083N_H1101N) Ferritin construct
MFVFLVLLPLVSSQCVNLTTRTQLPPAYTNSFTRGVYYPDKVFRSSVLHSTQDLFLPFFSNVTWFHAIHVSGTNGTKRFDNPVLPFNDGVYFASTEKSNIIRGWIFGTTLDSKTQSLLIVNNATNVVIKVCEFQFCNDPFLGVYYHKNNKSWMESEFRVYSSANNCTFEYVSQPFLMDLEGKQGNFKNLREFVFKNIDGYFKIYSKHTPINLVRDLPQGFSALEPLVDLPIGINITRFQTLLALHRSYLTPGDSSSGWTAGAAAYYVGYLQPRTFLLKYNENGTITDAVDCALDPLSETKCTLKSFTVEKGIYQTSNFRVQPTESIVRFPNITNLCPFGEVFNATRFASVYAWNRKRISNCVADYSVLYNSASFSTFKCYGVSPTKLNDLCFTNVYADSFVIRGDEVRQIAPGQTGKIADYNYKLPDDFTGCVIAWNSNNLDSKVGGNYNYLYRLFRKSNLKPFERDISTEIYQAGSTPCNGVEGFNCYFPLQSYGFQPTNGVGYQPYRVVVLSFELLHAPATVCGPKKSTNLVKNKCVNFNFNGLTGTGVLTESNKKFLPFQQFGRDIADTTDAVRDPQTLEILDITPCSFGGVSVITPGTNTSNQVAVLYQGVNCTEVPVAIHADQLTPTWRVYSTGSNVFQTRAGCLIGAEHVNNSYECDIPIGAGICASYHTQTNSPRRARSVASQSIIAYTMSLGAENSVAYSNNSIAIPTNFTISVTTEILPVSMTKTSVDCTMYICGDSTECSNLLLQYGSFCTQLNRALTGIAVEQDKNTQEVFAQVKQIYKTPPIKDFGGFNFSQILPDPSKPSKRSFIEDLLFNKVTLADAGFIKQYGDCLGDIAARDLICAQKFNGLTVLPPLLTDEMIAQYTSALLAGTITSGWTFGAGAALQIPFAMQMAYRFNGIGVTQNVLYENQKLIANQFNSAIGKIQDSLSSTASALGKLQDVVNQNAQALNTLVKQLSSNFGAISSVLNDILSRLDPPEAEVQIDRLITGRLQSLQTYVTQQLIRAAEIRASANLAATKMSECVLGQSKRVDFCGKGYQLMSFPQSAPHGVVFLNVTYVPAQEKNFTTAPAICNDGKAHFPREGVFVSNGTNWFVTQRNFYEPQIITTDNTFVSGNCDVVIGIVNNTVYDPLQPELDSGGGGSDIIKLLNEQVNKEMQSSNLYMSMSSWCYTHSLDGAGLFLFDHAAEEYEHAKKLIIFLNENNVPVQLTSISAPEHKFEGLTQIFQKAYEHEQHISESINNIVDHAIKSKDHATFNFLQWYVAEQHEEEVLFKDILDKIELIGNENHGLYLADQYVKGIAKSRKS

SEQ ID NO: 8970 - protein, 1315 aa, Artificial Sequence; identical to SEQ ID NO: 8925
  SARS-CoV-2/Iceland/247/2020__EPI_ISL_417575 spike protein (1-1147)(K986P_V987P_ H1048Q_H1064N_ H1083N_H1101N) Ferritin construct

SEQ ID NO: 8971 - protein, 1315 aa, Artificial Sequence
  SARS-CoV-2/Iceland/238/2020__EPI_ISL_417566 spike protein (1-1147)(K986P_V987P_ H1048Q_H1064N_ H1083N_H1101N) Ferritin construct
MFVFLVLLPLVSSQCVNLTTRTQLPPAYTNSFTRGVYYPDKVFRSSVLHSTQDLFLPFFSNVTWFHAIHVSGTNGTKRFDNPVLPFNDGVYFASTEKSNIIRGWIFGTTLDSKTQSLLIVNNATNVVIKVCEFQFCNDPFLGVYYHKNNKSWMESEFRVYSSANNCTFEYVSQPFLMDLEGKQGNFKNLREFVFKNIDGYFKIYSKHTPINLVRDLPQGFSALEPLVDLPIGINITRFQTLLALHRSYLTPGDSSSGWTAGAAAYYVGYLQPRTFLLKYNENGTITDAVDCALDPLSETKCTLKSFTVEKGIYQTSNFRVQPTESIVRFPNITNLCPFGEVFNATRFASVYAWNRKRISNCVADYSVLYNSASFSTFKCYGVSPTKLNDLCFTNVYADSFVIRGDEVRQIAPGQTGKIADYNYKLPDDFTGCVIAWNSNNLDSKVGGNYNYLYRLFRKSNLKPFERDISTEIYQAGSTPCNGVEGFNCYFPLQSYGFQPTNGVGYQPYRVVVLSFELLHAPATVCGPKKSTNLVKNKCVNFNFNGLTGTGVLTESNKKFLPFQQFGRDIADTTDAVRDPQTLEILDITPCSFGGVSVITPGTNTSNQVAVLYQGVNCTEVPVAIHADQLTPTWRVYSTGSNVFQTRAGCLIGAEHVNNSYECDIPIGAGICASYQTQTNSPRRARSVASQSIIAYTMSLGAENSVAYSNNSIAIPTNFTISVTTEILPVSMTKTSVDCTMYICGDSTECSNLLLQYGSFCTQLNRALTGIAVEQDKNTQEVFAQVKQIYKTPPIKDFGGFNFSQILPDPSKPSKRSFIEDLLFNKVTLADVGFIKQYGDCLGDIAARDLICAQKFNGLTVLPPLLTDEMIAQYTSALLAGTITSGWTFGAGAALQIPFAMQMAYRFNGIGVTQNVLYENQKLIANQFNSAIGKIQDSLSSTASALGKLQDVVNQNAQALNTLVKQLSSNFGAISSVLNDILSRLDPPEAEVQIDRLITGRLQSLQTYVTQQLIRAAEIRASANLAATKMSECVLGQSKRVDFCGKGYQLMSFPQSAPHGVVFLNVTYVPAQEKNFTTAPAICNDGKAHFPREGVFVSNGTNWFVTQRNFYEPQIITTDNTFVSGNCDVVIGIVNNTVYDPLQPELDSGGGGSDIIKLLNEQVNKEMQSSNLYMSMSSWCYTHSLDGAGLFLFDHAAEEYEHAKKLIIFLNENNVPVQLTSISAPEHKFEGLTQIFQKAYEHEQHISESINNIVDHAIKSKDHATFNFLQWYVAEQHEEEVLFKDILDKIELIGNENHGLYLADQYVKGIAKSRKS

SEQ ID NO: 8972 - protein, 1315 aa, Artificial Sequence
  SARS-CoV-2/Greece/16/2020__EPI_ISL_418265 spike protein (1-1147)(K986P_V987P_ H1048Q_H1064N_ H1083N_H1101N) Ferritin construct
MFVFLVLLPLVSSQCVNLTTRTQLPPAYTNSFTRGVYYPDKVFRSSVLHSTQDLFLPFFSNVTWFHAIHVSGTNGTKRFDNPVLPFNDGVYFASTEKSNIIRGWIFGTTLDSKTQSLLIVNNATNVVIKVCEFQFCNDPFLGVYYHKNNKSWMESEFRVYSSANNCTFEYVSQPFLMDLEGKQGNFKNLREFVFKNVDGYFKIYSKHTPINLVRDLPQGFSALEPLVDLPIGINITRFQTLLALHRSYLTPGDSSSGWTAGAAAYYVGYLQPRTFLLKYNENGTITDAVDCALDPLSETKCTLKSFTVEKGIYQTSNFRVQPTESIVRFPNITNLCPFGEVFNATRFASVYAWNRKRISNCVADYSVLYNSASFSTFKCYGVSPTKLNDLCFTNVYADSFVIRGDEVRQIAPGQTGKIADYNYKLPDDFTGCVIAWNSNNLDSKVGGNYNYLYRLFRKSNLKPFERDISTEIYQAGSTPCNGVEGFNCYFPLQSYGFQPTNGVGYQPYRVVVLSFELLHAPATVCGPKKSTNLVKNKCVNFNFNGLTGTGVLTESNKKFLPFQQFGRDIADTTDAVRDPQTLEILDITPCSFGGVSVITPGTNTSNQVAVLYQDVNCTEVPVAIHADQLTPTWRVYSTGSNVFQTRAGCLIGAEHVNNSYECDIPIGAGICASYQTQTNSPRRARSVASQSIIAYTMSLGAENSVAYSNNSIAIPTNFTISVTTEILPVSMTKTSVDCTMYICGDSTECSNLLLQYGSFCTQLNRALTGIAVEQDKNTQEVFAQVKQIYKTPPIKDFGGFNFSQILPDPSKPSKRSFIEDLLFNKVTLADAGFIKQYGDCLGDIAARDLICAQKFNGLTVLPPLLTDEMIAQYTSALLAGTITSGWTFGAGAALQIPFAMQMAYRFNGIGVTQNVLYENQKLIANQFNSAIGKIQDSLSSTASALGKLQDVVNQNAQALNTLVKQLSSNFGAISSVLNDILSRLDPPEAEVQIDRLITGRLQSLQTYVTQQLIRAAEIRASANLAATKMSECVLGQSKRVDFCGKGYQLMSFPQSAPHGVVFLNVTYVPAQEKNFTTAPAICNDGKAHFPREGVFVSNGTNWFVTQRNFYEPQIITTDNTFVSGNCDVVIGIVNNTVYDPLQPELDSGGGGSDIIKLLNEQVNKEMQSSNLYMSMSSWCYTHSLDGAGLFLFDHAAEEYEHAKKLIIFLNENNVPVQLTSISAPEHKFEGLTQIFQKAYEHEQHISESINNIVDHAIKSKDHATFNFLQWYVAEQHEEEVLFKDILDKIELIGNENHGLYLADQYVKGIAKSRKS

SEQ ID NO: 8973 - protein, 1315 aa, Artificial Sequence
  SARS-CoV-2/Iceland/319/2020__EPI_ISL_417648 spike protein (1-1147)(K986P_V987P_ H1048Q_H1064N_ H1083N_H1101N) Ferritin construct
MFVFLVLLPLVSSQCVNLTTRTQLPPAYTNSFTRGVYYPDKVFRSSVLHSTQDLFLPFFSNVTWFHAIHVSGTNGTKRFDNPVLPFNDGVYFASTEKSNIIRGWIFGTTLDSKTQSLLIVNNATNVVIKVCEFQFCNDPFLGVYYHKNNKSWMESEFRVYSSANNCTFEYVSQPFLIDLEGKQGNFKNLREFVFKNIDGYFKIYSKHTPINLVRDLPQGFSALEPLVDLPIGINITRFQTLLALHRSYLTPGDSSSGWTAGAAAYYVGYLQPRTFLLKYNENGTITDAVDCALDPLSETKCTLKSFTVEKGIYQTSNFRVQPTESIVRFPNITNLCPFGEVFNATRFASVYAWNRKRISNCVADYSVLYNSASFSTFKCYGVSPTKLNDLCFTNVYADSFVIRGDEVRQIAPGQTGKIADYNYKLPDDFTGCVIAWNSNNLDSKVGGNYNYLYRLFRKSNLKPFERDISTEIYQAGSTPCNGVEGFNCYFPLQSYGFQPTNGVGYQPYRVVVLSFELLHAPATVCGPKKSTNLVKNKCVNFNFNGLTGTGVLTESNKKFLPFQQFGRDIADTTDAVRDPQTLEILDITPCSFGGVSVITPGTNTSNQVAVLYQGVNCTEVPVAIHADQLTPTWRVYSTGSNVFQTRAGCLIGAEHVNNSYECDIPIGAGICASYQTQTNSPRRARSVASQSIIAYTMSLGAENSVAYSNNSIAIPTNFTISVTTEILPVSMTKTSVDCTMYICGDSTECSNLLLQYGSFCTQLNRALTGIAVEQDKNTQEVFAQVKQIYKTPPIKDFGGFNFSQILPDPSKPSKRSFIEDLLFNKVTLADAGFIKQYGDCLGDIAARDLICAQKFNGLTVLPPLLTDEMIAQYTSALLAGTITSGWTFGAGAALQIPFAMQMAYRFNGIGVTQNVLYENQKLIANQFNSAIGKIQDSLSSTASALGKLQDVVNQNAQALNTLVKQLSSNFGAISSVLNDILSRLDPPEAEVQIDRLITGRLQSLQTYVTQQLIRAAEIRASANLAATKMSECVLGQSKRVDFCGKGYQLMSFPQSAPHGVVFLNVTYVPAQEKNFTTAPAICNDGKAHFPREGVFVSNGTNWFVTQRNFYEPQIITTDNTFVSGNCDVVIGIVNNTVYDPLQPELDSGGGGSDIIKLLNEQVNKEMQSSNLYMSMSSWCYTHSLDGAGLFLFDHAAEEYEHAKKLIIFLNENNVPVQLTSISAPEHKFEGLTQIFQKAYEHEQHISESINNIVDHAIKSKDHATFNFLQWYVAEQHEEEVLFKDILDKIELIGNENHGLYLADQYVKGIAKSRKS

SEQ ID NO: 8974 - protein, 1315 aa, Artificial Sequence
  SARS-CoV-2/Congo/94/2020__EPI_ISL_417947 spike protein (1-1147)(K986P_V987P_ H1048Q_H1064N_ H1083N_H1101N) Ferritin construct
MFVFLVLLPLVSSQCVNLTTRTQLPPAYTNSFTRGVYYPDKVFRSSVLHSTQDLFLPFFSNVTWFHAIHVSGTNGTKRFDNPVLPFNDGVYFASTEKSNIIRGWIFGTTLDSKTQSLLIVNNATNVVIKVCEFQFCNDPFLGVYYHKNNKSWMESEFRVYSSANNCTFEYVSQPFLMDLEGKQGNFKNLREFVFKNIDGYFKIYSKHTPINLVRDLPQGFSALEPLVDLPIGINITRFQTLLALHRSYLTPGDSSSGWTAGAAAYYVGYLQPRTFLLKYNENGTITDAVDCALDPLSETKCTLKSFTVEKGIYQTSNFRVQPTESIVRFPNITNLCPFGEVFNATRFASVYAWNRKRISNCVADYSVLYNSASFSTFKCYGVSPTKLNDLCFTNVYADSFVIRGDEVRQIAPGQTGKIADYNYKLPDDFTGCVIAWNSNNLDSKVGGNYNYLYRLFRKSNLKPFERDISTEIYQAGSTPCNGVEGFNCYFPLQSYGFQPTNGVGYQPYRVVVLSFELLHAPATVCGPKKSTNLVKNKCVNFNFNGLTGTGVLTESNKKFLPFQQFGRDIADTTDAVRDPQTLEILDITPCSFGGVSVITPGTNTSNQVAVLYQGVNCTEVPVAIHADQLTPTWRVYSTGSNVFQTRAGCLIGAEHVNNSYECDIPIGAGICASYQTQTNSPRRARSVASQSIIAYTMSLGAENSVAYSNNSIAIPTNFTISVTTEILPVSMTKTSVDCTMYICGDSTECSNLLLQYGSFCTQLNRALTGIAVEQDKNTQEVFAQVKQIYKTPPIKDFGGFNFSQILPDPSKPSKRSFIEDILFNKVTLADAGFIKQYGDCLGDIAARDLICAQKFNGLTVLPPLLTDEMIAQYTSALLAGTITSGWTFGAGAALQIPFAMQMAYRFNGIGVTQNVLYENQKLIANQFNSAIGKIQDSLSSTASALGKLQDVVNQNAQALNTLVKQLSSNFGAISSVLNDILSRLDPPEAEVQIDRLITGRLQSLQTYVTQQLIRAAEIRASANLAATKMSECVLGQSKRVDFCGKGYQLMSFPQSAPHGVVFLNVTYVPAQEKNFTTAPAICNDGKAHFPREGVFVSNGTNWFVTQRNFYEPQIITTDNTFVSGNCDVVIGIVNNTVYDPLQPELDSGGGGSDIIKLLNEQVNKEMQSSNLYMSMSSWCYTHSLDGAGLFLFDHAAEEYEHAKKLIIFLNENNVPVQLTSISAPEHKFEGLTQIFQKAYEHEQHISESINNIVDHAIKSKDHATFNFLQWYVAEQHEEEVLFKDILDKIELIGNENHGLYLADQYVKGIAKSRKS

SEQ ID NO: 8975 - protein, 1315 aa, Artificial Sequence
  SARS-CoV-2/Congo/158/2020__EPI_ISL_417950 spike protein (1-1147)(K986P_V987P_ H1048Q_H1064N_ H1083N_H1101N) Ferritin construct
MFVFLVLLPLVSSQCVNLTTRTQLPPAYTNSFTRGVYYPDKVFRSSVLHSTQDLFLPFFSNVTWFHAIHVSGTNGTKRFDNPVLPFNDGVYFASTEKSNIIRGWIFGTTLDSKTQSLLIVNNATNVVIKVCEFQFCNDPFLGVYYHKNNKSWMESEFRVYSSANNCTFEYVSQPFLMDLEGKQGNFKNLREFVFKNIDGYFKIYSKHTPINLVRDLPQGFSALEPLVDLPIGINITRFQTLLALHRSYLTPGDSSSGWTAGAAAYYVGYLQPRTFLLKYNENGTITDAVDCALDPLSETKCTLKSFTVEKGIYQTSNFRVQPTESIVRFPNITNLCPFGEVFNATRFASVYAWNRKRISNCVADYSVLYNSASFSTFKCYGVSPTKLNDLCFTNVYADSFVIRGDEVRQIAPGQTGKIADYNYKLPDDFTGCVIAWNSNNLDSKVGGNYNYLYRLFRKSNLKPFERDISTEIYQAGSTPCNGVEGFNCYFPLQSYGFQPTNGVGYQPYRVVVLSFELLHAPATVCGPKKSTNLVKNKCVNFNFNGLTGTGVLTESNKKFLPFQQFGRDIADTTDAVRDPQTLEILDITPCSFGGVSVITPGTNTSNQVAVLYQDVNCTEVPVAIHADQLTPTWRVYSTGSNVFQTRAGCLIGAEHVNNSYECDIPIGAGICASYQTQTNSPRRARSVASQSIIAYTMSLGAENSVAYSNNSIAIPTNFTISVTTEILPVSMTKTSVDCTMYICGDSTECSNLLLQYGSFCTQLNRALTGIAVEQDKNTQEVFAQVKQIYKTPPIKDFGGFNFSQILPDPSKPSKRSFIEDLLFNKVTLADAGFIKQYGDCLGDIAARDLICAQKFNGLTVLPPLLTDEMIAQYTSALLAGTITSGWTFGAGAALQIPFAMQMAYRFNGIGVTQNVLYENQKLIANQFNSAIGKIQDSLSSTASALGKLQDVVNQNAQALNTLVKQLSSNFGAISSVLNDILSRLDPPEAEVQIDRLITGRLQSLQTYVTQQLIRAAEIRASANLAATKMSECVLGQSKRVDFCGKGYQLMSFPQSAPHGVVFLNVTYVPAQEKNFTTAPAICNDGKAHFPREGVFVSNGTNWFVTQRNFYEPQIITTDNTFLSGNCDVVIGIVNNTVYDPLQPELDSGGGGSDIIKLLNEQVNKEMQSSNLYMSMSSWCYTHSLDGAGLFLFDHAAEEYEHAKKLIIFLNENNVPVQLTSISAPEHKFEGLTQIFQKAYEHEQHISESINNIVDHAIKSKDHATFNFLQWYVAEQHEEEVLFKDILDKIELIGNENHGLYLADQYVKGIAKSRKS

SEQ ID NO: 8976 - protein, 1315 aa, Artificial Sequence
  SARS-CoV-2/USA/UT-00034/2020__EPI_ISL_417977 spike protein (1-1147)(K986P_V987P_ H1048Q_H1064N_ H1083N_H1101N) Ferritin construct
MFVFLVLLPLVSSQCVNLTTRTQLPPAYTNSFTRGVYYPDKVFRSSVLHSTQDLFLPFFSNVTWFHAIHVSGTNGTKRFDNPVLPFNDGVYFASTEKSNIIRGWIFGTTLDSKTQSLLIVNNATNVVIKVCEFQFCNDPFLGVYYYKNNKSWMESEFRVYSSANNCTFEYVSQPFLMDLEGKQGNFKNLREFVFKNIDGYFKIYSKHTPINLVRDLPQGFSALEPLVDLPIGINITRFQTLLALHRSYLTPGDSSSGWTAGAAAYYVGYLQPRTFLLKYNENGTITDAVDCALDPLSETKCTLKSFTVEKGIYQTSNFRVQPTESIVRFPNITNLCPFGEVFNATRFASVYAWNRKRISNCVADYSVLYNSASFSTFKCYGVSPTKLNDLCFTNVYADSFVIRGDEVRQIAPGQTGKIADYNYKLPDDFTGCVIAWNSNNLDSKVGGNYNYLYRLFRKSNLKPFERDISTEIYQAGSTPCNGVEGFNCYFPLQSYGFQPTNGVGYQPYRVVVLSFELLHAPATVCGPKKSTNLVKNKCVNFNFNGLTGTGVLTESNKKFLPFQQFGRDIADTTDAVRDPQTLEILDITPCSFGGVSVITPGTNTSNQVAVLYQGVNCTEVPVAIHADQLTPTWRVYSTGSNVFQTRAGCLIGAEHVNNSYECDIPIGAGICASYQTQTNSPRRARSVASQSIIAYTMSLGAENSVAYSNNSIAIPTNFTISVTTEILPVSMTKTSVDCTMYICGDSTECSNLLLQYGSFCTQLNRALTGIAVEQDKNTQEVFAQVKQIYKTPPIKDFGGFNFSQILPDPSKPSKRSFIEDLLFNKVTLADAGFIKQYGDCLGDIAARDLICAQKFNGLTVLPPLLTDEMIAQYTSALLAGTITSGWTFGAGAALQIPFAMQMAYRFNGIGVTQNVLYENQKLIANQFNSAIGKIQDSLSSTASALGKLQDVVNQNAQALNTLVKQLSSNFGAISSVLNDILSRLDPPEAEVQIDRLITGRLQSLQTYVTQQLIRAAEIRASANLAATKMSECVLGQSKRVDFCGKGYQLMSFPQSAPHGVVFLNVTYVPAQEKNFTTAPAICNDGKAHFPREGVFVSNGTNWFVTQRNFYEPQIITTDNTFVSGNCDVVIGIVNNTVYDPLQPELDSGGGGSDIIKLLNEQVNKEMQSSNLYMSMSSWCYTHSLDGAGLFLFDHAAEEYEHAKKLIIFLNENNVPVQLTSISAPEHKFEGLTQIFQKAYEHEQHISESINNIVDHAIKSKDHATFNFLQWYVAEQHEEEVLFKDILDKIELIGNENHGLYLADQYVKGIAKSRKS

SEQ ID NO: 8977 - protein, 1315 aa, Artificial Sequence
  SARS-CoV-2/USA/UT-00033/2020__EPI_ISL_417976 spike protein (1-1147)(K986P_V987P_ H1048Q_H1064N_ H1083N_H1101N) Ferritin construct
MFVFLVLLPLVSSQCVNLTTRTQLPPAYTNSFTRGVYYPDKVFRSSVLHSTQDLFLPFFSNVTWFHAIHVSGTNGTKRFDNPVLPFNDGVYFASTEKSNIIRGWIFGTTLDSKTQSLLIVNNATNVVIKVCEFQFCNDPFLGVYYHKNNKSWMESEFRVYSSANNCTFEYVSQPFLMDLEGKQGNFKNLREFVFKNIDGYFKIYSKHTPINLVRDLPQGFSALEPLVDLPIGINITRFQTLLALHRSYLTPGDSSSGLTAGAAAYYVGYLQPRTFLLKYNENGTITDAVDCALDPLSETKCTLKSFTVEKGIYQTSNFRVQPTESIVRFPNITNLCPFGEVFNATRFASVYAWNRKRISNCVADYSVLYNSASFSTFKCYGVSPTKLNDLCFTNVYADSFVIRGDEVRQIAPGQTGKIADYNYKLPDDFTGCVIAWNSNNLDSKVGGNYNYLYRLFRKSNLKPFERDISTEIYQAGSTPCNGVEGFNCYFPLQSYGFQPTNGVGYQPYRVVVLSFELLHAPATVCGPKKSTNLVKNKCVNFNFNGLTGTGVLTESNKKFLPFQQFGRDIADTTDAVRDPQTLEILDITPCSFGGVSVITPGTNTSNQVAVLYQGVNCTEVPVAIHADQLTPTWRVYSTGSNVFQTRAGCLIGAEHVNNSYECDIPIGAGICASYQTQTNSPRRARSVASQSIIAYTMSLGAENSVAYSNNSIAIPTNFTISVTTEILPVSMTKTSVDCTMYICGDSTECSNLLLQYGSFCTQLNRALTGIAVEQDKNTQEVFAQVKQIYKTPPIKDFGGFNFSQILPDPSKPSKRSFIEDLLFNKVTLADAGFIKQYGDCLGDIAARDLICAQKFNGLTVLPPLLTDEMIAQYTSALLAGTITSGWTFGAGAALQIPFAMQMAYRFNGIGVTQNVLYENQKLIANQFNSAIGKIQDSLSSTASALGKLQDVVNQNAQALNTLVKQLSSNFGAISSVLNDILSRLDPPEAEVQIDRLITGRLQSLQTYVTQQLIRAAEIRASANLAATKMSECVLGQSKRVDFCGKGYQLMSFPQSAPHGVVFLNVTYVPAQEKNFTTAPAICNDGKAHFPREGVFVSNGTNWFVTQRNFYEPQIITTDNTFVSGNCDVVIGIVNNTVYDPLQPELDSGGGGSDIIKLLNEQVNKEMQSSNLYMSMSSWCYTHSLDGAGLFLFDHAAEEYEHAKKLIIFLNENNVPVQLTSISAPEHKFEGLTQIFQKAYEHEQHISESINNIVDHAIKSKDHATFNFLQWYVAEQHEEEVLFKDILDKIELIGNENHGLYLADQYVKGIAKSRKS

SEQ ID NO: 8978 - protein, 1315 aa, Artificial Sequence
  SARS-CoV-2/USA/WI-13/2020__EPI_ISL_417516 spike protein (1-1147)(K986P_V987P_ H1048Q_H1064N_ H1083N_H1101N) Ferritin construct
MFVFLVLLPLVSSQCVNLTTRTQLPPAYTNSFTRGVYYPDKVFRSSVLHSTQDLFLPFFSNVTWFHAIHVSGTNGTKRFDNPVLPFNDGVYFASTEKSNIIRGWIFGTTLDSKTQSLLIVNNATNVVIKVCEFQFCNDPFLGVYYHKNNKSWMESEFRVYSSANNCTFEYVSQPFLMDLEGKQGNFKNLREFVFKNIDGYFKIYSKHTPINLVRDLPQGFSALEPLVDLPIGINITRFQTLLALHRSYLTPGDSSSGWTAGAAAYYVGYLQPRTFLLKYNENGTITDAVDCALDPLSETKCTLKSFTVEKGIYQTSNFRVLPTESIVRFPNITNLCPFGEVFNATRFASVYAWNRKRISNCVADYSVLYNSASFSTFKCYGVSPTKLNDLCFTNVYADSFVIRGDEVRQIAPGQTGKIADYNYKLPDDFTGCVIAWNSNNLDSKVGGNYNYLYRLFRKSNLKPFERDISTEIYQAGSTPCNGVEGFNCYFPLQSYGFQPTNGVGYQPYRVVVLSFELLHAPATVCGPKKSTNLVKNKCVNFNFNGLTGTGVLTESNKKFLPFQQFGRDIADTTDAVRDPQTLEILDITPCSFGGVSVITPGTNTSNQVAVLYQGVNCTEVPVAIHADQLTPTWRVYSTGSNVFQTRAGCLIGAEHVNNSYECDIPIGAGICASYQTQTNSPRRARSVASQSIIAYTMSLGAENSVAYSNNSIAIPTNFTISVTTEILPVSMTKTSVDCTMYICGDSTECSNLLLQYGSFCTQLNRALTGIAVEQDKNTQEVFAQVKQIYKTPPIKDFGGFNFSQILPDPSKPSKRSFIEDLLFNKVTLADAGFIKQYGDCLGDIAARDLICAQKFNGLTVLPPLLTDEMIAQYTSALLAGTITSGWTFGAGAALQIPFAMQMAYRFNGIGVTQNVLYENQKLIANQFNSAIGKIQDSLSSTASALGKLQDVVNQNAQALNTLVKQLSSNFGAISSVLNDILSRLDPPEAEVQIDRLITGRLQSLQTYVTQQLIRAAEIRASANLAATKMSECVLGQSKRVDFCGKGYQLMSFPQSAPHGVVFLNVTYVPAQEKNFTTAPAICNDGKAHFPREGVFVSNGTNWFVTQRNFYEPQIITTDNTFVSGNCDVVIGIVNNTVYDPLQPELDSGGGGSDIIKLLNEQVNKEMQSSNLYMSMSSWCYTHSLDGAGLFLFDHAAEEYEHAKKLIIFLNENNVPVQLTSISAPEHKFEGLTQIFQKAYEHEQHISESINNIVDHAIKSKDHATFNFLQWYVAEQHEEEVLFKDILDKIELIGNENHGLYLADQYVKGIAKSRKS

SEQ ID NO: 8979 - protein, 1314 aa, Artificial Sequence
  SARS-CoV-2/India/1-27/2020__EPI_ISL_413522 spike protein (1-1146)(K985P_V986P_ H1047Q_H1063N_ H1082N_H1100N) Ferritin construct
MFVFLVLLPLVSSQCVNLTTRTQLPPAYTNSFTRGVYYPDKVFRSSVLHSTQDLFLPFFSNVTWFHAIHVSGTNGTKRFDNPVLPFNDGVYFASTEKSNIIRGWIFGTTLDSKTQSLLIVNNATNVVIKVCEFQFCNDPFLGVYHKNNKSWMESEFRVYSSANNCTFEYVSQPFLMDLEGKQGNFKNLREFVFKNIDGYFKIYSKHTPINLVRDLPQGFSALEPLVDLPIGINITRFQTLLALHRSYLTPGDSSSGWTAGAAAYYVGYLQPRTFLLKYNENGTITDAVDCALDPLSETKCTLKSFTVEKGIYQTSNFRVQPTESIVRFPNITNLCPFGEVFNATRFASVYAWNRKRISNCVADYSVLYNSASFSTFKCYGVSPTKLNDLCFTNVYADSFVIRGDEVIQIAPGQTGKIADYNYKLPDDFTGCVIAWNSNNLDSKVGGNYNYLYRLFRKSNLKPFERDISTEIYQAGSTPCNGVEGFNCYFPLQSYGFQPTNGVGYQPYRVVVLSFELLHAPATVCGPKKSTNLVKNKCVNFNFNGLTGTGVLTESNKKFLPFQQFGRDIADTTDAVRDPQTLEILDITPCSFGGVSVITPGTNTSNQVAVLYQDVNCTEVPVAIHADQLTPTWRVYSTGSNVFQTRAGCLIGAEHVNNSYECDIPIGAGICASYQTQTNSPRRARSVASQSIIAYTMSLGAENSVAYSNNSIAIPTNFTISVTTEILPVSMTKTSVDCTMYICGDSTECSNLLLQYGSFCTQLNRALTGIAVEQDKNTQEVFAQVKQIYKTPPIKDFGGFNFSQILPDPSKPSKRSFIEDLLFNKVTLADAGFIKQYGDCLGDIAARDLICAQKFNGLTVLPPLLTDEMIAQYTSALLAGTITSGWTFGAGAALQIPFAMQMAYRFNGIGVTQNVLYENQKLIANQFNSAIGKIQDSLSSTASALGKLQDVVNQNAQALNTLVKQLSSNFGAISSVLNDILSRLDPPEAEVQIDRLITGRLQSLQTYVTQQLIRAAEIRASANLAATKMSECVLGQSKRVDFCGKGYQLMSFPQSAPHGVVFLNVTYVPAQEKNFTTAPAICNDGKAHFPREGVFVSNGTNWFVTQRNFYEPQIITTDNTFVSGNCDVVIGIVNNTVYDPLQPELDSGGGGSDIIKLLNEQVNKEMQSSNLYMSMSSWCYTHSLDGAGLFLFDHAAEEYEHAKKLIIFLNENNVPVQLTSISAPEHKFEGLTQIFQKAYEHEQHISESINNIVDHAIKSKDHATFNFLQWYVAEQHEEEVLFKDILDKIELIGNENHGLYLADQYVKGIAKSRKS

SEQ ID NO: 8980 - protein, 1309 aa, Artificial Sequence
  SARS-CoV-2/pangolin/Guangxi/P4L/2017__EPI_ISL_410538 spike protein (1-1141)(K980P_V981P_ H1042Q_H1058N_ H1077N_H1095N) Ferritin construct
MFVFLFVLPLVSSQCVNLTTRTGIPPGYTNSSTRGVYYPDKVFRSSILHLTQDLFLPFFSNVTWFNTINYQGGFKKFDNPVLPFNDGVYFASTEKSNIIRGWIFGTTLDARTQSLLIVNNATNVVIKVCEFQFCTDPFLGVYYHNNNKTWVENEFRVYSSANNCTFEYISQPFLMDLEGKQGNFKNLREFVFKNVDGYFKIYSKHTPIDLVRDLPRGFAALEPLVDLPIGINITRFQTLLALHRSYLTPGNLESGWTTGAAAYYVGYLQQRTFLLSYNQNGTITDAVDCSLDPLSETKCTLKSLTVEKGIYQTSNFRVQPTISIVRFPNITNLCPFGEVFNASKFASVYAWNRKRISNCVADYSVLYNSTSFSTFKCYGVSPTKLNDLCFTNVYADSFVVKGDEVRQIAPGQTGVIADYNYKLPDDFTGCVIAWNSVKQDALTGGNYGYLYRLFRKSKLKPFERDISTEIYQAGSTPCNGQVGLNCYYPLERYGFHPTTGVNYQPFRVVVLSFELLNGPATVCGPKLSTTLVKDKCVNFNFNGLTGTGVLTTSKKQFLPFQQFGRDISDTTDAVRDPQTLEILDITPCSFGGVSVITPGTNTSNQVAVLYQDVNCTEVPMAIHAEQLTPAWRVYSAGANVFQTRAGCLVGAEHVNNSYECDIPVGAGICASYHSMSSLRSVNQRSIIAYTMSLGAENSVAYSNNSIAIPTNFTISVTTEILPVSMTKTSVDCTMYICGDSIECSNLLLQYGSFCTQLNRALTGIAVEQDKNTQEVFAQVKQIYKTPPIKDFGGFNFSQILPDPSKPSKRSFIEDLLFNKVTLADAGFIKQYGDCLGDIAARDLICAQKFNGLTVLPPLLTDEMIAQYTSALLAGTITSGWTFGAGAALQIPFAMQMAYRFNGIGVTQNVLYENQKLIANQFNSAIGKIQDSLSSTASALGKLQDVVNQNAQALNTLVKQLSSNFGAISSVLNDILSRLDPPEAEVQIDRLITGRLQSLQTYVTQQLIRAAEIRASANLAATKMSECVLGQSKRVDFCGKGYQLMSFPQSAPHGVVFLNVTYVPAQEKNFTTAPAICNEGKAHFPREGVFVSNGTNWFITQRNFYEPQIITTDNTFVSGSCDVVIGIVNNTVYDPLQPELDSGGGGSDIIKLLNEQVNKEMQSSNLYMSMSSWCYTHSLDGAGLFLFDHAAEEYEHAKKLIIFLNENNVPVQLTSISAPEHKFEGLTQIFQKAYEHEQHISESINNIVDHAIKSKDHATFNFLQWYVAEQHEEEVLFKDILDKIELIGNENHGLYLADQYVKGIAKSRKS

SEQ ID NO: 8981 - protein, 1309 aa, Artificial Sequence
  SARS-CoV-2/pangolin/Guangxi/P5L/2017__EPI_ISL_410540 spike protein (1-1141)(K980P_V981P_ H1042Q_H1058N_ H1077N_H1095N) Ferritin construct
MFVFLFVLPLVSSQCVNLTTRTGIPPGYTNSSTRGVYYPDKVFRSSILHLTQDLFLPFFSNVTWFNTINYQGGFKKFDNPVLPFNDGVYFASTEKSNIIRGWIFGTTLDARTQSLLIVNNATNVVIKVCEFQFCTDPFLGVYYHNNNKTWVENEFRVYSSANNCTFEYISQPFLMDLEGKQGNFKNLREFVFKNVDGYFKIYSKHTPIDLVRDLPRGFAALEPLVDLPIGINITRFQTLLALHRSYLTPGKLESGWTTGAAAYYVGYLQQRTFLLSYNQNGTITDAVDCSLDPLSETKCTLKSLTVEKGIYQTSNFRVQPTISIVRFPNITNLCPFGEVFNASKFASVYAWNRKRISNCVADYSVLYNSTSFSTFKCYGVSPTKLNDLCFTNVYADSFVVKGDEVRQIAPGQTGVIADYNYKLPDDFTGCVIAWNSVKQDALTGGNYGYLYRLFRKSKLKPFERDISTEIYQAGSTPCNGQVGLNCYYPLERYGFHPTTGVNYQPFRVVVLSFELLNGPATVCGPKLSTTLVKDKCVNFNFNGLTGTGVLTTSKKQFLPFQQFGRDISDTTDAVRDPQTLEILDITPCSFGGVSVITPGTNTSNQVAVLYQDVNCTEVPMAIHAEQLTPAWRVYSAGANVFQTRAGCLVGAEHVNNSYECDIPVGAGICASYHSMSSFRSVNQRSIIAYTMSLGAENSVAYSNNSIAIPTNFTISVTTEILPVSMTKTSVDCTMYICGDSIECSNLLLQYGSFCTQLNRALTGIAVEQDKNTQEVFAQVKQIYKTPPIKDFGGFNFSQILPDPSKPSKRSFIEDLLFNKVTLADAGFIKQYGDCLGDIAARDLICAQKFNGLTVLPPLLTDEMIAQYTSALLAGTITSGWTFGAGAALQIPFAMQMAYRFNGIGVTQNVLYENQKLIANQFNSAIGKIQDSLSSTASALGKLQDVVNQNAQALNTLVKQLSSNFGAISSVLNDILSRLDPPEAEVQIDRLITGRLQSLQTYVTQQLIRAAEIRASANLAATKMSECVLGQSKRVDFCGKGYQLMSFPQSAPHGVVFLNVTYVPAQEKNFTTAPAICNEGKAHFPREGVFVSNGTNWFITQRNFYEPQIITTDNTFVSGSCDVVIGIVNNTVYDPLQPELDSGGGGSDIIKLLNEQVNKEMQSSNLYMSMSSWCYTHSLDGAGLFLFDHAAEEYEHAKKLIIFLNENNVPVQLTSISAPEHKFEGLTQIFQKAYEHEQHISESINNIVDHAIKSKDHATFNFLQWYVAEQHEEEVLFKDILDKIELIGNENHGLYLADQYVKGIAKSRKS

SEQ ID NO: 8982 - protein, 1309 aa, Artificial Sequence
  SARS-CoV-2/pangolin/Guangxi/P5E/2017__EPI_ISL_410541 spike protein (1-1141)(K980P_V981P_ H1042Q_H1058N_ H1077N_H1095N) Ferritin construct
MFVFLFVLPLVSSQCVNLTTRTGIPPGYTNSSTRGVYYPDKVFRSSILHLTQDLFLPFFSNVTWFNTITYQGGSKKFDNPVLPFNDGVYFASTEKSNIIRGWIFGTTLDARTQSLLIVNNATNVVIKVCEFQFCTDPFLGVYYHNNNKTWVENEFRVYSSANNCTFEYISQPFLMDLEGKQGNFKNLREFVFKNVDGYFKIYSKHTPIDLVRDLPRGFAALEPLVDLPIGINITRFQTLLALHRSYLTPGKLESGWTTGAAAYYVGYLQQRTFLLSYNQNGTITDAVDCSLDPLSETKCTLKSLTVEKGIYQTSNFRVQPTISIVRFPNITNLCPFGEVFNASKFASVYAWNRKRISNCVADYSVLYNSTSFSTFKCYGVSPTKLNDLCFTNVYADSFVVKGDEVRQIAPGQTGVIADYNYKLPDDFTGCVIAWNSVKQDALTGDNYGYLYRLFRKSKLKPFERDISTEIYQAGSTPCNGQVGLNCYYPLERYGFHPTTGVNYQPFRVVVLSFELLNGPATVCGPKLSTTLVKDKCVNFNFNGLTGTGVLTTSKKQFLPFQQFGRDISDTTDAVRDPQTLEILDITPCSFGGVSVITPGTNTSNQVAVLYQDVNCTEVPMAIHAEQLTPAWRVYSAGANVFQTRAGCLVGAEHVNNSYECDIPVGAGICASYHSMSSFRSVNQRSIIAYTMSLGAENSVAYSNNSIAIPTNFTISVTTEILPVSMTKTSVDCTMYICGDSIECSNLLLQYGSFCTQLNRALTGIAVEQDKNTQEVFAQVKQIYKTPPIKDFGGFNFSQILPDPSKPSKRSFIEDLLFNKVTLADAGFIKQYGDCLGDIAARDLICAQKFNGLTVLPPLLTDEMIAQYTSALLAGTITSGWTFGAGAALQIPFAMQMAYRFNGIGVTQNVLYENQKLIANQFNSAIGKIQDSLSSTASALGKLQDVVNQNAQALNTLVKQLSSNFGAISSVLNDILSRLDPPEAEVQIDRLITGRLQSLQTYVTQQLIRAAEIRASANLAATKMSECVLGQSKRVDFCGKGYQLMSFPQSAPHGVVFLNVTYVPAQEKNFTTAPAICNEGKAHFPREGVFVSNGTNWFITQRNFYEPQIITTDNTFVSGSCDVVIGIVNNTVYDPLQPELDSGGGGSDIIKLLNEQVNKEMQSSNLYMSMSSWCYTHSLDGAGLFLFDHAAEEYEHAKKLIIFLNENNVPVQLTSISAPEHKFEGLTQIFQKAYEHEQHISESINNIVDHAIKSKDHATFNFLQWYVAEQHEEEVLFKDILDKIELIGNENHGLYLADQYVKGIAKSRKS

SEQ ID NO: 8983 - protein, 1307 aa, Artificial Sequence
  SARS-CoV-2/pangolin/Guangxi/P1E/2017__EPI_ISL_410539 spike protein (1-1139)(K978P_V979P_ H1040Q_H1056N_ H1075N_H1093N) Ferritin construct
MFVFLFVLPLVSSQCVNLTTRTGIQPGYTNSSTRGVYYPDKVFRSSILHLTQDLFLPFFSNVTWFNTINYQGGFKKFDNPVLPFNDGVYFASTEKSNIIRGWIFGTTLDARTQSLLIVNNATNVVIKVCEFQFCTDPFLGVYYHNNNKTWVENEFRVYSSANNCTFEYISQPFLMDLEGKQGNFKNLREFVFKNVDGYFKIYSKHTPIDLVRDLPRGFAALEPLVDLPIGINITRFQTLLALHRSYLTPGKLESGWTTGAAAYYVGYLQQRTFLLSYNQNGTITDAVDCSLDPLSETKCTLKSLTVEKGIYQTSNFRVQPTISIVRFPNITNLCPFGEVFNASKFASVYAWNRKRISNCVADYSVLYNSTSFSTFKCYGVSPTKLNDLCFTNVYADSFVVKGDEVRQIAPGQTGVIADYNYKLPDDFTGCVIAWNSVKQDALTGGNYLYRLFRKSKLKPFERDISTEIYQAGSTPCNGQVGLNCYYPLERYGFHPTTGVNYQPFRVVVLSFELLNGPATVCGPKLSTTLVKDKCVNFNFNGLTGTGVLTTSKKQFLPFQQFGRDISDTTDAVRDPQTLEILDITPCSFGGVSVITPGTNTSNQVAVLYQDVNCTEVPMAIHAEQLTPAWRVYSAGANVFQTRAGCLVGAEHVNNSYECDIPVGAGICASYHSMSSLRSVNQRSIIAYTMSLGAENSVAYSNNSIAIPTNFTISVTTEILPVSMTKTSVDCTMYICGDSIECSNLLLQYGSFCTQLNRALTGIAVEQDKNTQEVFAQVKQIYKTPPIKDFGGFNFSQILPDPSKPSKRSFIEDLLFNKVTLADAGFIKQYGDCLGDIAARDLICAQKFNGLTVLPPLLTDEMIAQYTSALLAGTITSGWTFGAGAALQIPFAMQMAYRFNGIGVTQNVLYENQKLIANQFNSAIGKIQDSLSSTASALGKLQDVVNQNAQALNTLVKQLSSNFGAISSVLNDILSRLDPPEAEVQIDRLITGRLQSLQTYVTQQLIRAAEIRASANLAATKMSECVLGQSKRVDFCGKGYQLMSFPQSAPHGVVFLNVTYVPAQEKNFTTAPAICNEGKAHFPREGVFVSNGTNWFITQRNFYEPQIITTDNTFVSGSCDVVIGIVNNTVYDPLQPELDSGGGGSDIIKLLNEQVNKEMQSSNLYMSMSSWCYTHSLDGAGLFLFDHAAEEYEHAKKLIIFLNENNVPVQLTSISAPEHKFEGLTQIFQKAYEHEQHISESINNIVDHAIKSKDHATFNFLQWYVAEQHEEEVLFKDILDKIELIGNENHGLYLADQYVKGIAKSRKS

SEQ ID NO: 8984 - protein, 1315 aa, Artificial Sequence
  SARS-CoV-2/Wuhan/WIV05/2019__EPI_ISL_402128 spike protein (1-1147)(I712C_T1077C) Ferritin construct
MFVFLVLLPLVSSQCVNLTTRTQLPPAYTNSFTRGVYYPDKVFRSSVLHSTQDLFLPFFSNVTWFHAIHVSGTNGTKRFDNPVLPFNDGVYFASTEKSNIIRGWIFGTTLDSKTQSLLIVNNATNVVIKVCEFQFCNDPFLGVYYHKNNKSWMESEFRVYSSANNCTFEYVSQPFLMDLEGKQGNFKNLREFVFKNIDGYFKIYSKHTPINLVRDLPQGFSALEPLVDLPIGINITRFQTLLALHRSYLTPGDSSSGWTAGAAAYYVGYLQPRTFLLKYNENGTITDAVDCALDPLSETKCTLKSFTVEKGIYQTSNFRVQPTESIVRFPNITNLCPFGEVFNATRFASVYAWNRKRISNCVADYSVLYNSASFSTFKCYGVSPTKLNDLCFTNVYADSFVIRGDEVRQIAPGQTGKIADYNYKLPDDFTGCVIAWNSNNLDSKVGGNYNYLYRLFRKSNLKPFERDISTEIYQAGSTPCNGVEGFNCYFPLQSYGFQPTNGVGYQPYRVVVLSFELLHAPATVCGPKKSTNLVKNKCVNFNFNGLTGTGVLTESNKKFLPFQQFGRDIADTTDAVRDPQTLEILDITPCSFGGVSVITPGTNTSNQVAVLYQDVNCTEVPVAIHADQLTPTWRVYSTGSNVFQTRAGCLIGAEHVNNSYECDIPIGAGICASYQTQTNSPRRARSVASQSIIAYTMSLGAENSVAYSNNSCAIPTNFTISVTTEILPVSMTKTSVDCTMYICGDSTECSNLLLQYGSFCTQLNRALTGIAVEQDKNTQEVFAQVKQIYKTPPIKDFGGFNFSQILPDPSKPSKRSFIEDLLFNKVTLADAGFIKQYGDCLGDIAARDLICAQKFNGLTVLPPLLTDEMIAQYTSALLAGTITSGWTFGAGAALQIPFAMQMAYRFNGIGVTQNVLYENQKLIANQFNSAIGKIQDSLSSTASALGKLQDVVNQNAQALNTLVKQLSSNFGAISSVLNDILSRLDKVEAEVQIDRLITGRLQSLQTYVTQQLIRAAEIRASANLAATKMSECVLGQSKRVDFCGKGYHLMSFPQSAPHGVVFLHVTYVPAQEKNFTCAPAICHDGKAHFPREGVFVSNGTHWFVTQRNFYEPQIITTDNTFVSGNCDVVIGIVNNTVYDPLQPELDSGGGGSDIIKLLNEQVNKEMQSSNLYMSMSSWCYTHSLDGAGLFLFDHAAEEYEHAKKLIIFLNENNVPVQLTSISAPEHKFEGLTQIFQKAYEHEQHISESINNIVDHAIKSKDHATFNFLQWYVAEQHEEEVLFKDILDKIELIGNENHGLYLADQYVKGIAKSRKS

SEQ ID NO: 8985 - protein, 1311 aa, Artificial Sequence
  SARS-CoV-2/bat/Yunnan/RaTG13/2013__EPI_ISL_402131 spike protein (1-1143)(I708C_T1073C) Ferritin construct
MFVFLVLLPLVSSQCVNLTTRTQLPPAYTNSSTRGVYYPDKVFRSSVLHLTQDLFLPFFSNVTWFHAIHVSGTNGIKRFDNPVLPFNDGVYFASTEKSNIIRGWIFGTTLDSKTQSLLIVNNATNVVIKVCEFQFCNDPFLGVYYHKNNKSWMESEFRVYSSANNCTFEYVSQPFLMDLEGKQGNFKNLREFVFKNIDGYFKIYSKHTPINLVRDLPPGFSALEPLVDLPIGINITRFQTLLALHRSYLTPGDSSSGWTAGAAAYYVGYLQPRTFLLKYNENGTITDAVDCALDPLSETKCTLKSFTVEKGIYQTSNFRVQPTDSIVRFPNITNLCPFGEVFNATTFASVYAWNRKRISNCVADYSVLYNSTSFSTFKCYGVSPTKLNDLCFTNVYADSFVITGDEVRQIAPGQTGKIADYNYKLPDDFTGCVIAWNSKHIDAKEGGNFNYLYRLFRKANLKPFERDISTEIYQAGSKPCNGQTGLNCYYPLYRYGFYPTDGVGHQPYRVVVLSFELLNAPATVCGPKKSTNLVKNKCVNFNFNGLTGTGVLTESNKKFLPFQQFGRDIADTTDAVRDPQTLEILDITPCSFGGVSVITPGTNASNQVAVLYQDVNCTEVPVAIHADQLTPTWRVYSTGSNVFQTRAGCLIGAEHVNNSYECDIPIGAGICASYQTQTNSRSVASQSIIAYTMSLGAENSVAYSNNSCAIPTNFTISVTTEILPVSMTKTSVDCTMYICGDSTECSNLLLQYGSFCTQLNRALTGIAVEQDKNTQEVFAQVKQIYKTPPIKDFGGFNFSQILPDPSKPSKRSFIEDLLFNKVTLADAGFIKQYGDCLGDIAARDLICAQKFNGLTVLPPLLTDEMIAQYTSALLAGTITSGWTFGAGAALQIPFAMQMAYRFNGIGVTQNVLYENQKLIANQFNSAIGKIQDSLSSTASALGKLQDVVNQNAQALNTLVKQLSSNFGAISSVLNDILSRLDKVEAEVQIDRLITGRLQSLQTYVTQQLIRAAEIRASANLAATKMSECVLGQSKRVDFCGKGYHLMSFPQSAPHGVVFLHVTYVPAQEKNFTCAPAICHDGKAHFPREGVFVSNGTHWFVTQRNFYEPQIITTDNTFVSGSCDVVIGIVNNTVYDPLQPELDSGGGGSDIIKLLNEQVNKEMQSSNLYMSMSSWCYTHSLDGAGLFLFDHAAEEYEHAKKLIIFLNENNVPVQLTSISAPEHKFEGLTQIFQKAYEHEQHISESINNIVDHAIKSKDHATFNFLQWYVAEQHEEEVLFKDILDKIELIGNENHGLYLADQYVKGIAKSRKS

SEQ ID NO: 8986 - protein, 1315 aa, Artificial Sequence
  SARS-CoV-2/Wuhan/HBCDC-HB-01/2019__EPI_ISL_402132 spike protein (1-1147)(I712C_T1077C) Ferritin construct
MFVFLVLLPLVSSQCVNLTTRTQLPPAYTNSITRGVYYPDKVFRSSVLHSTQDLFLPFFSNVTWFHAIHVSGTNGTKRFDNPVLPFNDGVYFASTEKSNIIRGWIFGTTLDSKTQSLLIVNNATNVVIKVCEFQFCNDPFLGVYYHKNNKSWMESEFRVYSSANNCTFEYVSQPFLMDLEGKQGNFKNLREFVFKNIDGYFKIYSKHTPINLVRDLPQGFSALEPLVDLPIGINITRFQTLLALHRSYLTPGDSSSGWTAGAAAYYVGYLQPRTFLLKYNENGTITDAVDCALDPLSETKCTLKSFTVEKGIYQTSNFRVQPTESIVRFPNITNLCPFGEVFNATRFASVYAWNRKRISNCVADYSVLYNSASFSTFKCYGVSPTKLNDLCFTNVYADSFVIRGDEVRQIAPGQTGKIADYNYKLPDDFTGCVIAWNSNNLDSKVGGNYNYLYRLFRKSNLKPFERDISTEIYQAGSTPCNGVEGFNCYFPLQSYGFQPTNGVGYQPYRVVVLSFELLHAPATVCGPKKSTNLVKNKCVNFNFNGLTGTGVLTESNKKFLPFQQFGRDIADTTDAVRDPQTLEILDITPCSFGGVSVITPGTNTSNQVAVLYQDVNCTEVPVAIHADQLTPTWRVYSTGSNVFQTRAGCLIGAEHVNNSYECDIPIGAGICASYQTQTNSPRRARSVASQSIIAYTMSLGAENSVAYSNNSCAIPTNFTISVTTEILPVSMTKTSVDCTMYICGDSTECSNLLLQYGSFCTQLNRALTGIAVEQDKNTQEVFAQVKQIYKTPPIKDFGGFNFSQILPDPSKPSKRSFIEDLLFNKVTLADAGFIKQYGDCLGDIAARDLICAQKFNGLTVLPPLLTDEMIAQYTSALLAGTITSGWTFGAGAALQIPFAMQMAYRFNGIGVTQNVLYENQKLIANQFNSAIGKIQDSLSSTASALGKLQDVVNQNAQALNTLVKQLSSNFGAISSVLNDILSRLDKVEAEVQIDRLITGRLQSLQTYVTQQLIRAAEIRASANLAATKMSECVLGQSKRVDFCGKGYHLMSFPQSAPHGVVFLHVTYVPAQEKNFTCAPAICHDGKAHFPREGVFVSNGTHWFVTQRNFYEPQIITTDNTFVSGNCDVVIGIVNNTVYDPLQPELDSGGGGSDIIKLLNEQVNKEMQSSNLYMSMSSWCYTHSLDGAGLFLFDHAAEEYEHAKKLIIFLNENNVPVQLTSISAPEHKFEGLTQIFQKAYEHEQHISESINNIVDHAIKSKDHATFNFLQWYVAEQHEEEVLFKDILDKIELIGNENHGLYLADQYVKGIAKSRKS

SEQ ID NO: 8987 - protein, 1315 aa, Artificial Sequence
  SARS-CoV-2/Guangdong/20SF028/2020__EPI_ISL_403936 spike protein (1-1147)(I712C_T1077C) Ferritin construct
MFVFLVLLPLVSSQCVNLTTRTQLPPAYTNSFTRGVYYPDKVFRSSVLYSTQDLFLPFFSNVTWFHAIHVSGTNGTKRFDNPVLPFNDGVYFASTEKSNIIRGWIFGTTLDSKTQSLLIVNNATNVVIKVCEFQFCNDPFLGVYYHKNNKSWMESEFRVYSSANNCTFEYVSQPFLMDLEGKQGNFKNLREFVFKNIDGYFKIYSKHTPINLVRDLPQGFSALEPLVDLPIGINITRFQTLLALHRSYLTPGDSSSGWTAGAAAYYVGYLQPRTFLLKYNENGTITDAVDCALDPLSETKCTLKSFTVEKGIYQTSNFRVQPTESIVRFPNITNLCPFGEVFNATRFASVYAWNRKRISNCVADYSVLYNSASFSTFKCYGVSPTKLNDLCFTNVYADSFVIRGDEVRQIAPGQTGKIADYNYKLPDDFTGCVIAWNSNNLDSKVGGNYNYLYRLFRKSNLKPFERDISTEIYQAGSTPCNGVEGFNCYFPLQSYGFQPTNGVGYQPYRVVVLSFELLHAPATVCGPKKSTNLVKNKCVNFNFNGLTGTGVLTESNKKFLPFQQFGRDIADTTDAVRDPQTLEILDITPCSFGGVSVITPGTNTSNQVAVLYQDVNCTEVPVAIHADQLTPTWRVYSTGSNVFQTRAGCLIGAEHVNNSYECDIPIGAGICASYQTQTNSPRRARSVASQSIIAYTMSLGAENSVAYSNNSCAIPTNFTISVTTEILPVSMTKTSVDCTMYICGDSTECSNLLLQYGSFCTQLNRALTGIAVEQDKNTQEVFAQVKQIYKTPPIKDFGGFNFSQILPDPSKPSKRSFIEDLLFNKVTLADAGFIKQYGDCLGDIAARDLICAQKFNGLTVLPPLLTDEMIAQYTSALLAGTITSGWTFGAGAALQIPFAMQMAYRFNGIGVTQNVLYENQKLIANQFNSAIGKIQDSLSSTASALGKLQDVVNQNAQALNTLVKQLSSNFGAISSVLNDILSRLDKVEAEVQIDRLITGRLQSLQTYVTQQLIRAAEIRASANLAATKMSECVLGQSKRVDFCGKGYHLMSFPQSAPHGVVFLHVTYVPAQEKNFTCAPAICHDGKAHFPREGVFVSNGTHWFVTQRNFYEPQIITTDNTFVSGNCDVVIGIVNNTVYDPLQPELDSGGGGSDIIKLLNEQVNKEMQSSNLYMSMSSWCYTHSLDGAGLFLFDHAAEEYEHAKKLIIFLNENNVPVQLTSISAPEHKFEGLTQIFQKAYEHEQHISESINNIVDHAIKSKDHATFNFLQWYVAEQHEEEVLFKDILDKIELIGNENHGLYLADQYVKGIAKSRKS

SEQ ID NO: 8988 - protein, 1315 aa, Artificial Sequence
  SARS-CoV-2/Shenzhen/SZTH-001/2020__EPI_ISL_406592 spike protein (1-1147)(I712C_T1077C) Ferritin construct
MFVFLVLLPLVSSQCVNLTTRTQLPPAYTNSFTRGVYYPDKVFRSSVLHSTQDLFLPFFSNVTWFHAIHVSGTNGTKRFDNPVLPFNDGVYFASTEKSNIIRGWIFGTTLDSKTQSLLIVNNATNVVIKVCEFQFCNDPFLGVYYHKNNKSWMESEFRVYSSANNCTFEYVSQPFLMDLEGKQGNFKNLREFVFKNIDGYFKIYSKHTPINLVRDLPQGFSALEPLVDLPIGINITRFQTLLALHRSYLTPGDSSSGWTAGAAAYYVGYLQPRTFLLKYNENGTITDAVDCALDPLSETKCTLKSFTVEKGIYQTSNFRVQPTESIVRFPNITNLCPFGEVFNATRFASVYAWNRKRISNCVADYSVLYNSASFSTFKCYGVSPTKLNDLCFTNVYADSFVIRGDEVRQIAPGQTGKIADYNYKLPDDFTGCVIAWNSNNLDSKVGGNYNYLYRLFRKSNLKPFERDISTEIYQAGSTPCNGVEGFNCYFPLQSYGFQPTNGVGYQPYRVVVLSFELLHAPATVCGPKKSTNLVKNKCVNFNFNGLTGTGVLTESNKKFLPFQQFGRDIADTTDAVRDPQTLEILDITPCSFGGVSVITPGTNTSNQVAVLYQDVNCTEVPVAIHADQLTPTWRVYSTGSNVFQTRAGCLIGAEHVNNSYECDIPIGAGICASYQTQTNSPRRARSVASQSIIAYTMSLGAENSVAYSNNSCAIPTNFTISVTTEILPVSMTKTSVDCTMYICGDSTECSNLLLQYGSFCTQLNRALTGIAVEQDKNTQEVFAQVKQIYKTPPIKDFGGFNFSQILPDPSKPSKRSFIEDLLFNKVTLADAGFIKQYGDCLGDIAARDLICAQKFNGLTVLPPLLTDEMIAQYTSALLAGTITSGWTFGAGAALQIPFAMQMAYRFNGIGVTQNVLYENQKLIANQFNSAIGKIQDSLSSTASALGKLQDVVNQNAQALNTLVKQLSSNFGAISSVLNDILSRLDKVEAEVQIDRLITGRLQSLQTYVTQQLIRAAEIRASANLAATKMSECVLGQSKRVDFCGKGYHLMSFPQSAPHGVVFLHVTYVPAQEKNFTCAPAICHDGKAHFPREGVFVSNGTHWFVTQRNFYEPQIITTDNTFVSGNCDVLIGIVNNTVYDPLQPELDSGGGGSDIIKLLNEQVNKEMQSSNLYMSMSSWCYTHSLDGAGLFLFDHAAEEYEHAKKLIIFLNENNVPVQLTSISAPEHKFEGLTQIFQKAYEHEQHISESINNIVDHAIKSKDHATFNFLQWYVAEQHEEEVLFKDILDKIELIGNENHGLYLADQYVKGIAKSRKS

SEQ ID NO: 8989 - protein, 1315 aa, Artificial Sequence
  SARS-CoV-2/Shenzhen/SZTH-004/2020__EPI_ISL_406595 spike protein (1-1147)(I712C_T1077C) Ferritin construct
MFVFLVLLPLVSSQCVNLTTRTQLPPAYTNSFTRGVYYPDKVFRSSVLHSTQDLFLPFFSNVTWFHAIHVSGTNGTKRFDNPVLPFNDGVYFASTEKSNIIRGWIFGTTLDSKTQSLLIVNNATNVVIKVCEFQFCNDPFLGVYYHKNNKSWMESEFRVYSSANNCTFEYVSQPFLMDLEGKQGNFKNLREFVFKNIDGYFKIYSKHTPINLVRDLPQGFSALEPLVDLPIGINITRFQTLLALHRSYLTPGDSSSGWTAGAAAYYVGYLQPRTFLLKYNENGTITDAVDCALDPLSETKCTLKSFTVEKGIYQTSNFRVQPTESIVRFPNITNLCPFGEVFNATRFASVYAWDRKRISNCVAYYSVLYNSASFSTFKCYGVSPTKLNDLCFTNVYADSFVIRGDEVRQIAPGQTGKIADYNYKLPDDFTGCVIAWNSNNLDSKVGGNYNYLYRLFRKSNLKPFERDISTEIYQAGSTPCNGVEGFNCYFPLQSYGFQPTNGVGYQPYRVVVLSFELLHAPATVCGPKKSTNLVKNKCVNFNFNGLTGTGVLTESNKKFLPFQQFGRDIADTTDAVRDPQTLEILDITPCSFGGVSVITPGTNTSNQVAVLYQDVNCTEVPVAIHADQLTPTWRVYSTGSNVFQTRAGCLIGAEHVNNSYECDIPIGAGICASYQTQTNSPRRARSVASQSIIAYTMSLGAENSVAYSNNSCAIPTNFTISVTTEILPVSMTKTSVDCTMYICGDSTECSNLLLQYGSFCTQLNRALTGIAVEQDKNTQEVFAQVKQIYKTPPIKDFGGFNFSQILPDPSKPSKRSFIEDLLFNKVTLADAGFIKQYGDCLGDIAARDLICAQKFNGLTVLPPLLTDEMIAQYTSALLAGTITSGWTFGAGAALQIPFAMQMAYRFNGIGVTQNVLYENQKLIANQFNSAIGKIQDSLSSTASALGKLQDVVNQNAQALNTLVKQLSSNFGAISSVLNDILSRLDKVEAEVQIDRLITGRLQSLQTYVTQQLIRAAEIRASANLAATKMSECVLGQSKRVDFCGKGYHLMSFPQSAPHGVVFLHVTYVPAQEKNFTCAPAICHDGKAHFPREGVFVSNGTHWFVTQRNFYEPQIITTDNTFVSGNCDVVIGIVNNTVYDPLQPELDSGGGGSDIIKLLNEQVNKEMQSSNLYMSMSSWCYTHSLDGAGLFLFDHAAEEYEHAKKLIIFLNENNVPVQLTSISAPEHKFEGLTQIFQKAYEHEQHISESINNIVDHAIKSKDHATFNFLQWYVAEQHEEEVLFKDILDKIELIGNENHGLYLADQYVKGIAKSRKS

SEQ ID NO: 8990 - protein, 1315 aa, Artificial Sequence
  SARS-CoV-2/France/IDF0372/2020__EPI_ISL_406596 spike protein (1-1147)(I712C_T1077C) Ferritin construct
MFVFLVLLPLVSSQCVNLTTRTQLPPAYTNSFTRGVYYPDKVFRSSVLHSTQDLFLPFFSNVTWFHAIHVSGTNGTKRFDNPVLPFNDGVYFASTEKSNIIRGWIFGTTLDSKTQSLLIVNNATNVVIKVCEFQFCNDPFLGVYYHKNNKSWMESEFRVYSSANNCTFEYVSQPFLMDLEGKQGNFKNLREFVFKNIDGYFKIYSKHTPINLVRDLPQGFSALEPLVDLPIGINITRFQTLLALHRSYLTPGDSSSGWTAGAAAYYVGYLQPRTFLLKYNENGTITDAVDCALDPLSETKCTLKSFTVEKGIYQTSNFRVQPTESIVRFPNITNLCPFGEVFNATRFASVYAWNRKRISNCVADYSFLYNSASFSTFKCYGVSPTKLNDLCFTNVYADSFVIRGDEVRQIAPGQTGKIADYNYKLPDDFTGCVIAWNSNNLDSKVGGNYNYLYRLFRKSNLKPFERDISTEIYQAGSTPCNGVEGFNCYFPLQSYGFQPTNGVGYQPYRVVVLSFELLHAPATVCGPKKSTNLVKNKCVNFNFNGLTGTGVLTESNKKFLPFQQFGRDIADTTDAVRDPQTLEILDITPCSFGGVSVITPGTNTSNQVAVLYQDVNCTEVPVAIHADQLTPTWRVYSTGSNVFQTRAGCLIGAEHVNNSYECDIPIGAGICASYQTQTNSPRRARSVASQSIIAYTMSLGAENSVAYSNNSCAIPTNFTISVTTEILPVSMTKTSVDCTMYICGDSTECSNLLLQYGSFCTQLNRALTGIAVEQDKNTQEVFAQVKQIYKTPPIKDFGGFNFSQILPDPSKPSKRSFIEDLLFNKVTLADAGFIKQYGDCLGDIAARDLICAQKFNGLTVLPPLLTDEMIAQYTSALLAGTITSGWTFGAGAALQIPFAMQMAYRFNGIGVTQNVLYENQKLIANQFNSAIGKIQDSLSSTASALGKLQDVVNQNAQALNTLVKQLSSNFGAISSVLNDILSRLDKVEAEVQIDRLITGRLQSLQTYVTQQLIRAAEIRASANLAATKMSECVLGQSKRVDFCGKGYHLMSFPQSAPHGVVFLHVTYVPAQEKNFTCAPAICHDGKAHFPREGVFVSNGTHWFVTQRNFYEPQIITTDNTFVSGNCDVVIGIVNNTVYDPLQPELDSGGGGSDIIKLLNEQVNKEMQSSNLYMSMSSWCYTHSLDGAGLFLFDHAAEEYEHAKKLIIFLNENNVPVQLTSISAPEHKFEGLTQIFQKAYEHEQHISESINNIVDHAIKSKDHATFNFLQWYVAEQHEEEVLFKDILDKIELIGNENHGLYLADQYVKGIAKSRKS

SEQ ID NO: 8991 - protein, 1315 aa, Artificial Sequence
  SARS-CoV-2/Australia/VIC01/2020__EPI_ISL_406844 spike protein (1-1147)(I712C_T1077C) Ferritin construct
MFVFLVLLPLVSSQCVNLTTRTQLPPAYTNSFTRGVYYPDKVFRSSVLHSTQDLFLPFFSNVTWFHAIHVSGTNGTKRFDNPVLPFNDGVYFASTEKSNIIRGWIFGTTLDSKTQSLLIVNNATNVVIKVCEFQFCNDPFLGVYYHKNNKSWMESEFRVYSSANNCTFEYVSQPFLMDLEGKQGNFKNLREFVFKNIDGYFKIYSKHTPINLVRDLPQGFSALEPLVDLPIGINITRFQTLLALHRRYLTPGDSSSGWTAGAAAYYVGYLQPRTFLLKYNENGTITDAVDCALDPLSETKCTLKSFTVEKGIYQTSNFRVQPTESIVRFPNITNLCPFGEVFNATRFASVYAWNRKRISNCVADYSVLYNSASFSTFKCYGVSPTKLNDLCFTNVYADSFVIRGDEVRQIAPGQTGKIADYNYKLPDDFTGCVIAWNSNNLDSKVGGNYNYLYRLFRKSNLKPFERDISTEIYQAGSTPCNGVEGFNCYFPLQSYGFQPTNGVGYQPYRVVVLSFELLHAPATVCGPKKSTNLVKNKCVNFNFNGLTGTGVLTESNKKFLPFQQFGRDIADTTDAVRDPQTLEILDITPCSFGGVSVITPGTNTSNQVAVLYQDVNCTEVPVAIHADQLTPTWRVYSTGSNVFQTRAGCLIGAEHVNNSYECDIPIGAGICASYQTQTNSPRRARSVASQSIIAYTMSLGAENSVAYSNNSCAIPTNFTISVTTEILPVSMTKTSVDCTMYICGDSTECSNLLLQYGSFCTQLNRALTGIAVEQDKNTQEVFAQVKQIYKTPPIKDFGGFNFSQILPDPSKPSKRSFIEDLLFNKVTLADAGFIKQYGDCLGDIAARDLICAQKFNGLTVLPPLLTDEMIAQYTSALLAGTITSGWTFGAGAALQIPFAMQMAYRFNGIGVTQNVLYENQKLIANQFNSAIGKIQDSLSSTASALGKLQDVVNQNAQALNTLVKQLSSNFGAISSVLNDILSRLDKVEAEVQIDRLITGRLQSLQTYVTQQLIRAAEIRASANLAATKMSECVLGQSKRVDFCGKGYHLMSFPQSAPHGVVFLHVTYVPAQEKNFTCAPAICHDGKAHFPREGVFVSNGTHWFVTQRNFYEPQIITTDNTFVSGNCDVVIGIVNNTVYDPLQPELDSGGGGSDIIKLLNEQVNKEMQSSNLYMSMSSWCYTHSLDGAGLFLFDHAAEEYEHAKKLIIFLNENNVPVQLTSISAPEHKFEGLTQIFQKAYEHEQHISESINNIVDHAIKSKDHATFNFLQWYVAEQHEEEVLFKDILDKIELIGNENHGLYLADQYVKGIAKSRKS

SEQ ID NO: 8992 - protein, 1315 aa, Artificial Sequence
  SARS-CoV-2/Germany/BavPat1/2020__EPI_ISL_406862 spike protein (1-1147)(I712C_T1077C) Ferritin construct
MFVFLVLLPLVSSQCVNLTTRTQLPPAYTNSFTRGVYYPDKVFRSSVLHSTQDLFLPFFSNVTWFHAIHVSGTNGTKRFDNPVLPFNDGVYFASTEKSNIIRGWIFGTTLDSKTQSLLIVNNATNVVIKVCEFQFCNDPFLGVYYHKNNKSWMESEFRVYSSANNCTFEYVSQPFLMDLEGKQGNFKNLREFVFKNIDGYFKIYSKHTPINLVRDLPQGFSALEPLVDLPIGINITRFQTLLALHRSYLTPGDSSSGWTAGAAAYYVGYLQPRTFLLKYNENGTITDAVDCALDPLSETKCTLKSFTVEKGIYQTSNFRVQPTESIVRFPNITNLCPFGEVFNATRFASVYAWNRKRISNCVADYSVLYNSASFSTFKCYGVSPTKLNDLCFTNVYADSFVIRGDEVRQIAPGQTGKIADYNYKLPDDFTGCVIAWNSNNLDSKVGGNYNYLYRLFRKSNLKPFERDISTEIYQAGSTPCNGVEGFNCYFPLQSYGFQPTNGVGYQPYRVVVLSFELLHAPATVCGPKKSTNLVKNKCVNFNFNGLTGTGVLTESNKKFLPFQQFGRDIADTTDAVRDPQTLEILDITPCSFGGVSVITPGTNTSNQVAVLYQGVNCTEVPVAIHADQLTPTWRVYSTGSNVFQTRAGCLIGAEHVNNSYECDIPIGAGICASYQTQTNSPRRARSVASQSIIAYTMSLGAENSVAYSNNSCAIPTNFTISVTTEILPVSMTKTSVDCTMYICGDSTECSNLLLQYGSFCTQLNRALTGIAVEQDKNTQEVFAQVKQIYKTPPIKDFGGFNFSQILPDPSKPSKRSFIEDLLFNKVTLADAGFIKQYGDCLGDIAARDLICAQKFNGLTVLPPLLTDEMIAQYTSALLAGTITSGWTFGAGAALQIPFAMQMAYRFNGIGVTQNVLYENQKLIANQFNSAIGKIQDSLSSTASALGKLQDVVNQNAQALNTLVKQLSSNFGAISSVLNDILSRLDKVEAEVQIDRLITGRLQSLQTYVTQQLIRAAEIRASANLAATKMSECVLGQSKRVDFCGKGYHLMSFPQSAPHGVVFLHVTYVPAQEKNFTCAPAICHDGKAHFPREGVFVSNGTHWFVTQRNFYEPQIITTDNTFVSGNCDVVIGIVNNTVYDPLQPELDSGGGGSDIIKLLNEQVNKEMQSSNLYMSMSSWCYTHSLDGAGLFLFDHAAEEYEHAKKLIIFLNENNVPVQLTSISAPEHKFEGLTQIFQKAYEHEQHISESINNIVDHAIKSKDHATFNFLQWYVAEQHEEEVLFKDILDKIELIGNENHGLYLADQYVKGIAKSRKS

SEQ ID NO: 8993 - protein, 1315 aa, Artificial Sequence
  SARS-CoV-2/Wuhan/HBCDC-HB-02/2020__EPI_ISL_412978 spike protein (1-1147)(I712C_T1077C) Ferritin construct
MFVFLVLLPLVSSQCVNLTTRTQLPPAYTNSFTRGVYYPDKVFRSSVLHSTQDLFLPFFSNVTWFHAIHVSGTNGTKRFDNPVLPFNDGVYFASTEKSNIIRGWIFGTTLDSKTQSLLIVNNATNVVIKVCEFQFCNDPFLGVYYHKNNKSWMESEFRVYSSANNCTFEYVSQPFLMDLEGKQGNFKNLREFVFKNIDGYFKIYSKHTPINLVRDLPQGFSALEPLVDLPIGINITRFQTLLALHRSYLTPGDSSSGWTAGAAAYYVGYLQPRTFLLKYNENGTITDAVDCALDPLSETKCTLKSFTVEKGIYQTSNFRVQPTESIVRFPNITNLCPFGEVFNATRFASVYAWNRKRISNCVADYSVLYNSASFSTFKCYGVSPTKLNDLCFTNVYADSFVIRGDEVRQIAPGQTGKIADYNYKLPDDFTGCVIAWNSNNLDSKVGGNYNYLYRLFRKSNLKPFERDISTEIYQAGSTPCNGVEGFNCYFPLQSYGFQPTNGVGYQPYRVVVLSFELLHAPATVCGPKKSTNLVKNKCVNFNFNGLTGTGVLTESNKKFLPFQQFGRDIADTTDAVRDPQTLEILDITPCSFGGVSVITPGTNTSNQVAVLYQDVNCTEVPVAIHADQLTPTWRVYSTGSNVFQTRAGCLIGAEHVNNSYECDIPIGAGICASYQTQTNSPRRARSVASQSIIAYTMSLGAENSVAYSNNSCAIPTNFTISVTTEILPVSMTKTSVDCTMYICGDSTECSNFLLQYGSFCTQLNRALTGIAVEQDKNTQEVFAQVKQIYKTPPIKDFGGFNFSQILPDPSKPSKRSFIEDLLFNKVTLADAGFIKQYGDCLGDIAARDLICAQKFNGLTVLPPLLTDEMIAQYTSALLAGTITSGWTFGAGAALQIPFAMQMAYRFNGIGVTQNVLYENQKLIANQFNSAIGKIQDSLSSTASALGKLQDVVNQNAQALNTLVKQLSSNFGAISSVLNDILSRLDKVEAEVQIDRLITGRLQSLQTYVTQQLIRAAEIRASANLAATKMSECVLGQSKRVDFCGKGYHLMSFPQSAPHGVVFLHVTYVPAQEKNFTCAPAICHDGKAHFPREGVFVSNGTHWFVTQRNFYEPQIITTDNTFVSGNCDVVIGIVNNTVYDPLQPELDSGGGGSDIIKLLNEQVNKEMQSSNLYMSMSSWCYTHSLDGAGLFLFDHAAEEYEHAKKLIIFLNENNVPVQLTSISAPEHKFEGLTQIFQKAYEHEQHISESINNIVDHAIKSKDHATFNFLQWYVAEQHEEEVLFKDILDKIELIGNENHGLYLADQYVKGIAKSRKS

SEQ ID NO: 8994 - protein, 1315 aa, Artificial Sequence
  SARS-CoV-2/Australia/QLD02/2020__EPI_ISL_407896 spike protein (1-1147)(I712C_T1077C) Ferritin construct
MFVFLVLLPLVSSQCVNLTTRTQLPPAYTNSFTRGVYYPDKVFRSSVLHSTQDLFLPFFSNVTWFHAIHVSGTNGTKRFDNPVLPFNDGVYFASTEKSNIIRGWIFGTTLDSKTQSLLIVNNATNVVIKVCEFQFCNDPFLGVYYHKNNKSWMESEFRVYSSANNCTFEYVSQPFLMDLEGKQGNFKNLREFVFKNIDGYFKIYSKHTPINLVRDLPQGFSALEPLVDLPIGINITRFQTLLALHRSYLTPGDSSSGWTAGAAAYYVGYLQPRTFLLKYNENGTITDAVDCALDPLSETKCTLKSFTVEKGIYQTSNFRVQPTESIVRFPNITNLCPFGEVFNATRFASVYAWNRKRISNCVADYSVLYNSASFSTFKCYGVSPTKLNDLCFTNVYADSFVIRGDEVRQIAPGQTGKIADYNYKLPDDFTGCVIAWNSNNLDSKVGGNYNYLYRLFRKSNLKPFERDISTEIYQAGSTPCNGVEGFNCYFPLQSYGFQPTNGVGYQPYRVVVLSFELLHAPATVCGPKKSTNLVKNKCVNFNFNGLTGTGVLTESNKKFLPFQQFGRDIADTTDAVRDPQTLEILDITPCSFGGVSVITPGTNTSNQVAVLYQDVNCTEVPVAIHADQLTPTWRVYSTGSNVFQTRAGCLIGAEHVNNSYECDIPIGAGICASYQTQTNSPRRARSVASQSIIAYTMSLGAENSVAYSNNSCAIPTNFTISVTTEILPVSMTKTSVDCTMYICGDSTECSNLLLQYGSFCTQLNRALTGIAVEQDKNTQEVFAQVKQIYKTPPIKDFGGFNFSQILPDPSKPSKRSFIEDLLFNKVTLADAGFIKQYGDCLGDIAARDLICAQKFNGLTVLPPLLTDEMIAQYTSALLAGTITSGWTFGAGAALQIPFAMQMAYRFNGIGVTQNVLYENQKLIANQFNSAIGKIQDSLSSTASALGKLQDVVNQNAQALNTLVKQLSSNFGAISSVLNDILSRLDKVEAEVQIDRLITGRLQSLQTYVTQQLIRAAEIRASANLAATKMSECVLGQSKRVDFCGKGYHLMSFPQSAPHGVVFLHVTYVPAQEKNFTCAPAICHDGKAHFPREGVFVSNGTHWFVTQRNFYEPQIITTDNTFVSGNCDVVIGIVNNTVYDPLQLELDSGGGGSDIIKLLNEQVNKEMQSSNLYMSMSSWCYTHSLDGAGLFLFDHAAEEYEHAKKLIIFLNENNVPVQLTSISAPEHKFEGLTQIFQKAYEHEQHISESINNIVDHAIKSKDHATFNFLQWYVAEQHEEEVLFKDILDKIELIGNENHGLYLADQYVKGIAKSRKS

SEQ ID NO: 8995 - protein, 1315 aa, Artificial Sequence
  SARS-CoV-2/India/1-31/2020__EPI_ISL_413523 spike protein (1-1147)(I712C_T1077C) Ferritin construct
MFVFLVLLPLVSSQCVNLTTRTQLPPAYTNSFTRGVYYPDKVFRSSVLHSTQDLFLPFFSNVTWFHAIHVSGTNGTKRFDNPVLPFNDGVYFASTEKSNIIRGWIFGTTLDSKTQSLLIVNNATNVVIKVCEFQFCNDPFLGVYYHKNNKSWMESEFRVYSSANNCTFEYVSQPFLMDLEGKQGNFKNLREFVFKNIDGYFKIYSKHTPINLVRDLPQGFSALEPLVDLPIGINITRFQTLLALHRSYLTPGDSSSGWTAGAAAYYVGYLQPRTFLLKYNENGTITDAVDCALDPLSETKCTLKSFTVEKGIYQTSNFRVQPTESIVRFPNITNLCPFGEVFNATRFASVYAWNRKRISNCVADYSVLYNSASFSTFKCYGVSPTKLNDLCFTNVYADSFVIRGDEVRQIAPGQTGKIADYNYKLPDDFTGCVIAWNSNNLDSKVGGNYNYLYRLFRKSNLKPFERDISTEIYQAGSTPCNGVEGFNCYFPLQSYGFQPTNGVGYQPYRVVVLSFELLHAPATVCGPKKSTNLVKNKCVNFNFNGLTGTGVLTESNKKFLPFQQFGRDIADTTDAVRDPQTLEILDITPCSFGGVSVITPGTNTSNQVAVLYQDVNCTEVPVAIHADQLTPTWRVYSTGSNVFQTRAGCLIGAEHVNNSYECDIPIGAGICASYQTQTNSPRRARSVASQSIIAYTMSLGAENSVAYSNNSCAIPTNFTISVTTEILPVSMTKTSVDCTMYICGDSTECSNLLLQYGSFCTQLNRALTGIAVEQDKNTQEVFAQVKQIYKTPPIKDFGGFNFSQILPDPSKPSKRSFIEDLLFNKVTLADAGFIKQYGDCLGDIAARDLICAQKFNGLTVLPPLLTDEMIAQYTSALLAGTITSGWTFGAGAALQIPFAMQMAYRFNGIGVTQNVLYENQKLIANQFNSVIGKIQDSLSSTASALGKLQDVVNQNAQALNTLVKQLSSNFGAISSVLNDILSRLDKVEAEVQIDRLITGRLQSLQTYVTQQLIRAAEIRASANLAATKMSECVLGQSKRVDFCGKGYHLMSFPQSAPHGVVFLHVTYVPAQEKNFTCAPAICHDGKAHFPREGVFVSNGTHWFVTQRNFYEPQIITTDNTFVSGNCDVVIGIVNNTVYDPLQPELDSGGGGSDIIKLLNEQVNKEMQSSNLYMSMSSWCYTHSLDGAGLFLFDHAAEEYEHAKKLIIFLNENNVPVQLTSISAPEHKFEGLTQIFQKAYEHEQHISESINNIVDHAIKSKDHATFNFLQWYVAEQHEEEVLFKDILDKIELIGNENHGLYLADQYVKGIAKSRKS

SEQ ID NO: 8996 - protein, 1315 aa, Artificial Sequence
  SARS-CoV-2/Guangdong/GD2020087-P0008/2020__EPI_ISL_413863 spike protein (1-1147)(I712C_T1077C) Ferritin construct
MFVFLVLLPLVSSQCVNLTTRTQLPPAYTNSFTRGVYYPDKVFRSSVLHSTQDLFLPFFSNVTWFHAIHVSGTNGTKRFDNPVLPFNDGVYFASTEKSNIIRGWIFGTTLDSKTQSLLIVNNATNVVIKVCEFQFCNDPFLGVYYHKNNKSWMESEFRVYSSANNCTFEYVSQPFLMDLEGKQGNFKNLREFVFKNIDGYFKIYSKHTPINLVRDLPQGFSALEPLVDLPIGINITRFQTLLALHRSYLTPGDSSSGWTAGAAAYYVGYLQPRTFLLKYNENGTITDAVDCALDPLSETKCTLKSFTVEKGIYQTSNFRVQPTESIVRFPNITNLCPFGEVFNATRFASVYAWNRKRISNCVADYSVLYNSASFSTFKCYGVSPTKLNDLCFTNVYADSFVIRGDEVREIAPGQTGKIADYNYKLPDDFTGCVIAWNSNNLDSKVGGNYNYLYRLFRKSNLKPFERDISTEIYQAGSTPCNGVEGFNCYFPLQSYGFQPTNGVGYQPYRVVVLSFELLHAPATVCGPKKSTNLVKNKCVNFNFNGLTGTGVLTESNKKFLPFQQFGRDIADTTDAVRDPQTLEILDITPCSFGGVSVITPGTNTSNQVAVLYQDVNCTEVPVAIHADQLTPTWRVYSTGSNVFQTRAGCLIGAEHVNNSYECDIPIGAGICASYQTQTNSPRRARSVASQSIIAYTMSLGAENSVAYSNNSCAIPTNFTISVTTEILPVSMTKTSVDCTMYICGDSTECSNLLLQYGSFCTQLNRALTGIAVEQDKNTQEVFAQVKQIYKTPPIKDFGGFNFSQILPDPSKPSKRSFIEDLLFNKVTLADAGFIKQYGDCLGDIAARDLICAQKFNGLTVLPPLLTDEMIAQYTSALLAGTITSGWTFGAGAALQIPFAMQMAYRFNGIGVTQNVLYENQKLIANQFNSAIGKIQDSLSSTASALGKLQDVVNQNAQALNTLVKQLSSNFGAISSVLNDILSRLDKVEAEVQIDRLITGRLQSLQTYVTQQLIRAAEIRASANLAATKMSECVLGQSKRVDFCGKGYHLMSFPQSAPHGVVFLHVTYVPAQEKNFTCAPAICHDGKAHFPREGVFVSNGTHWFVTQRNFYEPQIITTDNTFVSGNCDVVIGIVNNTVYDPLQPELDSGGGGSDIIKLLNEQVNKEMQSSNLYMSMSSWCYTHSLDGAGLFLFDHAAEEYEHAKKLIIFLNENNVPVQLTSISAPEHKFEGLTQIFQKAYEHEQHISESINNIVDHAIKSKDHATFNFLQWYVAEQHEEEVLFKDILDKIELIGNENHGLYLADQYVKGIAKSRKS

SEQ ID NO: 8997 - protein, 1315 aa, Artificial Sequence
  SARS-CoV-2/Sweden/01/2020__EPI_ISL_411951 spike protein (1-1147)(I712C_T1077C) Ferritin construct
MFVFLVLLPLVSSQCVNLTTRTQLPPAYTNSFTRGVYYPDKVFRSSVLHSTQDLFLPFFSNVTWFHAIHVSGTNGTKRFDNPVLPFNDGVYFASTEKSNIIRGWIFGTTLDSKTQSLLIVNNATNVVIKVCEFQFCNDPFLGVYYHKNNKSWMESEFRVYSSANNCTFEYVSQPFLMDLEGKQGNFKNLREFVFKNIDGYFKIYSKHTPINLVRDLPQGFSALEPLVDLPIGINITRFQTLLALHRSYLTPGDSSSGWTAGAAAYYVGYLQPRTFLLKYNENGTITDAVDCALDPLSETKCTLKSFTVEKGIYQTSNFRVQPTESIVRFPNITNLCPFGEVFNATRFASVYAWNRKRISNCVADYSVLYNSASFSTFKCYGVSPTKLNDLCFTNVYADSFVIRGDEVRQIAPGQTGKIADYNYKLPDDFTGCVIAWNSNNLDSKVGGNYNYLYRLFRKSNLKPFERDISTEIYQAGSTPCNGVEGFNCYFPLQSYGFQPTNGVGYQPYRVVVLSFELLHAPATVCGPKKSTNLVKNKCVNFNFNGLTGTGVLTESNKKFLPFQQFGRDIADTTDAVRDPQTLEILDITPCSFGGVSVITPGTNTSNQVAVLYQDVNCTEVPVAIHADQLTPTWRVYSTGSNVFQTRAGCLIGAEHVNNSYECDIPIGAGICASYQTQTNSPRRARSVASQSIIAYTMSLGAENSVAYSNNSCAIPTNFTISVTTEILPVSMTKTSVDCTMYICGDSTECSNLLLQYGSFCTQLNRALTGIAVEQDKNTQEVFAQVKQIYKTPPIKDCGGFNFSQILPDPSKPSKRSFIEDLLFNKVTLADAGFIKQYGDCLGDIAARDLICAQKFNGLTVLPPLLTDEMIAQYTSALLAGTITSGWTFGAGAALQIPFAMQMAYRFNGIGVTQNVLYENQKLIANQFNSAIGKIQDSLSSTASALGKLQDVVNQNAQALNTLVKQLSSNFGAISSVLNDILSRLDKVEAEVQIDRLITGRLQSLQTYVTQQLIRAAEIRASANLAATKMSECVLGQSKRVDFCGKGYHLMSFPQSAPHGVVFLHVTYVPAQEKNFTCAPAICHDGKAHFPREGVFVSNGTHWFVTQRNFYEPQIITTDNTFVSGNCDVVIGIVNNTVYDPLQPELDSGGGGSDIIKLLNEQVNKEMQSSNLYMSMSSWCYTHSLDGAGLFLFDHAAEEYEHAKKLIIFLNENNVPVQLTSISAPEHKFEGLTQIFQKAYEHEQHISESINNIVDHAIKSKDHATFNFLQWYVAEQHEEEVLFKDILDKIELIGNENHGLYLADQYVKGIAKSRKS

SEQ ID NO: 8998 - protein, 1315 aa, Artificial Sequence
  SARS-CoV-2/Tianmen/HBCDC-HB-07/2020__EPI_ISL_412983 spike protein (1-1147)(I712C_T1077C) Ferritin construct
MFVFLVLLPLVSSQCVNLTTRTQLPPAYTNSFTRGVYYPDKVFRSSVLHSTQDLFLPFFSNVTWFHAIHVSGTNGTKRFDNPVLPFNDGVYFASTEKSNIIRGWIFGTTLDSKTQSLLIVNNATNVVIKVCEFQFCNDPFLGVYYHKNNKSWMESEFRVYSSANNCTFEYVSQPFLMDLEGKQGNFKNLREFVFKNIDGYFKIYSKHTPINLVRDLPQGFSALEPLVDLPIGINITRFQTLLALHRSYLTPGDSSSGWTAGAAAYYVGYLQPRTFLLKYNENGTITDAVDCALDPLSETKCTLKSFTVEKGIYQTSNFRVQPTESIVRFPNITNLCPFGEVFNATRFASVYAWNRKRISNCVADYSVLYNSASFSTFKCYGVSPTKLNDLCFTNVYADSFVIRGDEVRQIAPGQTGKIADYNYKLPDDFTGCVIAWNSNNLDSKVGGNYNYLYRLFRKSNLKPFERDISTEIYQAGSTPCNGVEGFNCYFPLQSYGFQPTNGVGYQPYRVVVLSFELLHAPATVCGPKKSTNLVKNKCVNFNFNGLTGTGVLTESNKKFLPFQQFGRDIADTTDAVRDPQTLEILDITPCSFGGVSVITPGTNTSNQVAVLYQDLNCTEVPVAIHADQLTPTWRVYSTGSNVFQTRAGCLIGAEHVNNSYECDIPIGAGICASYQTQTNSPRRARSVASQSIIAYTMSLGAENSVAYSNNSCAIPTNFTISVTTEILPVSMTKTSVDCTMYICGDSTECSNLLLQYGSFCTQLNRALTGIAVEQDKNTQEVFAQVKQIYKTPPIKDFGGFNFSQILPDPSKPSKRSFIEDLLFNKVTLADAGFIKQYGDCLGDIAARDLICAQKFNGLTVLPPLLTDEMIAQYTSALLAGTITSGWTFGAGAALQIPFAMQMAYRFNGIGVTQNVLYENQKLIANQFNSAIGKIQDSLSSTASALGKLQDVVNQNAQALNTLVKQLSSNFGAISSVLNDILSRLDKVEAEVQIDRLITGRLQSLQTYVTQQLIRAAEIRASANLAATKMSECVLGQSKRVDFCGKGYHLMSFPQSAPHGVVFLHVTYVPAQEKNFTCAPAICHDGKAHFPREGVFVSNGTHWFVTQRNFYEPQIITTDNTFVSGNCDVVIGIVNNTVYDPLQPELDSGGGGSDIIKLLNEQVNKEMQSSNLYMSMSSWCYTHSLDGAGLFLFDHAAEEYEHAKKLIIFLNENNVPVQLTSISAPEHKFEGLTQIFQKAYEHEQHISESINNIVDHAIKSKDHATFNFLQWYVAEQHEEEVLFKDILDKIELIGNENHGLYLADQYVKGIAKSRKS

SEQ ID NO: 8999 - protein, 1315 aa, Artificial Sequence
  SARS-CoV-2/Hong Kong/case42_VM20002493/2020__EPI_ISL_414527 spike protein (1-1147)(I712C_T1077C) Ferritin construct
MFVFLVLLPLVSSQCVNLTTRTQLPPAYTNSFTRGVYYPDKVFRSSVLHSTQDLFLPFFSNVTWFHAIHVSGTNGTKRFDNPVLPFNDGVYFASTEKSNIIRGWIFGTTLDSKTQSLLIVNNATNVVIKVCEFQFCNDPFLGVYYHKNNKSWMESEFRVYSSANNCTFEYVSQPFLMDLEGKQGNFKNLREFVFKNIDGYFKIYSKHTPINLVRDLPQGFSALEPLVDLPIGINITRFQTLLALHRSYLTPGDSSSGWTAGAAAYYVGYLQPRTFLLKYNENGTITDAVDCALDPLSETKCTLKSFTVEKGIYQTSNFRVQPTESIVRFPNITNLCPFGEVFNATRFASVYAWNRKRISNCVADYSVLYNSASFSTFKCYGVSPTKLNDLCFTNVYADSFVIRGDEVRQIAPGQTGKIADYNYKLPDDFTGCVIAWNSNNLDSKVGGNYNYLYRLFRKSNLKPFERDISTEIYQAGSTPCNGVEGFNCYFPLQSYGFQPTNGVGYQPYRVVVLSFELLHAPATVCGPKKSTNLVKNKCVNFNFNGLTGTGVLTESNKKFLPFQQFGRDIADTTDAVRDPQTLEILDITPCSFGGVSVITPGTNTSNQVAVLYQDVNCTEVPVAIHADQLTPTWRVYSTGSNVFQTRAGCLIGAEHVNNSYECDIPIGAGICASYQTQTNSPRRARSVASQSIIAYTMSLGAENSVAYSNNSCAIPTNFAISVTTEILPVSMTKTSVDCTMYICGDSTECSNLLLQYGSFCTQLNRALTGIAVEQDKNTQEVFAQVKQIYKTPPIKDFGGFNFSQILPDPSKPSKRSFIEDLLFNKVTLADAGFIKQYGDCLGDIAARDLICAQKFNGLTVLPPLLTDEMIAQYTSALLAGTITSGWTFGAGAALQIPFAMQMAYRFNGIGVTQNVLYENQKLIANQFNSAIGKIQDSLSSTASALGKLQDVVNQNAQALNTLVKQLSSNFGAISSVLNDILSRLDKVEAEVQIDRLITGRLQSLQTYVTQQLIRAAEIRASANLAATKMSECVLGQSKRVDFCGKGYHLMSFPQSAPHGVVFLHVTYVPAQEKNFTCAPAICHDGKAHFPREGVFVSNGTHWFVTQRNFYEPQIITTDNTFVSGNCDVVIGIVNNTVYDPLQPELDSGGGGSDIIKLLNEQVNKEMQSSNLYMSMSSWCYTHSLDGAGLFLFDHAAEEYEHAKKLIIFLNENNVPVQLTSISAPEHKFEGLTQIFQKAYEHEQHISESINNIVDHAIKSKDHATFNFLQWYVAEQHEEEVLFKDILDKIELIGNENHGLYLADQYVKGIAKSRKS

SEQ ID NO: 9000 - protein, 1315 aa, Artificial Sequence
  SARS-CoV-2/USA/CruiseA-23/2020__EPI_ISL_414482 spike protein (1-1147)(I712C_T1077C) Ferritin construct
MFVFLVLLPLVSSQCVNLTTRTQLPPAYTNSFTRGVYYPDKVFRSSVLHSTQDLFLPFFSNVTWFHAIHVSGTNGTKRFDNPVLPFNDGVYFASTEKSNIIRGWIFGTTLDSKTQSLLIVNNATNVVIKVCEFQFCNDPFLGVYYHKNNKSWMESEFRVYSSANNCTFEYVSQPFLMDLEVKQGNFKNLREFVFKNIDGYFKIYSKHTPINLVRDLPQGFSALEPLVDLPIGINITRFQTLLALHRSYLTPGDSSSGWTAGAAAYYVGYLQPRTFLLKYNENGTITDAVDCALDPLSETKCTLKSFTVEKGIYQTSNFRVQPTESIVRFPNITNLCPFGEVFNATRFASVYAWNRKRISNCVADYSVLYNSASFSTFKCYGVSPTKLNDLCFTNVYADSFVIRGDEVRQIAPGQTGKIADYNYKLPDDFTGCVIAWNSNNLDSKVGGNYNYLYRLFRKSNLKPFERDISTEIYQAGSTPCNGVEGFNCYFPLQSYGFQPTNGVGYQPYRVVVLSFELLHAPATVCGPKKSTNLVKNKCVNFNFNGLTGTGVLTESNKKFLPFQQFGRDIADTTDAVRDPQTLEILDITPCSFGGVSVITPGTNTSNQVAVLYQDVNCTEVPVAIHADQLTPTWRVYSTGSNVFQTRAGCLIGAEHVNNSYECDIPIGAGICASYQTQTNSPRRARSVASQSIIAYTMSLGAENSVAYSNNSCAIPTNFTISVTTEILPVSMTKTSVDCTMYICGDSTECSNLLLQYGSFCTQLNRALTGIAVEQDKNTQEVFAQVKQIYKTPPIKDFGGFNFSQILPDPSKPSKRSFIEDLLFNKVTLADAGFIKQYGDCLGDIAARDLICAQKFNGLTVLPPLLTDEMIAQYTSALLAGTITSGWTFGAGAALQIPFAMQMAYRFNGIGVTQNVLYENQKLIANQFNSAIGKIQDSLSSTASALGKLQDVVNQNAQALNTLVKQLSSNFGAISSVLNDILSRLDKVEAEVQIDRLITGRLQSLQTYVTQQLIRAAEIRASANLAATKMSECVLGQSKRVDFCGKGYHLMSFPQSAPHGVVFLHVTYVPAQEKNFTCAPAICHDGKAHFPREGVFVSNGTHWFVTQRNFYEPQIITTDNTFVSGNCDVVIGIVNNTVYDPLQPELDSGGGGSDIIKLLNEQVNKEMQSSNLYMSMSSWCYTHSLDGAGLFLFDHAAEEYEHAKKLIIFLNENNVPVQLTSISAPEHKFEGLTQIFQKAYEHEQHISESINNIVDHAIKSKDHATFNFLQWYVAEQHEEEVLFKDILDKIELIGNENHGLYLADQYVKGIAKSRKS

SEQ ID NO: 9001 - protein, 1315 aa, Artificial Sequence
  SARS-CoV-2/Hong Kong/case85_VM20002868/2020__EPI_ISL_414519 spike protein (1-1147)(I712C_T1077C) Ferritin construct
MFVFLVLVPLVSSQCVNLTTRTQLPPAYTNSFTRGVYYPDKVFRSSVLHSTQDLFLPFFSNVTWFHAIHVSGTNGTKRFDNPVLPFNDGVYFASTEKSNIIRGWIFGTTLDSKTQSLLIVNNATNVVIKVCEFQFCNDPFLGVYYHKNNKSWMESEFRVYSSANNCTFEYVSQPFLMDLEGKQGNFKNLREFVFKNIDGYFKIYSKHTPINLVRDLPQGFSALEPLVDLPIGINITRFQTLLALHRSYLTPGDSSSGWTAGAAAYYVGYLQPRTFLLKYNENGTITDAVDCALDPLSETKCTLKSFTVEKGIYQTSNFRVQPTESIVRFPNITNLCPFGEVFNATRFASVYAWNRKRISNCVADYSVLYNSASFSTFKCYGVSPTKLNDLCFTNVYADSFVIRGDEVRQIAPGQTGKIADYNYKLPDDFTGCVIAWNSNNLDSKVGGNYNYLYRLFRKSNLKPFERDISTEIYQAGSTPCNGVEGFNCYFPLQSYGFQPTNGVGYQPYRVVVLSFELLHAPATVCGPKKSTNLVKNKCVNFNFNGLTGTGVLTESNKKFLPFQQFGRDIADTTDAVRDPQTLEILDITPCSFGGVSVITPGTNTSNQVAVLYQDVNCTEVPVAIHADQLTPTWRVYSTGSNVFQTRAGCLIGAEHVNNSYECDIPIGAGICASYQTQTNSPRRARSVASQSIIAYTMSLGAENSVAYSNNSCAIPTNFTISVTTEILPVSMTKTSVDCTMYICGDSTECSNLLLQYGSFCTQLNRALTGIAVEQDKNTQEVFAQVKQIYKTPPIKDFGGFNFSQILPDPSKPSKRSFIEDLLFNKVTLADAGFIKQYGDCLGDIAARDLICAQKFNGLTVLPPLLTDEMIAQYTSALLAGTITSGWTFGAGAALQIPFAMQMAYRFNGIGVTQNVLYENQKLIANQFNSAIGKIQDSLSSTASALGKLQDVVNQNAQALNTLVKQLSSNFGAISSVLNDILSRLDKVEAEVQIDRLITGRLQSLQTYVTQQLIRAAEIRASANLAATKMSECVLGQSKRVDFCGKGYHLMSFPQSAPHGVVFLHVTYVPAQEKNFTCAPAICHDGKAHFPREGVFVSNGTHWFVTQRNFYEPQIITTDNTFVSGNCDVVIGIVNNTVYDPLQPELDSGGGGSDIIKLLNEQVNKEMQSSNLYMSMSSWCYTHSLDGAGLFLFDHAAEEYEHAKKLIIFLNENNVPVQLTSISAPEHKFEGLTQIFQKAYEHEQHISESINNIVDHAIKSKDHATFNFLQWYVAEQHEEEVLFKDILDKIELIGNENHGLYLADQYVKGIAKSRKS

SEQ ID NO: 9002 - protein, 1315 aa, Artificial Sequence; identical to SEQ ID NO: 8992
  SARS-CoV-2/England/200990660/2020__EPI_ISL_414523 spike protein (1-1147)(I712C_T1077C) Ferritin construct

SEQ ID NO: 9003 - protein, 1315 aa, Artificial Sequence
  SARS-CoV-2/Australia/NSW09/2020__EPI_ISL_413595 spike protein (1-1147)(I712C_T1077C) Ferritin construct
MFVFLVLLPLVSSQCVNLTTRTQLPPAYTNSFTRGVYYPDKVFRSSVLHSTQDLFLPFFSNVTWFHAIHVSGTNGTKRFDNPVLPFNDGVYFASTEKSNIIRGWIFGTTLDSKTQSLLIVNNATNVVIKVCEFQFCNDPFLGVYYHKNNKSWMESEFRVYSSANNCTFEYVSQPFLMDLEGKQGNFKNLREFVFKNIDGYFKIYSKHTPINLVRDLPQGFSALEPLVDLPIGINITRFQTLLALHRSYLTPGDSSSGWTAGAAAYYVGYLQPRTFLLKYNENGTITDAVDCALDPLSETKCTLKSFTVEKGIYQTSNFRVQPTESIVRFPNITNLCPFGEVFNATRFASVYAWNRKRISNCVADYSVLYNSASFSTFKCYGVSPTKLNDLCFTNVYADSFVIRGDEVRQIAPGQTGKIADYNYKLPDDFTGCVIAWNSNNLDSKVGGNYNYLYRLFRKSNLKPFERDISTEIYQAGSTPCNGVEGFNCYFPLQSYGFQPTNGVGYQPYRVVVLSFELLHAPATVCGPKKSTNLVKNKCVNFNFNGLTGTGVLTESNKKFLPFQQFGRDIADTTDAVRDPQTLEILDITPCSFGGVSVITPGTNTSNQVAVLYQDVNCTEVPVAIHADQLTPTWRVYSTGSNVFQTRAGCLIGAEHVNNSYECDIPIGAGICASYQTQTNSPRRARSVASQSIIAYTMSLGAENSVAYSNNSCAIPTNFTISVTTEILPVSMTKTSVDCTMYICGDSTECSNLLLQYGSFCTQLNRALTGIAVEQDKNTQEVFAQVKQIYKTPPIKDFGGFNFSQILPDPSKPSKRSFIEDLLFNKVTLADAGFIKQYGDCLGDIAARDLICAQKFNGLTVLPPLLTDEMIAQYTSALLAGTITSGWTFGAGAALQIPFAMQMAYRFNGIGVTQNVLYENQKLIANQFNSAIGKIQDSLSFTASALGKLQDVVNQNAQALNTLVKQLSSNFGAISSVLNDILSRLDKVEAEVQIDRLITGRLQSLQTYVTQQLIRAAEIRASANLAATKMSECVLGQSKRVDFCGKGYHLMSFPQSAPHGVVFLHVTYVPAQEKNFTCAPAICHDGKAHFPREGVFVSNGTHWFVTQRNFYEPQIITTDNTFVSGNCDVVIGIVNNTVYDPLQPELDSGGGGSDIIKLLNEQVNKEMQSSNLYMSMSSWCYTHSLDGAGLFLFDHAAEEYEHAKKLIIFLNENNVPVQLTSISAPEHKFEGLTQIFQKAYEHEQHISESINNIVDHAIKSKDHATFNFLQWYVAEQHEEEVLFKDILDKIELIGNENHGLYLADQYVKGIAKSRKS

SEQ ID NO: 9004 - protein, 1315 aa, Artificial Sequence; identical to SEQ ID NO: 8984
  SARS-CoV-2/Australia/NSW10/2020__EPI_ISL_413596 spike protein (1-1147)(I712C_T1077C) Ferritin construct

SEQ ID NO: 9005 - protein, 1315 aa, Artificial Sequence
  SARS-CoV-2/Switzerland/1000477797/2020__EPI_ISL_413023 spike protein (1-1147)(I712C_T1077C) Ferritin construct
MFVFLVLLPLVSSQCVNLTTRTQLPPAYTNSFTRGVYYPDKVFRSSVLHSTQDLFLPFFSNVTWFHAIHVSGTNGTKRFDNPVLPFNDGVYFASTEKSNIIRGWIFGTTLDSKTQSLLIVNNATNVVIKVCEFQFCNDPFLGVYYHKNNKSWMESEFRVYSSANNCTFEYVSQPFLMDLEGKQGNFKNLREFVFKNIDGYFNIYSKHTPINLVRDLPQGFSALEPLVDLPIGINITRFQTLLALHRSYLTPGDSSSGWTAGAAAYYVGYLQPRTFLLKYNENGTITDAVDCALDPLSETKCTLKSFTVEKGIYQTSNFRVQPTESIVRFPNITNLCPFGEVFNATRFASVYAWNRKRISNCVADYSVLYNSASFSTFKCYGVSPTKLNDLCFTNVYADSFVIRGDEVRQIAPGQTGKIADYNYKLPDDFTGCVIAWNSNNLDSKVGGNYNYLYRLFRKSNLKPFERDISTEIYQAGSTPCNGVEGFNCYFPLQSYGFQPTNGVGYQPYRVVVLSFELLHAPATVCGPKKSTNLVKNKCVNFNFNGLTGTGVLTESNKKFLPFQQFGRDIADTTDAVRDPQTLEILDITPCSFGGVSVITPGTNTSNQVAVLYQGVNCTEVPVAIHADQLTPTWRVYSTGSNVFQTRAGCLIGAEHVNNSYECDIPIGAGICASYQTQTNSPRRARSVASQSIIAYTMSLGAENSVAYSNNSCAIPTNFTISVTTEILPVSMTKTSVDCTMYICGDSTECSNLLLQYGSFCTQLNRALTGIAVEQDKNTQEVFAQVKQIYKTPPIKDFGGFNFSQILPDPSKPSKRSFIEDLLFNKVTLADAGFIKQYGDCLGDIAARDLICAQKFNGLTVLPPLLTDEMIAQYTSALLAGTITSGWTFGAGAALQIPFAMQMAYRFNGIGVTQNVLYENQKLIANQFNSAIGKIQDSLSSTASALGKLQDVVNQNAQALNTLVKQLSSNFGAISSVLNDILSRLDKVEAEVQIDRLITGRLQSLQTYVTQQLIRAAEIRASANLAATKMSECVLGQSKRVDFCGKGYHLMSFPQSAPHGVVFLHVTYVPAQEKNFTCAPAICHDGKAHFPREGVFVSNGTHWFVTQRNFYEPQIITTDNTFVSGNCDVVIGIVNNTVYDPLQPELDSGGGGSDIIKLLNEQVNKEMQSSNLYMSMSSWCYTHSLDGAGLFLFDHAAEEYEHAKKLIIFLNENNVPVQLTSISAPEHKFEGLTQIFQKAYEHEQHISESINNIVDHAIKSKDHATFNFLQWYVAEQHEEEVLFKDILDKIELIGNENHGLYLADQYVKGIAKSRKS

SEQ ID NO: 9006 - protein, 1315 aa, Artificial Sequence
  SARS-CoV-2/Belgium/BA-02291/2020__EPI_ISL_415159 spike protein (1-1147)(I712C_T1077C) Ferritin construct
MFVFLVLLPLVSSQCVNLTTRTQLPPAYTNSFTRGVYYPDKVFRSSVLHSTQDLFLPFFSNVTWFHAIHVSGTNGTKRFDNPVLPFNDGVYFASTEKSNIIRGWIFGTTLDSKTQSLLIVNNATNVVIKVCEFQFCNDPFLGVYYHKNNKSWMESEFRVYSSANNCTFEYVSQPFLMDLEGKQGNFKNLREFVFKNIDGYFKIYSKHTPINLVRDLPQGFSALEPLVDLPIGINITRFQTLLALHRSYLTPGDSSSGWTAGAAAYYVGYLQPRTFLLKYNENGTITDAVDCALDPLSETKCTLKSFTVEKGIYQTSNFRVQPTESIVRFPNITNLCPFGEVFNATRFASVYAWNRKRISNCVADYSVLYNSASFSTFKCYGVSPTKLNDLCFTNVYADSFVIRGDEVRQIAPGQTGKIADYNYKLPDDFTGCVIAWNSNNLDSKVGGNYNYLYRLFRRSNLKPFERDISTEIYQAGSTPCNGVEGFNCYFPLQSYGFQPTNGVGYQPYRVVVLSFELLPAPATVCGPKKSTNLVKNKCVNFNFNGLTGTGVLTESNKKFLPFQQFGRDIADTTDAVRDPQTLEILDITPCSFGGVSVITPGTNTSNQVAVLYQGVNCTEVPVAIHADQLTPTWRVYSTGSNVFQTRAGCLIGAEHVNNSYECDIPIGAGICASYQTQTNSPRRARSVASQSIIAYTMSLGAENSVAYSNNSCAIPTNFTISVTTEILPVSMTKTSVDCTMYICGDSTECSNLLLQYGSFCTQLNRALTGIAVEQDKNTQEVFAQVKQIYKTPPIKDFGGFNFSQILPDPSKPSKRSFIEDLLFNKVTLADAGFIKQYGDCLGDIAARDLICAQKFNGLTVLPPLLTDEMIAQYTSALLAGTITSGWTFGAGAALQIPFAMQMAYRFNGIGVTQNVLYENQKLIANQFNSAIGKIQDSLSSAAPALGKLQDVVNQNAQALNTLVKQLSSNFGAISSVLNDILSRLDKVEAEVQIDRLITGRLQSLQTYVTQQLIRAAEIRASANLAATKMSECVLGQSKRVDFCGKGYHLMSFPQSAPHGVVFLHVTYVPAQEKNFTCAPAICHDGKAHFPREGVFVSNGTHWFVTQRNFYEPQIITTDNTFVSGNCDVVIGIVNNTVYDPLQPELDSGGGGSDIIKLLNEQVNKEMQSSNLYMSMSSWCYTHSLDGAGLFLFDHAAEEYEHAKKLIIFLNENNVPVQLTSISAPEHKFEGLTQIFQKAYEHEQHISESINNIVDHAIKSKDHATFNFLQWYVAEQHEEEVLFKDILDKIELIGNENHGLYLADQYVKGIAKSRKS

SEQ ID NO: 9007 - protein, 1315 aa, Artificial Sequence
  SARS-CoV-2/USA/WA8-UW5/2020__EPI_ISL_413486 spike protein (1-1147)(I712C_T1077C) Ferritin construct
MFVFLVLLPLVSSQCVNLTTRTQLPPAYTNSFTRGVYYPDKVFRSSVLHSTQDLFLPFFSNVTWFHAIHVSGTNGTKRFDNPVLPFNDGVYFASTEKSNIIRGWIFGTTLDSKTQSLLIVNNATNVVIKVCEFQFCNDPFLGVYYHKNNKSWMESEFRVYSSANNCTFEYVSQPFLMDLEGKQGNFKNLREFVFKNIDGYFKIYSKHTPINLVRDLPQGFSALEPLVDLPIGINITRFQTLLALHRSYLTPGDSSSGWTAGAAAYYVGYLQPRTFLLKYNENGTITDAVDCALDPLSETKCTLKSFTVEKGIYQTSNFRVQPTESIVRFPNITNLCPFGEVFNATRFASVYAWNRKRISNCVADYSVLYNSASFSTFKCYGVSPTKLNDLCFTNVYADSFVIRGDEVRQIAPGQTGKIADYNYKLPDDFTGCVIAWNSNNLDSKVGGNYNYLYRLFRKSNLKPFERDISTEIYQAGSTPCNGVEGFNCYFPLQSYGFQPTNGVGYQPYRVVVLSFELLHAPATVCGPKKSTNLVKNKCVNFNFNGLTGTGVLTESNKKFLPFQQFGRDIADTTDAVRDPQTLEILDITPCSFGGVSVITPGTNTSNQVAVLYQDVNCTEVPVAIHADQLTPTWRVYSTGSNVFQTRAGCLIGAEYVNNSYECDIPIGAGICASYQTQTNSPRRARSVASQSIIAYTMSLGAENSVAYSNNSCAIPTNFTISVTTEILPVSMTKTSVDCTMYICGDSTECSNLLLQYGSFCTQLNRALTGIAVEQDKNTQEVFAQVKQIYKTPPIKDFGGFNFSQILPDPSKPSKRSFIEDLLFNKVTLADAGFIKQYGDCLGDIAARDLICAQKFNGLTVLPPLLTDEMIAQYTSALLAGTITSGWTFGAGAALQIPFAMQMAYRFNGIGVTQNVLYENQKLIANQFNSAIGKIQDSLSSTASALGKLQDVVNQNAQALNTLVKQLSSNFGAISSVLNDILSRLDKVEAEVQIDRLITGRLQSLQTYVTQQLIRAAEIRASANLAATKMSECVLGQSKRVDFCGKGYHLMSFPQSAPHGVVFLHVTYVPAQEKNFTCAPAICHDGKAHFPREGVFVSNGTHWFVTQRNFYEPQIITTDNTFVSGNCDVVIGIVNNTVYDPLQPELDSGGGGSDIIKLLNEQVNKEMQSSNLYMSMSSWCYTHSLDGAGLFLFDHAAEEYEHAKKLIIFLNENNVPVQLTSISAPEHKFEGLTQIFQKAYEHEQHISESINNIVDHAIKSKDHATFNFLQWYVAEQHEEEVLFKDILDKIELIGNENHGLYLADQYVKGIAKSRKS

SEQ ID NO: 9008 - protein, 1315 aa, Artificial Sequence
  SARS-CoV-2/England/20102000506/2020__EPI_ISL_415147 spike protein (1-1147)(I712C_T1077C) Ferritin construct
MFVFLVLLPLVSSQCVNLTTRTQLPPAYTNSFTRGVYYPDKVFRSSVLHSTQDLFLPFFSNVTWFHAIHVSGTNGTKRFDNPVLPFNDGVYFASTEKSNIIRGWIFGTTLDSKTQSLLIVNNATNVVIKVCEFQFCNDPFLGVYYHKNNKSWMESEFRVYSSANNCTFEYVSQPFLMDLEGKQGNFKNLREFVFKNIDGYFKIYSKHTPINLVRDLPQGFSALEPLVDLPIGINITRFQTLLALHRSYLTPGDSSSGWTAGAAAYYVGYLQPRTFLLKYNENGTITDAVDCALDPLSETKCTLKSFTVEKGIYQTSNFRVQPTESIVRFPNITNLCPFGEVFNATRFASVYAWNRKRISNCVADYSVLYNSASFSTFKCYGVSPTKLNDLCFTNVYADSFVIRGDEVRQIAPGQTGKIADYNYKLPDDFTGCVIAWNSNNLDSKVGGNYNYLYRLFRKSNLKPFERDISTEIYQAGSTPCNGVEGFNCYFPLQSYGFQPTNGVGYQPYRVVVLSFELLHAPATVCGPKKSTNLVKNKCVNFNFNGLTGTGVLTESNKKFLPFQQFGRDIADTTDAVRDPQTLEILDITPCSFGGVSVITPGTNTSNQVAVLYQGVNCTEVPVAIHADQLTPTWRVYSTGSNVFQTRAGCLIGAEHVNNSYECDIPIGAGICASYQTQTNSPRRARSVASQSIIAYTMSLGAENSVAYSNNSCAIPTNFTISVTTEILPVSMTKTSVDCTMYICGDSTECSNLLLQYGSFCTQLNRALTGIAVEQDKNTQEVFAQVKQIYKTPPIKDFGGFNFSQILPDPSKPSKRSFIEDLLFNKVTLADAGFIKQYGYCLGDIAARDLICAQKFNGLTVLPPLLTDEMIAQYTSALLAGTITSGWTFGAGAALQIPFAMQMAYRFNGIGVTQNVLYENQKLIANQFNSAIGKIQDSLSSTASALGKLQDVVNQNAQALNTLVKQLSSNFGAISSVLNDILSRLDKVEAEVQIDRLITGRLQSLQTYVTQQLIRAAEIRASANLAATKMSECVLGQSKRVDFCGKGYHLMSFPQSAPHGVVFLHVTYVPAQEKNFTCAPAICHDGKAHFPREGVFVSNGTHWFVTQRNFYEPQIITTDNTFVSGNCDVVIGIVNNTVYDPLQPELDSGGGGSDIIKLLNEQVNKEMQSSNLYMSMSSWCYTHSLDGAGLFLFDHAAEEYEHAKKLIIFLNENNVPVQLTSISAPEHKFEGLTQIFQKAYEHEQHISESINNIVDHAIKSKDHATFNFLQWYVAEQHEEEVLFKDILDKIELIGNENHGLYLADQYVKGIAKSRKS

SEQ ID NO: 9009 - protein, 1315 aa, Artificial Sequence
  SARS-CoV-2/Belgium/VAG-03013/2020__EPI_ISL_415155 spike protein (1-1147)(I712C_T1077C) Ferritin construct
MFVFLVLLPLVSSQCVNLTTRTQLPPAYTNSFTRGVYYPDKVFRSSVLHSTQDLFLPFFSNVTWFHAIHVSGTNGTKRFDNPVLPFNDGVYFASTEKSNIIRGWIFGTTLDSKTQSLLIVNNATNVVIKVCEFQFCNDPFLGVYYHKNNKSWMESEFRVYSSANNCTFEYVSQPFLMDLEGKQGNFKNLREFVFKNIDGYFKIYSKHTPINLVRDLPQGFSALEPLVDLPIGINITRFQTLLALHRSYLTPGDSSSGWTAGAAAYYVGYLQPRTFLLKYNENGTITDAVDCALDPLSETKCTLKSFTVEKGIYQTSNFRVQPTESIVRFPNITNLCPFGEVFNATRFASVYAWNRKRISNCVADYSVLYNSASFSTFKCYGVSPTKLNDLCFTNVYADSFVIRGDEVRQIAPGQTGKIADYNYKLPDDFTGCVIAWNSNNLDSKVGGNYNYLYRLFRKSNLKPFERDISTEIYQAGSTPCNGVEGFNCYFPLQSYGFQPTNGVGYQPYRVVVLSFELLHAPATVCGPKKSTNLVKNKCVNFNFNGLTGTGVLTESNKKFLPFQQFGRDIADTTDAVRDPQTLEILDITPCSFGGVSVITPGTNTSNQVAVLYQGVNCTEVPVAIHADQLTPTWRVYSTGSNVFQTRAGCLIGAEHVNNSYECDIPIGAGICASYQTQTNSPRRARSVASQSIIAYTMSLGAENSVAYSNNSCAIPTNFTISVTTEILPVSMTKTSVDCTMYICGDSTECSNLLLQYGSFCTQLNRALTGIAVEQDKNTQEVFAQVKQIYKTPPIKDFGGFNFSQILPDPSKPSKRSFIEDLLFNKVTLADAGFIKQYGDCLGDIAARDLICAQKFNGLTVLPPLLTDEMIAQYTSALLAGTITSGWTFGAGAALQIPFAMQMAYRFNGIGVTQNVLYENQKLIANQFNSAIGKIQDSLSSTATALGKLQDVVNQNAQALNTLVKQLSSNFGAISSVLNDILSRLDKVEAEVQIDRLITGRLQSLQTYVTQQLIRAAEIRASANLAATKMSECVLGQSKRVDFCGKGYHLMSFPQSAPHGVVFLHVTYVPAQEKNFTCAPAICHDGKAHFPREGVFVSNGTHWFVTQRNFYEPQIITTDNTFVSGNCDVVIGIVNNTVYDPLQPELDSGGGGSDIIKLLNEQVNKEMQSSNLYMSMSSWCYTHSLDGAGLFLFDHAAEEYEHAKKLIIFLNENNVPVQLTSISAPEHKFEGLTQIFQKAYEHEQHISESINNIVDHAIKSKDHATFNFLQWYVAEQHEEEVLFKDILDKIELIGNENHGLYLADQYVKGIAKSRKS

SEQ ID NO: 9010 - protein, 1315 aa, Artificial Sequence
  SARS-CoV-2/Belgium/BC-03016/2020__EPI_ISL_415157 spike protein (1-1147)(I712C_T1077C) Ferritin construct
MFVFLVLLPLVSSQCVNLTTRTQLPPAYTNSFTRGVYYPDKVFRSSVLHSTQDLFLPFFSNVTWFHAIHVSGTNGTKRFDNPVLPFNDGVYFASTEKSNIIRGWIFGTTLDSKTQSLLIVNNATNVVIKVCEFQFCNDPFLGVYYHKNNKSWMESEFRVYSSANNCTFEYVSQPFLMDLEGKQGNFKNLREFVFKNIDGYFKIYSKHTPINLVRDLPQGFSALEPLVDLPIGINITRFQTLLALHRSYLTPGDSSSGWTAGAAAYYVGYLQPRTFLLKYNENGTITDAVDCALDPLSETKCTLKSFTVEKGIYQTSNFRVQPTESIVRFPNITNLCPFGEVFNATRFASVYAWNRKRISNCVADYSVLYNSASFSTFKCYGVSPTKLNDLCFTNVYADSFVIRGDEVRQIAPGQTGKIADYNYKLPDDFTGCVIAWNSNNLDSKVGGNYNYLYRLFRKSNLKPFERDISTEIYQAGSTPCNGVEGFNCYFPLQSYGFQPTNGVGYQPYRVVVLSFELLHAPATVCGPKKSTNLVKNKCVNFNFNGLTGTGVLTESNKKFLPFQQFGRDIADTTDAVRDPQTLEILDITPCSFGGVSVITPGTNTSNQVAVLYQGVNCTEVPVAIHADQLTPTWRVYSTGSNVFQTRAGCLIGAEHVNNSYECDIPIGAGICASYQTQTNSPRRARSVASQSIIAYTMSLGAENSVAYSNNSCAIPTNFTISVTTEILPVSMTKTSVDCTMYICGDSTECSNLLLQYGSFCTQLNRALTGIAVEQDKNTQEVFAQVKQIYKTPPIKDFGGFNFSQILPDPSKPSKRSFIEDLLFNKVTLADAGFIKQYGDCLGDIAARDLICAQKFNGLTVLPPLLTDEMIAQYTSALLAGTITSGWTFGAGAALQIPFAMQMAYRFNGIGVTQNVLYENQKLIANQFNSAIGKIQDSLSSTAPALGKLQDVVNQNAQALNTLVKQLSSNFGAISSVLNDILSRLDKVEAEVQIDRLITGRLQSLQTYVTQQLIRAAEIRASANLAATKMSECVLGQSKRVDFCGKGYHLMSFPQSAPHGVVFLHVTYVPAQEKNFTCAPAICHDGKAHFPREGVFVSNGTHWFVTQRNFYEPQIITTDNTFVSGNCDVVIGIVNNTVYDPLQPELDSGGGGSDIIKLLNEQVNKEMQSSNLYMSMSSWCYTHSLDGAGLFLFDHAAEEYEHAKKLIIFLNENNVPVQLTSISAPEHKFEGLTQIFQKAYEHEQHISESINNIVDHAIKSKDHATFNFLQWYVAEQHEEEVLFKDILDKIELIGNENHGLYLADQYVKGIAKSRKS

SEQ ID NO: 9011 - protein, 1315 aa, Artificial Sequence
  SARS-CoV-2/Germany/BavPat3/2020__EPI_ISL_414521 spike protein (1-1147)(I712C_T1077C) Ferritin construct
MFVFLVLLPLVSSQCVNLTTRTQLPPAYTNSFTRGVYYPDKVFRSSVLHSTQDLFLPFFSNVTWFHAIHVSGTNGTKRFDNPVLPFNDGVYFASTEKSNIIRGWIFGTTLDSKTQSLLIVNNATNVVIKVCEFQFCNDPFLGVYYHKNNKSWMESEFRVYSSANNCTFEYVSQPFLMDLEGKQGNFKNLREFVFKNIDGYFKIYSKHTPINLVRDLPQGFSALEPLVDLPIGINITRFQTLLALHRSYLTPGDSSSGWTAGAAAYYVGYLQPRTFLLKYNENGTITDAVDCALDPLSETKCTLKSFTVEKGIYQTSNFRVQPTESIVRFPNITNLCPFGEVFNATRFASVYAWNRKRISNCVADYSVLYNSASFSTFKCYGVSPTKLNDLCFTNVYADSFVIRGDEVRQIAPGQTGKIADYNYKLPDDFTGCVIAWNSNNLDSKVGGNYNYLYRLFRKSNLKPFERDISTEIYQAGSTPCNGVEGFNCYFPLQSYGFQPTNGVGYQPYRVVVLSFELLHAPATVCGPKKSTNLVKNKCVNFNFNGLTGTGVLTESNKKFLPFQQFGRDIADTTDAVRDPQTLEILDITPCSFGGVSVITPGTNTSNQVAVLYQDVNCTEVPVAIHADQLTPTWRVYSTGSNVFQTRAGCLIGAEHVNNSYECDIPIGAGICASYQTQTNSPRRARSVASQSIIAYTMSLGAENSVAYSNNSCAIPTNFTISVTTEILPVSMTKTSVDCTMYICGDSTECSNLLLQYGSFCTQLNRALTGIAVEQDKNTQQVFAQVKQIYKTPPIKDFGGFNFSQILPDPSKPSKRSFIEDLLFNKVTLADAGFIKQYGDCLGDIAARDLICAQKFNGLTVLPPLLTDEMIAQYTSALLAGTITSGWTFGAGAALQIPFAMQMAYRFNGIGVTQNVLYENQKLIANQFNSAIGKIQDSLSSTASALGKLQDVVNQNAQALNTLVKQLSSNFGAISSVLNDILSRLDKVEAEVQIDRLITGRLQSLQTYVTQQLIRAAEIRASANLAATKMSECVLGQSKRVDFCGKGYHLMSFPQSAPHGVVFLHVTYVPAQEKNFTCAPAICHDGKAHFPREGVFVSNGTHWFVTQRNFYEPQIITTDNTFVSGNCDVVIGIVNNTVYDPLQPELDSGGGGSDIIKLLNEQVNKEMQSSNLYMSMSSWCYTHSLDGAGLFLFDHAAEEYEHAKKLIIFLNENNVPVQLTSISAPEHKFEGLTQIFQKAYEHEQHISESINNIVDHAIKSKDHATFNFLQWYVAEQHEEEVLFKDILDKIELIGNENHGLYLADQYVKGIAKSRKS

SEQ ID NO: 9012 - protein, 1315 aa, Artificial Sequence
  SARS-CoV-2/France/HF1805/2020__EPI_ISL_414628 spike protein (1-1147)(I712C_T1077C) Ferritin construct
MFVFLVLLPLVSSQCVNLTTRTQLPPAYTNSFTRGVYYPDKVFRSSVLHSTQDLFLPFFSNVTWFHAIHVSGTNGTKRFDNPVLPFNDGVYFASTEKSNIIRGWIFGTTLDSKTQSLLIVNNATNVVIKVCEFQFCNDPFLGVYYHKNNKSWMESEFRVYSSANNCTFEYVSQPFLMDLEGKQGNFKNLREFVFKNIDGYFKIYSKHTPINLVRDLPQGFSALEPLVDLPIGINITRFQTLLALHRSYLTPGDSSSGWTAGAAAYYVGYLQPRTFLLKYNENGTITDAVDCALDPLSETKCTLKSFTVEKGIYQTSNFRVQPTESIVRFPNITNLCPFGEVFNATRFASVYAWNRKRISNCVADYSVLYNSASFSTFKCYGVSPTKLNDLCFTNVYADSFVIRGDEVRQIAPGQTGKIADYNYKLPDDFTGCVIAWNSNNLDSKVGGNYNYLYRLFRKSNLKPFERDISTEIYQAGSTPCNGVEGFNCYFPLQSYGFQPTNGVGYQPYRVVVLSFELLHAPATVCGPKKSTNLVKNKCVNFNFNGLTGTGVLTESNKKFLPFQQFGRDIADTTDAVRDPQTLEILDITPCSFGGVSVITPGTNTSNQVAVLYQGVNCTEVPVAIHADQLTPTWRVYSTGSNVFQTRAGCLIGAEHVNNSYECDIPIGAGICASYQTQTNSPRRARSVASQSIIAYTMSLGAENSVAYSNNSCAIPTNFTISVTTEILPVSMTKTSVDCTMYICGDSTECSNLLLQYGSFCTQLNRALTGIAVEQDKNTQEVFAQVKQIYKTPPIKDFGGFNFSQILPDPSKPSKRSFIEDLLFNKVTLADAGFIKQYGDCLGDIAARDLICAQKFNGLTVLPPLLTDEMIAQYTSALLAGTITSGWTFGAGAALQIPFAMQMAYRFNGIGVTQNVLYENQKLIANQFNSAIGKIQDSLSSTASALGKLQDVVNQNAQALNTLVKQLSSNFGAISSVLNDILSRLDKVEAEVQIDRLITGRLQSLQTYVTQQLIRAAEIRASANLAATKMSECVLGQSKRVDFCGKGYHLMSFPQSAPHGVVFLHVTYVPAQEKNFTCAPAICHDGKAHFPREGVFVSNGTHWFVTQRNFYEPQIITTDNTFVSGNCDVVIGVVNNTVYDPLQPELDSGGGGSDIIKLLNEQVNKEMQSSNLYMSMSSWCYTHSLDGAGLFLFDHAAEEYEHAKKLIIFLNENNVPVQLTSISAPEHKFEGLTQIFQKAYEHEQHISESINNIVDHAIKSKDHATFNFLQWYVAEQHEEEVLFKDILDKIELIGNENHGLYLADQYVKGIAKSRKS

SEQ ID NO: 9013 - protein, 1315 aa, Artificial Sequence
  SARS-CoV-2/Netherlands/ZuidHolland_9/2020__EPI_ISL_414445 spike protein (1-1147)(I712C_T1077C) Ferritin construct
MFVFLVLLPLVSSQCVNLTTRTQLPPAYTNSFTRGVYYPDKVFRSSVLHSTQDLFLPFFSNVTWFHAIHVSGTNGTKRFDNPVLPFNDGVYFASTEKSNIIRGWIFGTTLDSKTQSLLIVNNATNVVIKVCEFQFCNDPFLGVYYHKNNKSWMESEFRVYSSANNCTFEYVSQPFLMDLEGKQGNFKNLREFVFKNIDGYFKIYSKHTPINLVRDLPQGFSALEPLVDLPIGINITRFQTLLALHRSYLTPGDSSSGWTAGAAAYYVGYLQPRTFLLKYNENGTITDAVDCALDPLSETKCTLKSFTVEKGIYQTSNFRVQPTESIVRFPNITNLCPFGEVFNATRFASVYAWNRKRISNCVADYSVLYNSASFSTFKCYGVSPTKLNDLCFTNVYADSFVIRGDEVRQIAPGQTGKIADYNYKLPDDFTGCVIAWNSNNLDSKVGGNYNYLYRLFRKSNLKPFERDISTEIYQAGSTPCNGVEGFNCYFPLQSYGFQPTNGVGYQPYRVVVLSFELLHAPATVCGPKKSTNLVKNKCVNFNFNGLTGTGVLTESNKKFLPFQQFGRDIADTTDAVRDPQTLEILDITPCSFGGVSVITPGTNTSNQVAVLYQGVNCTEVPVAIHADQLTPTWRVYSTGSNVFQTRAGCLIGAEHVNNSYECDIPIGAGICASYQTQTNSPRRARSVASQSIIAYTMSLGAENSVAYSNNSCAIPTNFTISVTTEILPVSMTKTSVDCTMYICGDSTECSNLLLQYGSFCTQLNRALTGIAVEQDKNTQEVFAQVKQIYKTPPIKDFGGFNFSQILPDPSKPSKRSFIEDLLFNKVTLADAGFIKQYGDCLGDIAARDLICVQKFNGLTVLPPLLTDEMIAQYTSALLAGTITSGWTFGAGAALQIPFAMQMAYRFNGIGVTQNVLYENQKLIANQFNSAIGKIQDSLSSTASALGKLQDVVNQNAQALNTLVKQLSSNFGAISSVLNDILSRLDKVEAEVQIDRLITGRLQSLQTYVTQQLIRAAEIRASANLAATKMSECVLGQSKRVDFCGKGYHLMSFPQSAPHGVVFLHVTYVPAQEKNFTCAPAICHDGKAHFPREGVFVSNGTHWFVTQRNFYEPQIITTDNTFVSGNCDVVIGIVNNTVYDPLQPELDSGGGGSDIIKLLNEQVNKEMQSSNLYMSMSSWCYTHSLDGAGLFLFDHAAEEYEHAKKLIIFLNENNVPVQLTSISAPEHKFEGLTQIFQKAYEHEQHISESINNIVDHAIKSKDHATFNFLQWYVAEQHEEEVLFKDILDKIELIGNENHGLYLADQYVKGIAKSRKS

SEQ ID NO: 9014 - protein, 1315 aa, Artificial Sequence
  SARS-CoV-2/Finland/FIN03032020A/2020__EPI_ISL_413602 spike protein (1-1147)(I712C_T1077C) Ferritin construct
MFVFLVLLPLVSSQCVNLTTRTQLPPAYTNSFTRGVYYPDKVFRSSVLHSTQDLFLPFFSNVTWFHAIHVSGTNGTKRFDNPVLPFNDGVYFASTEKSNIIRGWIFGTTLDSKTQSLLIVNNATNVVIKVCEFQFCNDPFLGVYYHKNNKSWMESEFRVYSSANNCTFEYVSQPFLMDLEGKQGNFKNLREFVFKNIDGYFKIYSKHTPINLVRDLPQGFSALEPLVDLPIGINITRFQTLLALHRSYLTPGDSSSGWTAGAAAYYVGYLQPRTFLLKYNENGTITDAVDCALDPLSETKCTLKSFTVEKGIYQTSNFRVQPTESIVRFPNITNLCPFGEVFNATRFASVYAWNRKRISNCVADYSVLYNSASFSTFKCYGVSPTKLNDLCFTNVYADSFVIRGDEVRQIAPGQTGKIADYNYKLPDDFTGCVISWNSNNLDSKVGGNYNYLYRLFRKSNLKPFERDISTEIYQAGSTPCNGVEGFNCYFPLQSYGFQPTNGVGYQPYRVVVLSFELLHAPATVCGPKKSTNLVKNKCVNFNFNGLTGTGVLTESNKKFLPFQQFGRDIADTTDAVRDPQTLEILDITPCSFGGVSVITPGTNTSNQVAVLYQGVNCTEVPVAIHADQLTPTWRVYSTGSNVFQTRAGCLIGAEHVNNSYECDIPIGAGICASYQTQTNSPRRARSVASQSIIAYTMSLGAENSVAYSNNSCAIPTNFTISVTTEILPVSMTKTSVDCTMYICGDSTECSNLLLQYGSFCTQLNRALTGIAVEQDKNTQEVFAQVKQIYKTPPIKDFGGFNFSQILPDPSKPSKRSFIEDLLFNKVTLADAGFIKQYGDCLGDIAARDLICAQKFNGLTVLPPLLTDEMIAQYTSALLAGTITSGWTFGAGAALQIPFAMQMAYRFNGIGVTQNVLYENQKLIANQFNSAIGKIQDSLSSTASALGKLQDVVNQNAQALNTLVKQLSSNFGAISSVLNDILSRLDKVEAEVQIDRLITGRLQSLQTYVTQQLIRAAEIRASANLAATKMSECVLGQSKRVDFCGKGYHLMSFPQSAPHGVVFLHVTYVPAQEKNFTCAPAICHDGKAHFPREGVFVSNGTHWFVTQRNFYEPQIITTDNTFVSGNCDVVIGIVNNTVYDPLQPELDSGGGGSDIIKLLNEQVNKEMQSSNLYMSMSSWCYTHSLDGAGLFLFDHAAEEYEHAKKLIIFLNENNVPVQLTSISAPEHKFEGLTQIFQKAYEHEQHISESINNIVDHAIKSKDHATFNFLQWYVAEQHEEEVLFKDILDKIELIGNENHGLYLADQYVKGIAKSRKS

SEQ ID NO: 9015 - protein, 1315 aa, Artificial Sequence
  SARS-CoV-2/France/GE1977/2020__EPI_ISL_414632 spike protein (1-1147)(I712C_T1077C) Ferritin construct
MFVFLVLLPLVSSQCVNLTTRTQLPPAYTNSFTRGVYYPDKVFRSSVLHSTQDLFLPFFSNVTWFHAIHVSGTNGTKRFDNPVLPFNDGVYFASTEKSNIIRGWIFGTTLDSKTQSLLIVNNATNVVIKVCEFQFCNDPFLGVYYHKNNKSWMESEFRVYSSANNCTFEYVSQPFLMDLEGKQGNFKNLREFVFKNIDGYFKIYSKHTPINLVRDLPQGFSALEPLVDLPIGINITRFQTLLALHRSYLTPGDSSSGWTAGAAAYYVGYLQPRTFLLKYNENGTITDAVDCALDPLSETKCTLKSFTVEKGIYQTSNFRVQPTESIVRFPNITNLCPFGEVFNATRFASVYAWNRKRISNCVADYSVLYNSASFSTFKCYGVSPTKLNDLCFTNVYADSFVIRGDEVRQIAPGQTGKIADYNYKLPDDFTGCVIAWNSNNLDSKVGGNYNYLYRLFRKSNLKPFERDISTEIYQAGSTPCNGVEGFNCYFPLQSYGFQPTNGVGYQPYRVVVLSFELLHAPATVCGPKKSTNLVKNKCVNFNFNGLTGTGVLTESNKKFLPFQQFGRDIADTTDAVRDPQTLEILDITPCSFGGVSVITPGTNTSNQVAVLYQGVNCTEVPVAIHADQLTPTWRVYSTGSNVFQTRAGCLIGAEHVNNSYECDIPIGAGICASYQTQTNSPRRARSVASQSIIAYTMSLGAENSVAYSNNSCAIPTNFTISVTTEILPVSMTKTSVDCTMYICGDSTECSNLLLQYGSFCTQLNRALTGIAVEQDKNTQEVFAQVKQIYKTPPIKDFGGFNFSQILPDPSKPSKRSFIEDLLFNKVTLADAGFIKQYGDCLGDIAARDLICAQKFNGLTVLPPLLTDEMIAQYTSALLAGTITSGWTFGAGAALQIPFAMQMAYRFNGIGVTQNVLYENQKLIANQFNSAIGKIQDSLFSTASALGKLQDVVNQNAQALNTLVKQLSSNFGAISSVLNDILSRLDKVEAEVQIDRLITGRLQSLQTYVTQQLIRAAEIRASANLAATKMSECVLGQSKRVDFCGKGYHLMSFPQSAPHGVVFLHVTYVPAQEKNFTCAPAICHDGKAHFPREGVFVSNGTHWFVTQRNFYEPQIITTDNTFVSGNCDVVIGIVNNTVYDPLQPELDSGGGGSDIIKLLNEQVNKEMQSSNLYMSMSSWCYTHSLDGAGLFLFDHAAEEYEHAKKLIIFLNENNVPVQLTSISAPEHKFEGLTQIFQKAYEHEQHISESINNIVDHAIKSKDHATFNFLQWYVAEQHEEEVLFKDILDKIELIGNENHGLYLADQYVKGIAKSRKS

SEQ ID NO: 9016 - protein, 1315 aa, Artificial Sequence
  SARS-CoV-2/Finland/FIN-313/2020__EPI_ISL_414641 spike protein (1-1147)(I712C_T1077C) Ferritin construct
MFVFLVLLPLVSSQCVNLTTRTQLPPAYTNSFTRGVYYPDKVFRSSVLHSTQDLFLPFFSNVTWFHAIHVSGTNGTKRFDNPVLPFNDGVYFASTEKSNIIRGWIFGTTLDSKTQSLLIVNNATNVVIKVCEFQFCNDPFLGVYYHKNNKSWMESEFRVYSSANNCTFEYVSQPFLMDLEGKQGNFKNLREFVFKNIDGYFKIYSKHTPINLVRDLPQGFSALEPLVDLPIGINITRFKTLLALHRSYLTPGDSSSGWTAGAAAYYVGYLQPRTFLLKYNENGTITDAVDCALDPLSETKCTLKSFTVEKGIYQTSNFRVQPTESIVRFPNITNLCPFGEVFNATRFASVYAWNRKRISNCVADYSVLYNSASFSTFKCYGVSPTKLNDLCFTNVYADSFVIRGDEVRQIAPGQTGKIADYNYKLPDDFTGCVIAWNSNNLDSKVGGNYNYLYRLFRKSNLKPFERDISTEIYQAGSTPCNGVEGFNCYFPLQSYGFQPTNGVGYQPYRVVVLSFELLHAPATVCGPKKSTNLVKNKCVNFNFNGLTGTGVLTESNKKFLPFQQFGRDIADTTDAVRDPQTLEILDITPCSFGGVSVITPGTNTSNQVAVLYQGVNCTEVPVAIHADQLTPTWRVYSTGSNVFQTRAGCLIGAEHVNNSYECDIPIGAGICASYQTQTNSPRRARSVASQSIIAYTMSLGAENSVAYSNNSCAIPTNFTISVTTEILPVSMTKTSVDCTMYICGDSTECSNLLLQYGSFCTQLNRALTGIAVEQDKNTQEVFAQVKQIYKTPPIKDFGGFNFSQILPDPSKPSKRSFIEDLLFNKVTLADAGFIKQYGDCLGDIAARDLICAQKFNGLTVLPPLLTDEMIAQYTSALLAGTITSGWTFGAGAALQIPFAMQMAYRFNGIGVTQNVLYENQKLIANQFNSAIGKIQDSLSSTASALGKLQDVVNQNAQALNTLVKQLSSNFGAISSVLNDILSRLDKVEAEVQIDRLITGRLQSLQTYVTQQLIRAAEIRASANLAATKMSECVLGQSKRVDFCGKGYHLMSFPQSAPHGVVFLHVTYVPAQEKNFTCAPAICHDGKAHFPREGVFVSNGTHWFVTQRNFYEPQIITTDNTFVSGNCDVVIGIVNNTVYDPLQPELDSGGGGSDIIKLLNEQVNKEMQSSNLYMSMSSWCYTHSLDGAGLFLFDHAAEEYEHAKKLIIFLNENNVPVQLTSISAPEHKFEGLTQIFQKAYEHEQHISESINNIVDHAIKSKDHATFNFLQWYVAEQHEEEVLFKDILDKIELIGNENHGLYLADQYVKGIAKSRKS

SEQ ID NO: 9017 - protein, 1315 aa, Artificial Sequence
  SARS-CoV-2/Netherlands/ZuidHolland_2/2020__EPI_ISL_414556 spike protein (1-1147)(I712C_T1077C) Ferritin construct
MFVFLVLLPLVSSQCVNLTTRTQLPPAYTNSFTRGVYYPDKVFRSSVLHSTQDLFLPFFSNVTWFHAIHVSGTNGTKRFDNPVLPFNDGVYFASTEKSNIIRGWIFGTTLDSKTQSLLIVNNATNVVIKVCEFQFCNDPFLGVYYHKNNKSWMESEFRVYSSANNCTFEYVSQPFLMDLEGKQGNFKNLREFVFKNIDGYFKIYSKHTPINLVRDLPQGFSALEPLVDLPIGINITRFQTLLALHRSYLTPGDSSSGWTAGAAAYYVGYLQPRTFLLKYNENGTITDAVDCALDPLSETKCTLKSFTVEKGIYQTSNFRVQPTESIVRFPNITNLCPFGEVFNATRFASVYAWNRKRISNCVADYSVLYNSASFSTFKCYGVSPTKLNDLCFTNVYADSFVIRGDEVRQIAPGQTGKIADYNYKLPDDFTGCVIAWNSNNLDSKVGGNYNYLYRLFRKSNLKPFERDISTEIYQAGSTPCNGVEGFNCYFPLQSYGFQPTNGVGYQPYRVVVLSFELLHAPATVCGPKKSTNLVKNKCVNFNFNGLTGTGVLTESNKKFLPFQQFGRDIADTTDAVRDPQTLEILDITPCSFGGVSVITPGTNTSNQVAVLYQGVNCTEVPVAIHADQLTPTWRVYSTGSNVFQTRAGCLIGAEHVNNSYECDIPIGAGICASYQTQTNSPRRARSVASQSIIAYTMSLGAENSVAYSNNSCAIPTNFTISVTTEILPVSMTKTSVDCTMYICGDSTECSNLLLQYGSFCTQLNRALTGIALEQDKNTQEVFAQVKQIYKTPPIKDFGGFNFSQILPDPSKPSKRSFIEDLLFNKVTLADAGFIKQYGDCLGDIAARDLICAQKFNGLTVLPPLLTDEMIAQYTSALLAGTITSGWTFGAGAALQIPFAMQMAYRFNGIGVTQNVLYENQKLIANQFNSAIGKIQDSLSSTASALGKLQDVVNQNAQALNTLVKQLSSNFGAISSVLNDILSRLDKVEAEVQIDRLITGRLQSLQTYVTQQLIRAAEIRASANLAATKMSECVLGQSKRVDFCGKGYHLMSFPQSAPHGVVFLHVTYVPAQEKNFTCAPAICHDGKAHFPREGVFVSNGTHWFVTQRNFYEPQIITTDNTFVSGNCDVVIGIVNNTVYDPLQPELDSGGGGSDIIKLLNEQVNKEMQSSNLYMSMSSWCYTHSLDGAGLFLFDHAAEEYEHAKKLIIFLNENNVPVQLTSISAPEHKFEGLTQIFQKAYEHEQHISESINNIVDHAIKSKDHATFNFLQWYVAEQHEEEVLFKDILDKIELIGNENHGLYLADQYVKGIAKSRKS

SEQ ID NO: 9018 - protein, 1315 aa, Artificial Sequence
  SARS-CoV-2/USA/WA-UW31/2020__EPI_ISL_414618 spike protein (1-1147)(I712C_T1077C) Ferritin construct
MFVFLVLLPLVSSQCVNLTTRTQLPPAYTNSFTRGVYYPDKVFRSSVLHSTQDLFLPFFSNVTWFHAIHVSGTNGTKRFDNPVLPFNDGVYFASTEKSNIIRGWIFGTTLDSKTQSLLIVNNATNVVIKVCEFQFCNDPFLGVYYHKNNKSWMESEFRVYSSANNCTFEYVSQPFLMDLEGKQGNFKNLREFVFKNIDGYFKIYSKHTPINLVRDLPQGFSALEPLVDLPIGINITRFQTLLALHRSYLTPGDSSSGWTAGAAAYYVGYLQPRTFLLKYNENGTITDAVDCALDPLSETKCTLKSFTVEKGIYQTSNFRVQPTESIVRFPNITNLCPFGEVFNATRFASVYAWNRKRISNCVADYSVLYNSASFSTFKCYGVSPTKLNDLCFTNVYADSFVIRGDEVRQIAPGQTGKIADYNYKLPDDFTGCVIAWNSNNLDSKVGGNYNYLYRLFRKSNLKPFERDISTEIYQAGSTPCNGAEGFNCYFPLQSYGFQPTNGVGYQPYRVVVLSFELLHAPATVCGPKKSTNLVKNKCVNFNFNGLTGTGVLTESNKKFLPFQQFGRDIADTTDAVRDPQTLEILDITPCSFGGVSVITPGTNTSNQVAVLYQDVNCTEVPVAIHADQLTPTWRVYSTGSNVFQTRAGCLIGAEHVNNSYECDIPIGAGICASYQTQTNSPRRARSVASQSIIAYTMSLGAENSVAYSNNSCAIPTNFTISVTTEILPVSMTKTSVDCTMYICGDSTECSNLLLQYGSFCTQLNRALTGIAVEQDKNTQEVFAQVKQIYKTPPIKDFGGFNFSQILPDPSKPSKRSFIEDLLFNKVTLADAGFIKQYGDCLGDIAARDLICAQKFNGLTVLPPLLTDEMIAQYTSALLAGTITSGWTFGAGAALQIPFAMQMAYRFNGIGVTQNVLYENQKLIANQFNSAIGKIQDSLSSTASALGKLQDVVNQNAQALNTLVKQLSSNFGAISSVLNDILSRLDKVEAEVQIDRLITGRLQSLQTYVTQQLIRAAEIRASANLAATKMSECVLGQSKRVDFCGKGYHLMSFPQSAPHGVVFLHVTYVPAQEKNFTCAPAICHDGKAHFPREGVFVSNGTHWFVTQRNFYEPQIITTDNTFVSGNCDVVIGIVNNTVYDPLQPELDSGGGGSDIIKLLNEQVNKEMQSSNLYMSMSSWCYTHSLDGAGLFLFDHAAEEYEHAKKLIIFLNENNVPVQLTSISAPEHKFEGLTQIFQKAYEHEQHISESINNIVDHAIKSKDHATFNFLQWYVAEQHEEEVLFKDILDKIELIGNENHGLYLADQYVKGIAKSRKS

SEQ ID NO: 9019 - protein, 1315 aa, Artificial Sequence
  SARS-CoV-2/South Korea/SNU01/2020__EPI_ISL_411929 spike protein (1-1147)(I712C_T1077C) Ferritin construct
MFVFLVLLPLVSSQCVNLTTRTQLPPAYTNSFTRGVYYPDKVFRSSVLHSTQDLFLPFFSNVTWFHAIHVSGTNGTKRFDNPVLPFNDGVYFASTEKSNIIRGWIFGTTLDSKTQSLLIVNNATNVVIKVCEFQFCNDPFLGVYYHKNNKSWMESEFRVYSSANNCTFEYVSQPFLMDLEGKQGNFKNLREFVFKNIDGYFKIYSKHTPINLVRDLPQGFWALEPLVDLPIGINITRFQTLLALHRSYLTPGDSSSGWTAGAAAYYVGYLQPRTFLLKYNENGTITDAVDCALDPLSETKCTLKSFTVEKGIYQTSNFRVQPTESIVRFPNITNLCPFGEVFNATRFASVYAWNRKRISNCVADYSVLYNSASFSTFKCYGVSPTKLNDLCFTNVYADSFVIRGDEVRQIAPGQTGKIADYNYKLPDDFTGCVIAWNSNNLDSKVGGNYNYLYRLFRKSNLKPFERDISTEIYQAGSTPCNGVEGFNCYFPLQSYGFQPTNGVGYQPYRVVVLSFELLHAPATVCGPKKSTNLVKNKCVNFNFNGLTGTGVLTESNKKFLPFQQFGRDIADTTDAVRDPQTLEILDITPCSFGGVSVITPGTNTSNQVAVLYQDVNCTEVPVAIHADQLTPTWRVYSTGSNVFQTRAGCLIGAEHVNNSYECDIPIGAGICASYQTQTNSPRRARSVASQSIIAYTMSLGAENSVAYSNNSCAIPTNFTISVTTEILPVSMTKTSVDCTMYICGDSTECSNLLLQYGSFCTQLNRALTGIAVEQDKNTQEVFAQVKQIYKTPPIKDFGGFNFSQILPDPSKPSKRSFIEDLLFNKVTLADAGFIKQYGDCLGDIAARDLICAQKFNGLTVLPPLLTDEMIAQYTSALLAGTITSGWTFGAGAALQIPFAMQMAYRFNGIGVTQNVLYENQKLIANQFNSAIGKIQDSLSSTASALGKLQDVVNQNAQALNTLVKQLSSNFGAISSVLNDILSRLDKVEAEVQIDRLITGRLQSLQTYVTQQLIRAAEIRASANLAATKMSECVLGQSKRVDFCGKGYHLMSFPQSAPHGVVFLHVTYVPAQEKNFTCAPAICHDGKAHFPREGVFVSNGTHWFVTQRNFYEPQIITTDNTFVSGNCDVVIGIVNNTVYDPLQPELDSGGGGSDIIKLLNEQVNKEMQSSNLYMSMSSWCYTHSLDGAGLFLFDHAAEEYEHAKKLIIFLNENNVPVQLTSISAPEHKFEGLTQIFQKAYEHEQHISESINNIVDHAIKSKDHATFNFLQWYVAEQHEEEVLFKDILDKIELIGNENHGLYLADQYVKGIAKSRKS

SEQ ID NO: 9020 - protein, 1315 aa, Artificial Sequence
  SARS-CoV-2/China/WF0004/2020__EPI_ISL_413694 spike protein (1-1147)(I712C_T1077C) Ferritin construct
MFVFLVLLPLVSSQCVNLTTRTQLPPAYTNSFTRGVYYPDKVFRSSVLHSTQDLFLPFFSNVTWFHAIHVSGTNGTKRFDNPVLPFNDGVYFASTEKSNIIRGWIFGTTLDSKTQSLLIVNNATNVVIKVCEFQFCNDPFLGVYYHKNNKSWTESEFRVYSSANNCTFEYVSQPFLMDLEGKQGNFKNLREFVFKNIDGYFKIYSKHTPINLVRDLPQGFSALEPLVDLPIGINITRFQTLLALHRSYLTPGDSSSGWTAGAAAYYVGYLQPRTFLLKYNENGTITDAVDCALDPLSETKCTLKSFTVEKGIYQTSNFRVQPTESIVRFPNITNLCPFGEVFNATRFASVYAWNRKRISNCVADYSVLYNSASFSTFKCYGVSPTKLNDLCFTNVYADSFVIRGDEVRQIAPGQTGKIADYNYKLPDDFTGCVIAWNSNNLDSKVGGNYNYLYRLFRKSNLKPFERDISTEIYQAGSTPCNGVEGFNCYFPLQSYGFQPTNGVGYQPYRVVVLSFELLHAPATVCGPKKSTNLVKNKCVNFNFNGLTGTGVLTESNKKFLPFQQFGRDIADTTDAVRDPQTLEILDITPCSFGGVSVITPGTNTSNQVAVLYQDVNCTEVPVAIHADQLTPTWRVYSTGSNVFQTRAGCLIGAEHVNNSYECDIPIGAGICASYQTQTNSPRRARSVASQSIIAYTMSLGAENSVAYSNNSCAIPTNFTISVTTEILPVSMTKTSVDCTMYICGDSTECSNLLLQYGSFCTQLNRALTGIAVEQDKNTQEVFAQVKQIYKTPPIKDFGGFNFSQILPDPSKPSKRSFIEDLLFNKVTLADAGFIKQYGDCLGDIAARDLICAQKFNGLTVLPPLLTDEMIAQYTSALLAGTITSGWTFGAGAALQIPFAMQMAYRFNGIGVTQNVLYENQKLIANQFNSAIGKIQDSLSSTASALGKLQDVVNQNAQALNTLVKQLSSNFGAISSVLNDILSRLDKVEAEVQIDRLITGRLQSLQTYVTQQLIRAAEIRASANLAATKMSECVLGQSKRFDFCGKGYHLMSFPQSAPHGVVFLHVTYVPAQEKNFTCAPAICHDGKAHFPREGVFVSNGTHWFVTQRNFYEPQIITTDNTFVSGNCDVVIGIVNNTVYDPLQPELDSGGGGSDIIKLLNEQVNKEMQSSNLYMSMSSWCYTHSLDGAGLFLFDHAAEEYEHAKKLIIFLNENNVPVQLTSISAPEHKFEGLTQIFQKAYEHEQHISESINNIVDHAIKSKDHATFNFLQWYVAEQHEEEVLFKDILDKIELIGNENHGLYLADQYVKGIAKSRKS

SEQ ID NO: 9021 - protein, 1315 aa, Artificial Sequence
  SARS-CoV-2/China/WF0028/2020__EPI_ISL_413791 spike protein (1-1147)(I712C_T1077C) Ferritin construct
MFVFLVLLPLVSSQCVNLTTRTQLPPAYTNSFTRGVYYPDKVFRSSVLHSTQDLFLPFFSNVTWFHAIHVSGTNGTKRFDNPVLPFNDGVYFASTEKSNIIRGWIFGTTLDSKTQSLLIVNNATNVVIKVCEFQFCNDPFLGVYYHKNNKSWMESEFRVYSSANNCTFEYVSQPFLMDLEGKQGNFKNLREFVFKNIDGYFKIYSKHTPINLVRDLPQGFSALEPLVDLPIGINITRFQTLLALHRSYLTPGDSSSGWTAGAAAYYVGYLQPRTFLLKYNENGTITDAVDCALDPLSETKCTLKSFTVEKGIYQTSNFRVQPTESIVRFPNITNLCPFGEVFNATRFASVYAWNRKRISNCVADYSVLYNSASFSTFKCYGVSPTKLNDLCFTNVYADSFVIRGDEVRQIAPGQTGKIADYNYKLPDDFTGCVIAWNSNNLDSKVGGNYNYLYRLFRKSNLKPFERDISTEIYQAGSTPCNGVEGFNCYFPLQSYGFQPTNGVGYQPYRVVVLSFELLHAPATVCGPKKSTNLVKNKCVNFNFNGLTGTGVLTESNKKFLPFQQFGRDIADTTDAVRDPQTLEILDITPCSFGGVSVITPGTNTSNQVAVLYQDVNCTEVPVAIHADQLTPTWRVYSTGSNVFQTRAGCLIGAEHVNNSYECDIPIGAGICASYQTQTNSPRRARSVASQSIIAYTMSLGAENSVAYSNNSCAIPTNFTISVTTEILPVSMTKTSVDCTMYICGDSTECSNLLLQYGSFCTQLNRALTGIAVEQDKNTQEVFAQVKQIYKTPPIKDFGGFNFSQILPDPSKPSKRSFIEDLLFNKVTLADAGFIKQYGDCLGDIAARDLICAQKFNGLTVLPPLLTDEMIAQYTSALLAGTITSGWTFGAGAALQIPFAMQMAYRFNGIGVTQNVLYENQKLIANQFNSAIGKIQDSLSSTASALGKLQDVVNQNAQALNTLVKQLSSNFGAISSVLNDILSRLDKVEAEVQIDRLITGRLQSLQTYVTQQLIRAAEIRASANLAATKMSECVLGQSKRVDFCGKGYHLMSFPQSAPHGVVFLHVTYVPAQEKNFTCAPAICHDGKAHFPREGVFVSNGTHWFVTQRNFYEPQIITTDNTFVSGNCDVVIGIVNNTVYDPLQPELESGGGGSDIIKLLNEQVNKEMQSSNLYMSMSSWCYTHSLDGAGLFLFDHAAEEYEHAKKLIIFLNENNVPVQLTSISAPEHKFEGLTQIFQKAYEHEQHISESINNIVDHAIKSKDHATFNFLQWYVAEQHEEEVLFKDILDKIELIGNENHGLYLADQYVKGIAKSRKS

SEQ ID NO: 9022 - protein, 1315 aa, Artificial Sequence
  SARS-CoV-2/2019-nCoV/USA-CruiseA-18/2020__MT159716.1 spike protein (1-1147)(I712C_T1077C) Ferritin construct
MFVFLVLLPLVSSQCVNLTTRTQLPPAYTNSFTRGVYYPDKVFRSSVLHSTQDLFLPFFSNVTWFHAIHVSGTNGTKRFDNPVLPFNDGVYFASTEKSNIIRGWIFGTTLDSKTQSLLIVNNATNVVIKVCEFQFCNDPFLGVYYHKNNKSWMESELRVYSSANNCTFEYVSQPFLMDLEGKQGNFKNLREFVFKNIDGYFKIYSKHTPINLVRDLPQGFSALEPLVDLPIGINITRFQTLLALHRSYLTPGDSSSGWTAGAAAYYVGYLQPRTFLLKYNENGTITDAVDCALDPLSETKCTLKSFTVEKGIYQTSNFRVQPTESIVRFPNITNLCPFGEVFNATRFASVYAWNRKRISNCVADYSVLYNSASFSTFKCYGVSPTKLNDLCFTNVYADSFVIRGDEVRQIAPGQTGKIADYNYKLPDDFTGCVIAWNSNNLDSKVGGNYNYLYRLFRKSNLKPFERDISTEIYQAGSTPCNGVEGFNCYFPLQSYGFQPTNGVGYQPYRVVVLSFELLHAPATVCGPKKSTNLVKNKCVNFNFNGLTGTGVLTESNKKFLPFQQFGRDIADTTDAVRDPQTLEILDITPCSFGGVSVITPGTNTSNQVAVLYQDVNCTEVPVAIHADQLTPTWRVYSTGSNVFQTRAGCLIGAEHVNNSYECDIPIGAGICASYQTQTNSPRRARSVASQSIIAYTMSLGAENSVAYSNNSCAIPTNFTISVTTEILPVSMTKTSVDCTMYICGDSTECSNLLLQYGSFCTQLNRALTGIAVEQDKNTQEVFAQVKQIYKTPPIKDFGGFNFSQILPDPSKPSKRSFIEDLLFNKVTLADAGFIKQYGDCLGDIAARDLICAQKFNGLTVLPPLLTDEMIAQYTSALLAGTITSGWTFGAGAALQIPFAMQMAYRFNGIGVTQNVLYENQKLIANQFNSAIGKIQDSLSSTASALGKLQDVVNQNAQALNTLVKQLSSNFGAISSVLNDILSRLDKVEAEVQIDRLITGRLQSLQTYVTQQLIRAAEIRASANLAATKMSECVLGQSKRVDFCGKGYHLMSFPQSAPHGVVFLHVTYVPAQEKNFTCAPAICHDGKAHFPREGVFVSNGTHWFVTQRNFYEPQIITTDNTFVSGNCDVVIGIVNNTVYDPLQPELDSGGGGSDIIKLLNEQVNKEMQSSNLYMSMSSWCYTHSLDGAGLFLFDHAAEEYEHAKKLIIFLNENNVPVQLTSISAPEHKFEGLTQIFQKAYEHEQHISESINNIVDHAIKSKDHATFNFLQWYVAEQHEEEVLFKDILDKIELIGNENHGLYLADQYVKGIAKSRKS

SEQ ID NO: 9023 - protein, 1315 aa, Artificial Sequence
  SARS-CoV-2/SARS-CoV-2/Yunnan-01/human/2020/CHN__MT049951.1 spike protein (1-1147)(I712C_T1077C) Ferritin construct
MFVFLVLLPLVSSQCVNLTTRTQLPPANTNSFTRGVYYPDKVFRSSVLHSTQDLFLPFFSNVTWFHAIHVSGTNGTKRFDNPVLPFNDGVYFASTEKSNIIRGWIFGTTLDSKTQSLLIVNNATNVVIKVCEFQFCNDPFLGVYYHKNNKSWMESEFRVYSSANNCTFEYVSQPFLMDLEGKQGNFKNLREFVFKNIDGYFKIYSKHTPINLVRDLPQGFSALEPLVDLPIGINITRFQTLLALHRSYLTPGDSSSGWTAGAAAYYVGYLQPRTFLLKYNENGTITDAVDCALDPLSETKCTLKSFTVEKGIYQTSNFRVQPTESIVRFPNITNLCPFGEVFNATRFASVYAWNRKRISNCVADYSVLYNSASFSTFKCYGVSPTKLNDLCFTNVYADSFVIRGDEVRQIAPGQTGKIADYNYKLPDDFTGCVIAWNSNNLDSKVGGNYNYLYRLFRKSNLKPFERDISTEIYQAGSTPCNGVEGFNCYFPLQSYGFQPTNGVGYQPYRVVVLSFELLHAPATVCGPKKSTNLVKNKCVNFNFNGLTGTGVLTESNKKFLPFQQFGRDIADTTDAVRDPQTLEILDITPCSFGGVSVITPGTNTSNQVAVLYQDVNCTEVPVAIHADQLTPTWRVYSTGSNVFQTRAGCLIGAEHVNNSYECDIPIGAGICASYQTQTNSPRRARSVASQSIIAYTMSLGAENSVAYSNNSCAIPTNFTISVTTEILPVSMTKTSVDCTMYICGDSTECSNLLLQYGSFCTQLNRALTGIAVEQDKNTQEVFAQVKQIYKTPPIKDFGGFNFSQILPDPSKPSKRSFIEDLLFNKVTLADAGFIKQYGDCLGDIAARDLICAQKFNGLTVLPPLLTDEMIAQYTSALLAGTITSGWTFGAGAALQIPFAMQMAYRFNGIGVTQNVLYENQKLIANQFNSAIGKIQDSLSSTASALGKLQDVVNQNAQALNTLVKQLSSNFGAISSVLNDILSRLDKVEAEVQIDRLITGRLQSLQTYVTQQLIRAAEIRASANLAATKMSECVLGQSKRVDFCGKGYHLMSFPQSAPHGVVFLHVTYVPAQEKNFTCAPAICHDGKAHFPREGVFVSNGTHWFVTQRNFYEPQIITTDNTFVSGNCDVVIGIVNNTVYDPLQPELDSGGGGSDIIKLLNEQVNKEMQSSNLYMSMSSWCYTHSLDGAGLFLFDHAAEEYEHAKKLIIFLNENNVPVQLTSISAPEHKFEGLTQIFQKAYEHEQHISESINNIVDHAIKSKDHATFNFLQWYVAEQHEEEVLFKDILDKIELIGNENHGLYLADQYVKGIAKSRKS

SEQ ID NO: 9024 - protein, 1315 aa, Artificial Sequence
  SARS-CoV-2/USA/WA-UW292/2020__EPI_ISL_418077 spike protein (1-1147)(I712C_T1077C) Ferritin construct
MFVFLVLLPLVSSQCVNLTTRTQLPPAYTNSFTRGVYYPDKVFRSSVLHSTQDLFLPFFSNVTWFHAIHVSGTNGTKRFDNPVLPFNDGVYFASTEKSNIIRGWIFGTTLDSKTQSLLIVNNATNVVIKVCEFQFCNDPFLGVYYHKNNKSWMESEFRVYSSANNCTFEYVSQPFLMDLEGKQGNFKNLREFVFKNIDGYFKIYSKHTPINLVRDLPQGFSALEPLVDLPIGINITRFQTLLALHRSYLTPGDSSSGWTAGAAAYYVGYLQPRTFLLKYNENGTITDAVDCALDPLSETKCTLKSFTVEKGIYQTSNFRVQPTESIVRFPNITNLCPFGEVFNATRFASVYAWNRKRISNCVADYSVLYNSASFSTFKCYGVSPTKLNDLCFTNVYADSFVIRGDEVRQIAPGQTGKIADYNYKLPDDFTGCVIAWNSNNLDSKVGGNYNYLYRLFRKSNLKPFERDISTEIYQASSTPCNGVEGFNCYFPLQSYGFQPTNGVGYQPYRVVVLSFELLHAPATVCGPKKSTNLVKNKCVNFNFNGLTGTGVLTESNKKFLPFQQFGRDIADTTDAVRDPQTLEILDITPCSFGGVSVITPGTNTSNQVAVLYQDVNCTEVPVAIHADQLTPTWRVYSTGSNVFQTRAGCLIGAEHVNNSYECDIPIGAGICASYQTQTNSPRRARSVASQSIIAYTMSLGAENSVAYSNNSCAIPTNFTISVTTEILPVSMTKTSVDCTMYICGDSTECSNLLLQYGSFCTQLNRALTGIAVEQDKNTQEVFAQVKQIYKTPPIKDFGGFNFSQILPDPSKPSKRSFIEDLLFNKVTLADAGFIKQYGDCLGDIAARDLICAQKFNGLTVLPPLLTDEMIAQYTSALLAGTITSGWTFGAGAALQIPFAMQMAYRFNGIGVTQNVLYENQKLIANQFNSAIGKIQDSLSSTASALGKLQDVVNQNAQALNTLVKQLSSNFGAISSVLNDILSRLDKVEAEVQIDRLITGRLQSLQTYVTQQLIRAAEIRASANLAATKMSECVLGQSKRVDFCGKGYHLMSFPQSAPHGVVFLHVTYVPAQEKNFTCAPAICHDGKAHFPREGVFVSNGTHWFVTQRNFYEPQIITTDNTFVSGNCDVVIGIVNNTVYDPLQPELDSGGGGSDIIKLLNEQVNKEMQSSNLYMSMSSWCYTHSLDGAGLFLFDHAAEEYEHAKKLIIFLNENNVPVQLTSISAPEHKFEGLTQIFQKAYEHEQHISESINNIVDHAIKSKDHATFNFLQWYVAEQHEEEVLFKDILDKIELIGNENHGLYLADQYVKGIAKSRKS

SEQ ID NO: 9025 - protein, 1315 aa, Artificial Sequence
  SARS-CoV-2/Iceland/192/2020__EPI_ISL_417819 spike protein (1-1147)(I712C_T1077C) Ferritin construct
MFVFFVLLPLVSSQCVNLTTRTQLPPAYTNSFTRGVYYPDKVFRSSVLHSTQDLFLPFFSNVTWFHAIHVSGTNGTKRFDNPVLPFNDGVYFASTEKSNIIRGWIFGTTLDSKTQSLLIVNNATNVVIKVCEFQFCNDPFLGVYYHKNNKSWMESEFRVYSSANNCTFEYVSQPFLMDLEGKQGNFKNLREFVFKNIDGYFKIYSKHTPINLVRDLPQGFSALEPLVDLPIGINITRFQTLLALHRSYLTPGDSSSGWTAGAAAYYVGYLQPRTFLLKYNENGTITDAVDCALDPLSETKCTLKSFTVEKGIYQTSNFRVQPTESIVRFPNITNLCPFGEVFNATRFASVYAWNRKRISNCVADYSVLYNSASFSTFKCYGVSPTKLNDLCFTNVYADSFVIRGDEVRQIAPGQTGKIADYNYKLPDDFTGCVIAWNSNNLDSKVGGNYNYLYRLFRKSNLKPFERDISTEIYQAGSTPCNGVEGFNCYFPLQSYGFQPTNGVGYQPYRVVVLSFELLHAPATVCGPKKSTNLVKNKCVNFNFNGLTGTGVLTESNKKFLPFQQFGRDIADTTDAVRDPQTLEILDITPCSFGGVSVITPGTNTSNQVAVLYQGVNCTEVPVAIHADQLTPTWRVYSTGSNVFQTRAGCLIGAEHVNNSYECDIPIGAGICASYQTQTNSPRRARSVASQSIIAYTMSLGAENSVAYSNNSCAIPTNFTISVTTEILPVSMTKTSVDCTMYICGDSTECSNLLLQYGSFCTQLNRALTGIAVEQDKNTQEVFAQVKQIYKTPPIKDFGGFNFSQILPDPSKPSKRSFIEDLLFNKVTLADAGFIKQYGDCLGDIAARDLICAQKFNGLTVLPPLLTDEMIAQYTSALLAGTITSGWTFGAGAALQIPFAMQMAYRFNGIGVTQNVLYENQKLIANQFNSAIGKIQDSLSSTASALGKLQDVVNQNAQALNTLVKQLSSNFGAISSVLNDILSRLDKVEAEVQIDRLITGRLQSLQTYVTQQLIRAAEIRASANLAATKMSECVLGQSKRVDFCGKGYHLMSFPQSAPHGVVFLHVTYVPAQEKNFTCAPAICHDGKAHFPREGVFVSNGTHWFVTQRNFYEPQIITTDNTFVSGNCDVVIGIVNNTVYDPLQPELDSGGGGSDIIKLLNEQVNKEMQSSNLYMSMSSWCYTHSLDGAGLFLFDHAAEEYEHAKKLIIFLNENNVPVQLTSISAPEHKFEGLTQIFQKAYEHEQHISESINNIVDHAIKSKDHATFNFLQWYVAEQHEEEVLFKDILDKIELIGNENHGLYLADQYVKGIAKSRKS

SEQ ID NO: 9026 - protein, 1315 aa, Artificial Sequence
  SARS-CoV-2/Belgium/ULG-6939/2020__EPI_ISL_417020 spike protein (1-1147)(I712C_T1077C) Ferritin construct
MFVFLVLLPLVSSQCVNLTTRTQLPPAYTNSFTRGVYYPDKVFRSSVLHSTQDLFLPFFSNVTWFHAIHVSGTNGTKRFDNPVLPFNDGVYFASTEKSNIIRGWIFGTTLDSKTQSLLIVNNATNVVIKVCEFQFCNDPFLGVYYHKNNKSWMESEFRVYSSANNCTFEYVSQPFLMDLEGKQGNFKNLREFVFKNIDGYFKIYSKHTPINLVRDLPQGFSALEPLVDLPIGINITRFQTLLALHRSYLTPGDSSSGWTAGAAAYYVGYLQPRTFLLKYNENGTITDAVDCALDPLSETKCTLKSFTVEKGIYQTSNFRVQPTESIVRFPNITNLCPFGEVFNATRFASVYAWNRKRISNCVADYSVLYNSASFSTFKCYGVSPTKLNDLCFTNVYADSFVIRGDEVRQIAPGQTGKIADYNYKLPDDFTGCVIAWNSNNLDSKVGGNYNYLYRLFRKSNLKPFERDISTEIYQAGSTPCNGVEGFNCYFPLQSYGFQPTNGVGYQPYRVVVLSFELLHAPATVCGPKKSTNLVKNKCVNFNFNGLTGTGVLTESNKKFLPFQQFGRDIADTTDAVRDPQTLEILDITPCSFGGVSVITPGTNTSNQVAVLYQGVNCTEVPVAIHADQLTPTWRVYSTGSNVFQTRAGCLIGAEHVNNSYECDIPIGAGICASYQTQTNSPRRARSVASQSIIAYTMSLGAENSVVYSNNSCAIPTNFTISVTTEILPVSMTKTSVDCTMYICGDSTECSNLLLQYGSFCTQLNRALTGIAVEQDKNTQEVFAQVKQIYKTPPIKDFGGFNFSQILPDPSKPSKRSFIEDLLFNKVTLADAGFIKQYGDCLGDIAARDLICAQKFNGLTVLPPLLTDEMIAQYTSALLAGTITSGWTFGAGAALQIPFAMQMAYRFNGIGVTQNVLYENQKLIANQFNSAIGKIQDSLSSTASALGKLQDVVNQNAQALNTLVKQLSSNFGAISSVLNDILSRLDKVEAEVQIDRLITGRLQSLQTYVTQQLIRAAEIRASANLAATKMSECVLGQSKRVDFCGKGYHLMSFPQSAPHGVVFLHVTYVPAQEKNFTCAPAICHDGKAHFPREGVFVSNGTHWFVTQRNFYEPQIITTDNTFVSGNCDVVIGIVNNTVYDPLQPELDSGGGGSDIIKLLNEQVNKEMQSSNLYMSMSSWCYTHSLDGAGLFLFDHAAEEYEHAKKLIIFLNENNVPVQLTSISAPEHKFEGLTQIFQKAYEHEQHISESINNIVDHAIKSKDHATFNFLQWYVAEQHEEEVLFKDILDKIELIGNENHGLYLADQYVKGIAKSRKS

SEQ ID NO: 9027 - protein, 1315 aa, Artificial Sequence
  SARS-CoV-2/France/HF2496/2020__EPI_ISL_418231 spike protein (1-1147)(I712C_T1077C) Ferritin construct
MFVFLVLLPLVSSQCVNLTTRTQLPPAYTNSFTRGVYYPDKVFRSSVLHSTQDLFLPFFSNVTWFHAIHVSGTNGTKRFDNPVLPFNDGVYFASTEKSNIIRGWIFGTTLDSKTQSLLIVNNATNVVIKVCEFQFCNDPFLGVYYHKNNKSWMESEFRVYSSANNCTFEYVSQPFLMDLEGKQGNFKNLREFVFKNIDGYFKIYSKHTPINLVRDLPQGFSALEPLVDLPIGINITRFQTLLALHRSYLTPGDSSSGWTAGAAAYYVGYLQPRTFLLKYNENGTITDAVDCALDPLSETKCTLKSFTVEKGIYQTSNFRVQPTESIVRFPNITNLCPFGEVFNATRFASVYAWNRKRISNCVADYSVLYNSASFSTFKCYGVSPTKLNDLCFTNVYADSFVIRGDEVRQIAPGQTGKIADYNYKLPDDFTGCVIAWNSNNLDSKVGGNYNYLYRLFRKSNLKPFERDISTEIYQAGSTPCNGVEGFNCYFPLQSYGFQPTNGVGYQPYRVVVLSFELLHAPATVCGPKKSTNLVKNKCVNFNFNGLTGTGVLTESNKKFLPFQQFGRDIADTTDAVRDPQTLEILDITPCSFGGVSVITPGTNTSNQVAVLYQGVNCTEVPVAIHADQLTPTWRVYSTGSNVFQTRAGCLIGAEHVNNSYECDIPIGAGICASYQTQTNSPRRARSVASQSIIAYTMSLGAENSVAYSNNSCAIPTNFTISVTTEILPVSMTKTSVDCTMYICGDSTECSNLLLQYGSFCTQLNRALTGIAVEQDKNTQEVFAQVKQIYKTPPIKDFGGFNFSQILPDPSKPSKRSFIEDLLFNKVTLADAGFIKQYGDCLGDIVARDLICAQKFNGLTVLPPLLTDEMIAQYTSALLAGTITSGWTFGAGAALQIPFAMQMAYRFNGIGVTQNVLYENQKLIANQFNSAIGKIQDSLSSTASALGKLQDVVNQNAQALNTLVKQLSSNFGAISSVLNDILSRLDKVEAEVQIDRLITGRLQSLQTYVTQQLIRAAEIRASANLAATKMSECVLGQSKRVDFCGKGYHLMSFPQSAPHGVVFLHVTYVPAQEKNFTCAPAICHDGKAHFPREGVFVSNGTHWFVTQRNFYEPQIITTDNTFVSGNCDVVIGIVNNTVYDPLQPELDSGGGGSDIIKLLNEQVNKEMQSSNLYMSMSSWCYTHSLDGAGLFLFDHAAEEYEHAKKLIIFLNENNVPVQLTSISAPEHKFEGLTQIFQKAYEHEQHISESINNIVDHAIKSKDHATFNFLQWYVAEQHEEEVLFKDILDKIELIGNENHGLYLADQYVKGIAKSRKS

SEQ ID NO: 9028 - protein, 1315 aa, Artificial Sequence
  SARS-CoV-2/USA/WA-UW291/2020__EPI_ISL_418076 spike protein (1-1147)(I712C_T1077C) Ferritin construct
MFVFLVLLPLVSSQCVNLTTRTQLPPAYTNSFTRGVYYPDKVFRSSVLHSTQDLFLPFFSNVTWFHAIHVSGTNGTKRFDNPVLPFNDGVYFASTEKSNIIRGWIFGTTLDSKTQSLLIVNNATNVVIKVCEFQFCNDPFLGVYYHKNNKSWMESEFRVYSSANNCTFEYVSQPFLMDLEGKQGNFKNLREFVFKNIDGYFKIYSKHTPINLVRDLPQGFSALEPLVDLPIGINITRFQTLLALHRSYLTPGDSSSGWTAGAAAYYVGYLQPRTFLLKYNENGTITDAVDCALDPLSETKCTLKSFTVEKGIYQTSNFRVQPTESIVRFPNITNLCPFGEVFNATRFASVYAWNRKRISNCVADYSVLYNSASFSTFKCYGVSPTKLNDLCFTNVYADSFVIRGDEVRQIAPGQTGKIADYNYKLPDDFTGCVIAWNSNNLDSKVGGNYNYLYRLFRKSNLKPFERDISTEIYQAGSTPCNGVEGFNCYFPLQSYGFQPTNGVGYQPYRVVVLSFELLHAPATVCGPKKSTNLVKNKCVNFNFNGLTGTGVLTESNKKFLPFQQFGRDIADTTDAVRDPQTLEILDITPCSFGGVSVITPGTNTSNQVAVLYQGVNCTEVPVAIHADQLTPTWRVYSTGSNVFQTRAGCLIGAEHVNNSYECDIPIGAGICASYQTQTNSPRRARSVASQSIIAYTMSLGAENSVAYSNNSCAIPTNFTISVTTEILPVSMTKTSVDCTMYICGDSTECSNLLLQYGSFCTQLNRALTGIAVEQDKNTQEVFAQVKQIYKTPPIKDFGGFNFSQILPDPSKPSKRSFIEDLLFNKVTLADAGFIKQYGDCLGDIAARDLICAQKFNGLTVLPPLLTDEMIAQYTSALLAGTITSGWTFGAGAALQIPFAMQMAYRFNGIGVTQNVLYENQKLIANQFNSAIGKIQYSLSSTASALGKLQDVVNQNAQALNTLVKQLSSNFGAISSVLNDILSRLDKVEAEVQIDRLITGRLQSLQTYVTQQLIRAAEIRASANLAATKMSECVLGQSKRVDFCGKGYHLMSFPQSAPHGVVFLHVTYVPAQEKNFTCAPAICHDGKAHFPREGVFVSNGTHWFVTQRNFYEPQIITTDNTFVSGNCDVVIGIVNNTVYDPLQPELDSGGGGSDIIKLLNEQVNKEMQSSNLYMSMSSWCYTHSLDGAGLFLFDHAAEEYEHAKKLIIFLNENNVPVQLTSISAPEHKFEGLTQIFQKAYEHEQHISESINNIVDHAIKSKDHATFNFLQWYVAEQHEEEVLFKDILDKIELIGNENHGLYLADQYVKGIAKSRKS

SEQ ID NO: 9029 - protein, 1315 aa, Artificial Sequence; identical to SEQ ID NO: 8992
  SARS-CoV-2/Portugal/PT0034/2020__EPI_ISL_418019 spike protein (1-1147)(I712C_T1077C) Ferritin construct

SEQ ID NO: 9030 - protein, 1315 aa, Artificial Sequence; identical to SEQ ID NO: 8984
  SARS-CoV-2/Iceland/202/2020__EPI_ISL_417750 spike protein (1-1147)(I712C_T1077C) Ferritin construct

SEQ ID NO: 9031 - protein, 1315 aa, Artificial Sequence
  SARS-CoV-2/USA/WA-UW261/2020__EPI_ISL_418046 spike protein (1-1147)(I712C_T1077C) Ferritin construct
MFVFLVLLPLVSSQCVNLTTRTQLPPAYTNSFTRGVYYPDKVFRSSVLHSTQDLFLPFFSNVTWFHAIHVSGTNGTKRFDNPVLPFNDGVYFASTEKSNIIRGWIFGTTLDSKTQSLLIVNNATNVVIKVCEFQFCNDPFLGVYYHKNNKSWMESEFRVYSSANNCTFEYVSQPFLMDLEGKQGNFKNLREFVFKNIDGYFKIYSKHTPINLVRDLPQGFSALEPLVDLPIGINITRFQTLLALHRSYLTPGDSSSGWTAGAAAYYVGYLQPRTFLLKYNENGTITDAVDCALDPLSETKCTLKSFTVEKGIYQTSNFRVQPTESIVRFPNITNLCPFGEVFNATRFTSVYAWNRKRISNCVADYSVLYNSASFSTFKCYGVSPTKLNDLCFTNVYADSFVIRGDEVRQIAPGQTGKIADYNYKLPDDFTGCVIAWNSNNLDSKVGGNYNYLYRLFRKSNLKPFERDISTEIYQAGSTPCNGVEGFNCYFPLQSYGFQPTNGVGYQPYRVVVLSFELLHAPATVCGPKKSTNLVKNKCVNFNFNGLTGTGVLTESNKKFLPFQQFGRDIADTTDAVRDPQTLEILDITPCSFGGVSVITPGTNTSNQVAVLYQDVNCTEVPVAIHADQLTPTWRVYSTGSNVFQTRAGCLIGAEHVNNSYECDIPIGAGICASYQTQTNSPRRARSVASQSIIAYTMSLGAENSVAYSNNSCAIPTNFTISVTTEILPVSMTKTSVDCTMYICGDSTECSNLLLQYGSFCTQLNRALTGIAVEQDKNTQEVFAQVKQIYKTPPIKDFGGFNFSQILPDPSKPSKRSFIEDLLFNKVTLADAGFIKQYGDCLGDIAARDLICAQKFNGLTVLPPLLTDEMIAQYTSALLAGTITSGWTFGAGAALQIPFAMQMAYRFNGIGVTQNVLYENQKLIANQFNSAIGKIQDSLSSTASALGKLQDVVNQNAQALNTLVKQLSSNFGAISSVLNDILSRLDKVEAEVQIDRLITGRLQSLQTYVTQQLIRAAEIRASANLAATKMSECVLGQSKRVDFCGKGYHLMSFPQSAPHGVVFLHVTYVPAQEKNFTCAPAICHDGKAHFPREGVFVSNGTHWFVTQRNFYEPQIITTDNTFVSGNCDVVIGIVNNTVYDPLQPELDSGGGGSDIIKLLNEQVNKEMQSSNLYMSMSSWCYTHSLDGAGLFLFDHAAEEYEHAKKLIIFLNENNVPVQLTSISAPEHKFEGLTQIFQKAYEHEQHISESINNIVDHAIKSKDHATFNFLQWYVAEQHEEEVLFKDILDKIELIGNENHGLYLADQYVKGIAKSRKS

SEQ ID NO: 9032 - protein, 1315 aa, Artificial Sequence
  SARS-CoV-2/Portugal/PT0035/2020__EPI_ISL_418020 spike protein (1-1147)(I712C_T1077C) Ferritin construct
MFVFLVLLPLVSSQCVNLTTRTQLPPAYTNSFTRGVYYPDKVFRSSVLHSTQDLFLPFFSNVTWFHAIHVSGTNGTKRFDNPVLPFNDGVYFASTEKSNIIRGWIFGTTLDSKTQSLLIVNNATNVVIKVCEFQFCNDPFLGVYYHKNNKSWMESEFRVYSSANNCTFEYVSQPFLMDLEGKQGNFKNLREFVFKNIDGYFKIYSKHTPINLVRDLPQGFSALEPLVDLPIGINITRFQTLLALHRSYLTPGDSSSGWTAGAAAYYVGYLQPRTFLLKYNENGTITDAVDCALDPLSETKCTLKSFTVEKGIYQTSNFRVQPTESIVRFPNITNLCPFGEVFNATRFASVYAWNRKRISNCVADYSVLYNSASFSTFKCYGVSPTKLNDLCFTNVYADSFVIRGDEVRQIAPGQTGKIADYNYKLPDDFTGCVIAWNSNNLDSKVGGNYNYLYRLFRKSNLKPFERDISTEIYQAGSTPCNGVEGFNCYFPLQSYGFQPTNGVGYQPYRVVVLSFELLHAPATVCGPKKSTNLVKNKCVNFNFNGLTGTGVLTESNKKFLPFQQFGRDIADTTDAVRDPQTLEILDITPCSFGGVSVITPGTNTSNQVAVLYQDVNCTEVPVAIHADQLTPTWRVYSTGSNVFQTRAGCLIGAEHVNNSYECDIPIGAGICASYQTQTNSPRRARSVASQSIIAYTMSLGAENSVAYSNNSCAIPTNFTISVTTEILPVSMTKTSVDCTMYICGDSTECSNLLLQYGSFCTQLNRALTGIAVEQDKNTQEVFAQVKQIYKTPPIKDFGGFNFSQILPDPSKPSKRSFIEDLLFNKVTLADAGFIKQYGDCLGDISARDLICAQKFNGLTVLPPLLTDEMIAQYTSALLAGTITSGWTFGAGAALQIPFAMQMAYRFNGIGVTQNVLYENQKLIANQFNSAIGKIQDSLSSTASALGKLQDVVNQNAQALNTLVKQLSSNFGAISSVLNDILSRLDKVEAEVQIDRLITGRLQSLQTYVTQQLIRAAEIRASANLAATKMSECVLGQSKRVDFCGKGYHLMSFPQSAPHGVVFLHVTYVPAQEKNFTCAPAICHDGKAHFPREGVFVSNGTHWFVTQRNFYEPQIITTDNTFVSGNCDVVIGIVNNTVYDPLQPELDSGGGGSDIIKLLNEQVNKEMQSSNLYMSMSSWCYTHSLDGAGLFLFDHAAEEYEHAKKLIIFLNENNVPVQLTSISAPEHKFEGLTQIFQKAYEHEQHISESINNIVDHAIKSKDHATFNFLQWYVAEQHEEEVLFKDILDKIELIGNENHGLYLADQYVKGIAKSRKS

SEQ ID NO: 9033 - protein, 1315 aa, Artificial Sequence
  SARS-CoV-2/USA/NY-NYUMC7/2020__EPI_ISL_418192 spike protein (1-1147)(I712C_T1077C) Ferritin construct
MFVFLVLLPLVSSQCVNLTTRTQLPPAYTNSFTRGVYYPDKVFRSSVLHSTQDLFLPFFSNVTWFHAIHVSGTNGTKRFDNPVLPFNDGVYFASTEKSNIIRGWIFGTTLDSKTQSLLIVNNATNVVIKVCEFQFCNDPFLGVYHHKNNKSWMESEFRVYSSANNCTFEYVSQPFLMDLEGKQGNFKNLREFVFKNIDGYFKIYSKHTPINLVRDLPQGFSALEPLVDLPIGINITRFQTLLALHRSYLTPGDSSSGWTAGAAAYYVGYLQPRTFLLKYNENGTITDAVDCALDPLSETKCTLKSFTVEKGIYQTSNFRVQPTESIVRFPNITNLCPFGEVFNATRFASVYAWNRKRISNCVADYSVLYNSASFSTFKCYGVSPTKLNDLCFTNVYADSFVIRGDEVRQIAPGQTGKIADYNYKLPDDFTGCVIAWNSNNLDSKVGGNYNYLYRLFRKSNLKPFERDISTEIYQAGSTPCNGVEGFNCYFPLQSYGFQPTNGVGYQPYRVVVLSFELLHAPATVCGPKKSTNLVKNKCVNFNFNGLTGTGVLTESNKKFLPFQQFGRDIADTTDAVRDPQTLEILDITPCSFGGVSVITPGTNTSNQVAVLYQGVNCTEVPVAIHADQLTPTWRVYSTGSNVFQTRAGCLIGAEHVNNSYECDIPIGAGICASYQTQTNSPRRARSVASQSIIAYTMSLGAENSVAYSNNSCAIPTNFTISVTTEILPVSMTKTSVDCTMYICGDSTECSNLLLQYGSFCTQLNRALTGIAVEQDKNTQEVFAQVKQIYKTPPIKDFGGFNFSQILPDPSKPSKRSFIEDLLFNKVTLADAGFIKQYGDCLGDIAARDLICAQKFNGLTVLPPLLTDEMIAQYTSALLAGTITSGWTFGAGAALQIPFAMQMAYRFNGIGVTQNVLYENQKLIANQFNSAIGKIQDSLSSTASALGKLQDVVNQNAQALNTLVKQLSSNFGAISSVLNDILSRLDKVEAEVQIDRLITGRLQSLQTYVTQQLIRAAEIRASANLAATKMSECVLGQSKRVDFCGKGYHLMSFPQSAPHGVVFLHVTYVPAQEKNFTCAPAICHDGKAHFPREGVFVSNGTHWFVTQRNFYEPQIITTDNTFVSGNCDVVIGIVNNTVYDPLQPELDSGGGGSDIIKLLNEQVNKEMQSSNLYMSMSSWCYTHSLDGAGLFLFDHAAEEYEHAKKLIIFLNENNVPVQLTSISAPEHKFEGLTQIFQKAYEHEQHISESINNIVDHAIKSKDHATFNFLQWYVAEQHEEEVLFKDILDKIELIGNENHGLYLADQYVKGIAKSRKS

SEQ ID NO: 9034 - protein, 1315 aa, Artificial Sequence
  SARS-CoV-2/Iceland/189/2020__EPI_ISL_417709 spike protein (1-1147)(I712C_T1077C) Ferritin construct
MFVFLVLLPLVSSQCVNLTTRTQLPPAYTNSFTRGVYYPDKVFRSSVLHSTQDLFLPFFSNVTWFHAIHVSGTNGTKRFDNPVLPFNDGVYFASTEKSNIIRGWIFGTTLDSKTQSLLIVNNATNVVIKVCEFQFCNDPFLGVYYHKNNKSWMESEFRVYSSANNCTFEYVSQPFLMDLEGKQGNFKNLREFVFKNIDGYFKIYSKHTPINLVRDLPQGFSALEPLVDLPIGINITRFQTLLALHRSYLTPGDSSSGWTAGAAAYYVGYLQPRTFLLKYNENGTITDAVDCALDPLSETKCTLKSFTVEKGIYQTSNFRVQPTESIVRFPNITNLCPFGEVFNATRFASVYAWNRKRISNCVADYSVLYNSASFSTFKCYGVSPTKLNDLCFTNVYADSFVIRGDEVRQIAPGQTGKIADYNYKLPDDFTGCVIAWNSNNLDSKVGGNYNYLYRLFRKSNLKPFERDISTEIYQAGSTPCNGVEGFNCYFPLQSYGFQPTNGVGYQPYRVVVLSFELLHAPATVCGPKKSTNLVKNKCVNFNFNGLTGTGVLTESNKKFLPFQQFGRDIADTTDAVRDPQTLEILDITPCSFGGVSVITPGTNTSNQVAVLYQGVNCTEVPVAIHADQLTPTWRVYSTGSNVFQTRAGCLIGAEHVNNSYECDIPIGAGICASYQTQTNSPRRARSVASQSIIAYTMSLGAENSVAYSNNSCAIPTNFTISVTTEILPVSMTKTSVDCTMYICGDSTECSNLLLQYGSFCTQLNRALTGIAVEQDKNTQEVFAQVKQIYKTPPIKDFGGFNFSQILPDPSKPSKRSFIEDLLFNKVTLADAGFTKQYGDCLGDIAARDLICAQKFNGLTVLPPLLTDEMIAQYTSALLAGTITSGWTFGAGAALQIPFAMQMAYRFNGIGVTQNVLYENQKLIANQFNSAIGKIQDSLSSTASALGKLQDVVNQNAQALNTLVKQLSSNFGAISSVLNDILSRLDKVEAEVQIDRLITGRLQSLQTYVTQQLIRAAEIRASANLAATKMSECVLGQSKRVDFCGKGYHLMSFPQSAPHGVVFLHVTYVPAQEKNFTCAPAICHDGKAHFPREGVFVSNGTHWFVTQRNFYEPQIITTDNTFVSGNCDVVIGIVNNTVYDPLQPELDSGGGGSDIIKLLNEQVNKEMQSSNLYMSMSSWCYTHSLDGAGLFLFDHAAEEYEHAKKLIIFLNENNVPVQLTSISAPEHKFEGLTQIFQKAYEHEQHISESINNIVDHAIKSKDHATFNFLQWYVAEQHEEEVLFKDILDKIELIGNENHGLYLADQYVKGIAKSRKS

SEQ ID NO: 9035 - protein, 1315 aa, Artificial Sequence
  SARS-CoV-2/Australia/NSW56/2020__EPI_ISL_417408 spike protein (1-1147)(I712C_T1077C) Ferritin construct
MFVFLVLLPLVSSQCVNLTTRTQLPPAYTNSFTRGVYYPDKVFRSSVLHSTQDLFLPFFSNVTWFHAIHVSGTNGTKRFDNPVLPFNDGVYFASTEKSNIIRGWIFGTTLDSKTQSLLIVNNATNVVIKVCEFQFCNDPFLGVYYHKNNKSWMESEFRVYSSANNCTFEYVSQPFLMDLEGKQGNFKNLREFVFKNIDGYFKIYSKHTPINLVRDLPQGFSALEPLVDLPIGINITRFQTLLALHRSYLTPGDSSSGWTAGAAAYYVGYLQPRTFLLKYNENGTITDAVDCALDPLSETKCTLKSFTVEKGIYQTSNFRVQPTESIVRFPNITNLCPFGEVFNATRFASVYAWNRKRISNCVADYSVLYNSASFSTFKCYGVSPTKLNDLCFTNVYADSFVIRGDEVRQIAPGQTGKIADYNYKLPDDFTGCVIAWNSNNLDSKVGGNYNYLYRLFRKSNLKPFERDISTEIYQAGSTPCNGVEGFNCYFPLQSYGFQPTNGVGYQPYRVVVLSFELLHAPATVCGPKKSTNLVKNKCVNFNFNGLTGTGVLTESNKKFLPFQQFGRDIADTTDAVRDPQTLEILDITPCSFGGVSVITPGTNTSNQVAVLYQDVNCTEVPVAIHADQLTPTWRVYSTGSNVFQTRAGCLIGAEHVNNSYECDIPIGAGICASYQTQTNSPRRARSVASQSIIAYTMSLGAENSVAYSNNSCAIPTNFTISVTTEILPVSMTKTSVDCTMYICGDSTECSNLLLQYGSFCTQLNRALTGIAVEQDKNTQEVFAQVKQIYKTPPIKDFGGFNFSQILPDSSKPSKRSFIEDLLFNKVTLADAGFIKQYGDCLGDIAARDLICAQKFNGLTVLPPLLTDEMIAQYTSALLAGTITSGWTFGAGAALQIPFAMQMAYRFNGIGVTQNVLYENQKLIANQFNSAIGKIQDSLSSTASALGKLQDVVNQNAQALNTLVKQLSSNFGAISSVLNDILSRLDKVEAEVQIDRLITGRLQSLQTYVTQQLIRAAEIRASANLAATKMSECVLGQSKRVDFCGKGYHLMSFPQSAPHGVVFLHVTYVPAQEKNFTCAPAICHDGKAHFPREGVFVSNGTHWFVTQRNFYEPQIITTDNTFVSGNCDVVIGIVNNTVYDPLQPELDSGGGGSDIIKLLNEQVNKEMQSSNLYMSMSSWCYTHSLDGAGLFLFDHAAEEYEHAKKLIIFLNENNVPVQLTSISAPEHKFEGLTQIFQKAYEHEQHISESINNIVDHAIKSKDHATFNFLQWYVAEQHEEEVLFKDILDKIELIGNENHGLYLADQYVKGIAKSRKS

SEQ ID NO: 9036 - protein, 1315 aa, Artificial Sequence
  SARS-CoV-2/Iceland/280/2020__EPI_ISL_417608 spike protein (1-1147)(I712C_T1077C) Ferritin construct
MFVFLVLLPLVSSQCVNLTTRTQLPPAYTNSFTRGVYYPDKVFRSSVLHSTQDLFLPFFSNVTWFHAIHVSGTNGTKRFDNPVLPFNDGVYFASTEKSNIIRGWIFGTTLDSKTQSLLIVNNATNVVIKVCEFQFCNDPFLGVYYHKNNKSWMESEFRVYSSANNCTFEYVSQPFLMDLEGKQGNFKNLREFVFKNIDGYFKIYSKHTPINLVRDLPQGFSALEPLVDLPIGINITRFQTLLALHRSYLTPGDSSSGWTAGAAAYYVGYLQPRTFLLKYNENGTITDAVDCALDPLSETKCTLKSFTVEKGIYQTSNFRVQPTESIVRFPNITNLCPFGEVFNATRFASVYAWNRKRISNCVADYSVLYNSASFSTFKCYGVSPTKLNDLCFTNVYADSFVIRGDEVRQIAPGQTGKIADYNYKLPDDFTGCVIAWNSNNLDSKVGGNYNYLYRLFRKSNLKPFERDISTEIYQAGSTPCNGVEGFNCYFPLQSYGFQPTNGVGYQPYRVVVLSFELLHAPATVCGPKKSTNLVKNKCVNFNFNGLTGTGVLTESNKKFLPFQQFGRDIADTTDAVRDPQTLEILDITPCSFGGVSVITPGTNTSNQVAVLYQGVNCTEVPVAIHADQLTPTWRVYSTGSNVFQTRAGCLIGAEHVNNSYECDIPIGAGICASYHTQTNSPRRARSVASQSIIAYTMSLGAENSVAYSNNSCAIPTNFTISVTTEILPVSMTKTSVDCTMYICGDSTECSNLLLQYGSFCTQLNRALTGIAVEQDKNTQEVFAQVKQIYKTPPIKDFGGFNFSQILPDPSKPSKRSFIEDLLFNKVTLADAGFIKQYGDCLGDIAARDLICAQKFNGLTVLPPLLTDEMIAQYTSALLAGTITSGWTFGAGAALQIPFAMQMAYRFNGIGVTQNVLYENQKLIANQFNSAIGKIQDSLSSTASALGKLQDVVNQNAQALNTLVKQLSSNFGAISSVLNDILSRLDKVEAEVQIDRLITGRLQSLQTYVTQQLIRAAEIRASANLAATKMSECVLGQSKRVDFCGKGYHLMSFPQSAPHGVVFLHVTYVPAQEKNFTCAPAICHDGKAHFPREGVFVSNGTHWFVTQRNFYEPQIITTDNTFVSGNCDVVIGIVNNTVYDPLQPELDSGGGGSDIIKLLNEQVNKEMQSSNLYMSMSSWCYTHSLDGAGLFLFDHAAEEYEHAKKLIIFLNENNVPVQLTSISAPEHKFEGLTQIFQKAYEHEQHISESINNIVDHAIKSKDHATFNFLQWYVAEQHEEEVLFKDILDKIELIGNENHGLYLADQYVKGIAKSRKS

SEQ ID NO: 9037 - protein, 1315 aa, Artificial Sequence; identical to SEQ ID NO: 8992
  SARS-CoV-2/Iceland/247/2020__EPI_ISL_417575 spike protein (1-1147)(I712C_T1077C) Ferritin construct

SEQ ID NO: 9038 - protein, 1315 aa, Artificial Sequence
  SARS-CoV-2/Iceland/238/2020__EPI_ISL_417566 spike protein (1-1147)(I712C_T1077C) Ferritin construct
MFVFLVLLPLVSSQCVNLTTRTQLPPAYTNSFTRGVYYPDKVFRSSVLHSTQDLFLPFFSNVTWFHAIHVSGTNGTKRFDNPVLPFNDGVYFASTEKSNIIRGWIFGTTLDSKTQSLLIVNNATNVVIKVCEFQFCNDPFLGVYYHKNNKSWMESEFRVYSSANNCTFEYVSQPFLMDLEGKQGNFKNLREFVFKNIDGYFKIYSKHTPINLVRDLPQGFSALEPLVDLPIGINITRFQTLLALHRSYLTPGDSSSGWTAGAAAYYVGYLQPRTFLLKYNENGTITDAVDCALDPLSETKCTLKSFTVEKGIYQTSNFRVQPTESIVRFPNITNLCPFGEVFNATRFASVYAWNRKRISNCVADYSVLYNSASFSTFKCYGVSPTKLNDLCFTNVYADSFVIRGDEVRQIAPGQTGKIADYNYKLPDDFTGCVIAWNSNNLDSKVGGNYNYLYRLFRKSNLKPFERDISTEIYQAGSTPCNGVEGFNCYFPLQSYGFQPTNGVGYQPYRVVVLSFELLHAPATVCGPKKSTNLVKNKCVNFNFNGLTGTGVLTESNKKFLPFQQFGRDIADTTDAVRDPQTLEILDITPCSFGGVSVITPGTNTSNQVAVLYQGVNCTEVPVAIHADQLTPTWRVYSTGSNVFQTRAGCLIGAEHVNNSYECDIPIGAGICASYQTQTNSPRRARSVASQSIIAYTMSLGAENSVAYSNNSCAIPTNFTISVTTEILPVSMTKTSVDCTMYICGDSTECSNLLLQYGSFCTQLNRALTGIAVEQDKNTQEVFAQVKQIYKTPPIKDFGGFNFSQILPDPSKPSKRSFIEDLLFNKVTLADVGFIKQYGDCLGDIAARDLICAQKFNGLTVLPPLLTDEMIAQYTSALLAGTITSGWTFGAGAALQIPFAMQMAYRFNGIGVTQNVLYENQKLIANQFNSAIGKIQDSLSSTASALGKLQDVVNQNAQALNTLVKQLSSNFGAISSVLNDILSRLDKVEAEVQIDRLITGRLQSLQTYVTQQLIRAAEIRASANLAATKMSECVLGQSKRVDFCGKGYHLMSFPQSAPHGVVFLHVTYVPAQEKNFTCAPAICHDGKAHFPREGVFVSNGTHWFVTQRNFYEPQIITTDNTFVSGNCDVVIGIVNNTVYDPLQPELDSGGGGSDIIKLLNEQVNKEMQSSNLYMSMSSWCYTHSLDGAGLFLFDHAAEEYEHAKKLIIFLNENNVPVQLTSISAPEHKFEGLTQIFQKAYEHEQHISESINNIVDHAIKSKDHATFNFLQWYVAEQHEEEVLFKDILDKIELIGNENHGLYLADQYVKGIAKSRKS

SEQ ID NO: 9039 - protein, 1315 aa, Artificial Sequence
  SARS-CoV-2/Greece/16/2020__EPI_ISL_418265 spike protein (1-1147)(I712C_T1077C) Ferritin construct
MFVFLVLLPLVSSQCVNLTTRTQLPPAYTNSFTRGVYYPDKVFRSSVLHSTQDLFLPFFSNVTWFHAIHVSGTNGTKRFDNPVLPFNDGVYFASTEKSNIIRGWIFGTTLDSKTQSLLIVNNATNVVIKVCEFQFCNDPFLGVYYHKNNKSWMESEFRVYSSANNCTFEYVSQPFLMDLEGKQGNFKNLREFVFKNVDGYFKIYSKHTPINLVRDLPQGFSALEPLVDLPIGINITRFQTLLALHRSYLTPGDSSSGWTAGAAAYYVGYLQPRTFLLKYNENGTITDAVDCALDPLSETKCTLKSFTVEKGIYQTSNFRVQPTESIVRFPNITNLCPFGEVFNATRFASVYAWNRKRISNCVADYSVLYNSASFSTFKCYGVSPTKLNDLCFTNVYADSFVIRGDEVRQIAPGQTGKIADYNYKLPDDFTGCVIAWNSNNLDSKVGGNYNYLYRLFRKSNLKPFERDISTEIYQAGSTPCNGVEGFNCYFPLQSYGFQPTNGVGYQPYRVVVLSFELLHAPATVCGPKKSTNLVKNKCVNFNFNGLTGTGVLTESNKKFLPFQQFGRDIADTTDAVRDPQTLEILDITPCSFGGVSVITPGTNTSNQVAVLYQDVNCTEVPVAIHADQLTPTWRVYSTGSNVFQTRAGCLIGAEHVNNSYECDIPIGAGICASYQTQTNSPRRARSVASQSIIAYTMSLGAENSVAYSNNSCAIPTNFTISVTTEILPVSMTKTSVDCTMYICGDSTECSNLLLQYGSFCTQLNRALTGIAVEQDKNTQEVFAQVKQIYKTPPIKDFGGFNFSQILPDPSKPSKRSFIEDLLFNKVTLADAGFIKQYGDCLGDIAARDLICAQKFNGLTVLPPLLTDEMIAQYTSALLAGTITSGWTFGAGAALQIPFAMQMAYRFNGIGVTQNVLYENQKLIANQFNSAIGKIQDSLSSTASALGKLQDVVNQNAQALNTLVKQLSSNFGAISSVLNDILSRLDKVEAEVQIDRLITGRLQSLQTYVTQQLIRAAEIRASANLAATKMSECVLGQSKRVDFCGKGYHLMSFPQSAPHGVVFLHVTYVPAQEKNFTCAPAICHDGKAHFPREGVFVSNGTHWFVTQRNFYEPQIITTDNTFVSGNCDVVIGIVNNTVYDPLQPELDSGGGGSDIIKLLNEQVNKEMQSSNLYMSMSSWCYTHSLDGAGLFLFDHAAEEYEHAKKLIIFLNENNVPVQLTSISAPEHKFEGLTQIFQKAYEHEQHISESINNIVDHAIKSKDHATFNFLQWYVAEQHEEEVLFKDILDKIELIGNENHGLYLADQYVKGIAKSRKS

SEQ ID NO: 9040 - protein, 1315 aa, Artificial Sequence
  SARS-CoV-2/Iceland/319/2020__EPI_ISL_417648 spike protein (1-1147)(I712C_T1077C) Ferritin construct
MFVFLVLLPLVSSQCVNLTTRTQLPPAYTNSFTRGVYYPDKVFRSSVLHSTQDLFLPFFSNVTWFHAIHVSGTNGTKRFDNPVLPFNDGVYFASTEKSNIIRGWIFGTTLDSKTQSLLIVNNATNVVIKVCEFQFCNDPFLGVYYHKNNKSWMESEFRVYSSANNCTFEYVSQPFLIDLEGKQGNFKNLREFVFKNIDGYFKIYSKHTPINLVRDLPQGFSALEPLVDLPIGINITRFQTLLALHRSYLTPGDSSSGWTAGAAAYYVGYLQPRTFLLKYNENGTITDAVDCALDPLSETKCTLKSFTVEKGIYQTSNFRVQPTESIVRFPNITNLCPFGEVFNATRFASVYAWNRKRISNCVADYSVLYNSASFSTFKCYGVSPTKLNDLCFTNVYADSFVIRGDEVRQIAPGQTGKIADYNYKLPDDFTGCVIAWNSNNLDSKVGGNYNYLYRLFRKSNLKPFERDISTEIYQAGSTPCNGVEGFNCYFPLQSYGFQPTNGVGYQPYRVVVLSFELLHAPATVCGPKKSTNLVKNKCVNFNFNGLTGTGVLTESNKKFLPFQQFGRDIADTTDAVRDPQTLEILDITPCSFGGVSVITPGTNTSNQVAVLYQGVNCTEVPVAIHADQLTPTWRVYSTGSNVFQTRAGCLIGAEHVNNSYECDIPIGAGICASYQTQTNSPRRARSVASQSIIAYTMSLGAENSVAYSNNSCAIPTNFTISVTTEILPVSMTKTSVDCTMYICGDSTECSNLLLQYGSFCTQLNRALTGIAVEQDKNTQEVFAQVKQIYKTPPIKDFGGFNFSQILPDPSKPSKRSFIEDLLFNKVTLADAGFIKQYGDCLGDIAARDLICAQKFNGLTVLPPLLTDEMIAQYTSALLAGTITSGWTFGAGAALQIPFAMQMAYRFNGIGVTQNVLYENQKLIANQFNSAIGKIQDSLSSTASALGKLQDVVNQNAQALNTLVKQLSSNFGAISSVLNDILSRLDKVEAEVQIDRLITGRLQSLQTYVTQQLIRAAEIRASANLAATKMSECVLGQSKRVDFCGKGYHLMSFPQSAPHGVVFLHVTYVPAQEKNFTCAPAICHDGKAHFPREGVFVSNGTHWFVTQRNFYEPQIITTDNTFVSGNCDVVIGIVNNTVYDPLQPELDSGGGGSDIIKLLNEQVNKEMQSSNLYMSMSSWCYTHSLDGAGLFLFDHAAEEYEHAKKLIIFLNENNVPVQLTSISAPEHKFEGLTQIFQKAYEHEQHISESINNIVDHAIKSKDHATFNFLQWYVAEQHEEEVLFKDILDKIELIGNENHGLYLADQYVKGIAKSRKS

SEQ ID NO: 9041 - protein, 1315 aa, Artificial Sequence
  SARS-CoV-2/Congo/94/2020__EPI_ISL_417947 spike protein (1-1147)(I712C_T1077C) Ferritin construct
MFVFLVLLPLVSSQCVNLTTRTQLPPAYTNSFTRGVYYPDKVFRSSVLHSTQDLFLPFFSNVTWFHAIHVSGTNGTKRFDNPVLPFNDGVYFASTEKSNIIRGWIFGTTLDSKTQSLLIVNNATNVVIKVCEFQFCNDPFLGVYYHKNNKSWMESEFRVYSSANNCTFEYVSQPFLMDLEGKQGNFKNLREFVFKNIDGYFKIYSKHTPINLVRDLPQGFSALEPLVDLPIGINITRFQTLLALHRSYLTPGDSSSGWTAGAAAYYVGYLQPRTFLLKYNENGTITDAVDCALDPLSETKCTLKSFTVEKGIYQTSNFRVQPTESIVRFPNITNLCPFGEVFNATRFASVYAWNRKRISNCVADYSVLYNSASFSTFKCYGVSPTKLNDLCFTNVYADSFVIRGDEVRQIAPGQTGKIADYNYKLPDDFTGCVIAWNSNNLDSKVGGNYNYLYRLFRKSNLKPFERDISTEIYQAGSTPCNGVEGFNCYFPLQSYGFQPTNGVGYQPYRVVVLSFELLHAPATVCGPKKSTNLVKNKCVNFNFNGLTGTGVLTESNKKFLPFQQFGRDIADTTDAVRDPQTLEILDITPCSFGGVSVITPGTNTSNQVAVLYQGVNCTEVPVAIHADQLTPTWRVYSTGSNVFQTRAGCLIGAEHVNNSYECDIPIGAGICASYQTQTNSPRRARSVASQSIIAYTMSLGAENSVAYSNNSCAIPTNFTISVTTEILPVSMTKTSVDCTMYICGDSTECSNLLLQYGSFCTQLNRALTGIAVEQDKNTQEVFAQVKQIYKTPPIKDFGGFNFSQILPDPSKPSKRSFIEDILFNKVTLADAGFIKQYGDCLGDIAARDLICAQKFNGLTVLPPLLTDEMIAQYTSALLAGTITSGWTFGAGAALQIPFAMQMAYRFNGIGVTQNVLYENQKLIANQFNSAIGKIQDSLSSTASALGKLQDVVNQNAQALNTLVKQLSSNFGAISSVLNDILSRLDKVEAEVQIDRLITGRLQSLQTYVTQQLIRAAEIRASANLAATKMSECVLGQSKRVDFCGKGYHLMSFPQSAPHGVVFLHVTYVPAQEKNFTCAPAICHDGKAHFPREGVFVSNGTHWFVTQRNFYEPQIITTDNTFVSGNCDVVIGIVNNTVYDPLQPELDSGGGGSDIIKLLNEQVNKEMQSSNLYMSMSSWCYTHSLDGAGLFLFDHAAEEYEHAKKLIIFLNENNVPVQLTSISAPEHKFEGLTQIFQKAYEHEQHISESINNIVDHAIKSKDHATFNFLQWYVAEQHEEEVLFKDILDKIELIGNENHGLYLADQYVKGIAKSRKS

SEQ ID NO: 9042 - protein, 1315 aa, Artificial Sequence
  SARS-CoV-2/Congo/158/2020__EPI_ISL_417950 spike protein (1-1147)(I712C_T1077C) Ferritin construct
MFVFLVLLPLVSSQCVNLTTRTQLPPAYTNSFTRGVYYPDKVFRSSVLHSTQDLFLPFFSNVTWFHAIHVSGTNGTKRFDNPVLPFNDGVYFASTEKSNIIRGWIFGTTLDSKTQSLLIVNNATNVVIKVCEFQFCNDPFLGVYYHKNNKSWMESEFRVYSSANNCTFEYVSQPFLMDLEGKQGNFKNLREFVFKNIDGYFKIYSKHTPINLVRDLPQGFSALEPLVDLPIGINITRFQTLLALHRSYLTPGDSSSGWTAGAAAYYVGYLQPRTFLLKYNENGTITDAVDCALDPLSETKCTLKSFTVEKGIYQTSNFRVQPTESIVRFPNITNLCPFGEVFNATRFASVYAWNRKRISNCVADYSVLYNSASFSTFKCYGVSPTKLNDLCFTNVYADSFVIRGDEVRQIAPGQTGKIADYNYKLPDDFTGCVIAWNSNNLDSKVGGNYNYLYRLFRKSNLKPFERDISTEIYQAGSTPCNGVEGFNCYFPLQSYGFQPTNGVGYQPYRVVVLSFELLHAPATVCGPKKSTNLVKNKCVNFNFNGLTGTGVLTESNKKFLPFQQFGRDIADTTDAVRDPQTLEILDITPCSFGGVSVITPGTNTSNQVAVLYQDVNCTEVPVAIHADQLTPTWRVYSTGSNVFQTRAGCLIGAEHVNNSYECDIPIGAGICASYQTQTNSPRRARSVASQSIIAYTMSLGAENSVAYSNNSCAIPTNFTISVTTEILPVSMTKTSVDCTMYICGDSTECSNLLLQYGSFCTQLNRALTGIAVEQDKNTQEVFAQVKQIYKTPPIKDFGGFNFSQILPDPSKPSKRSFIEDLLFNKVTLADAGFIKQYGDCLGDIAARDLICAQKFNGLTVLPPLLTDEMIAQYTSALLAGTITSGWTFGAGAALQIPFAMQMAYRFNGIGVTQNVLYENQKLIANQFNSAIGKIQDSLSSTASALGKLQDVVNQNAQALNTLVKQLSSNFGAISSVLNDILSRLDKVEAEVQIDRLITGRLQSLQTYVTQQLIRAAEIRASANLAATKMSECVLGQSKRVDFCGKGYHLMSFPQSAPHGVVFLHVTYVPAQEKNFTCAPAICHDGKAHFPREGVFVSNGTHWFVTQRNFYEPQIITTDNTFLSGNCDVVIGIVNNTVYDPLQPELDSGGGGSDIIKLLNEQVNKEMQSSNLYMSMSSWCYTHSLDGAGLFLFDHAAEEYEHAKKLIIFLNENNVPVQLTSISAPEHKFEGLTQIFQKAYEHEQHISESINNIVDHAIKSKDHATFNFLQWYVAEQHEEEVLFKDILDKIELIGNENHGLYLADQYVKGIAKSRKS

SEQ ID NO: 9043 - protein, 1315 aa, Artificial Sequence
  SARS-CoV-2/USA/UT-00034/2020__EPI_ISL_417977 spike protein (1-1147)(I712C_T1077C) Ferritin construct
MFVFLVLLPLVSSQCVNLTTRTQLPPAYTNSFTRGVYYPDKVFRSSVLHSTQDLFLPFFSNVTWFHAIHVSGTNGTKRFDNPVLPFNDGVYFASTEKSNIIRGWIFGTTLDSKTQSLLIVNNATNVVIKVCEFQFCNDPFLGVYYYKNNKSWMESEFRVYSSANNCTFEYVSQPFLMDLEGKQGNFKNLREFVFKNIDGYFKIYSKHTPINLVRDLPQGFSALEPLVDLPIGINITRFQTLLALHRSYLTPGDSSSGWTAGAAAYYVGYLQPRTFLLKYNENGTITDAVDCALDPLSETKCTLKSFTVEKGIYQTSNFRVQPTESIVRFPNITNLCPFGEVFNATRFASVYAWNRKRISNCVADYSVLYNSASFSTFKCYGVSPTKLNDLCFTNVYADSFVIRGDEVRQIAPGQTGKIADYNYKLPDDFTGCVIAWNSNNLDSKVGGNYNYLYRLFRKSNLKPFERDISTEIYQAGSTPCNGVEGFNCYFPLQSYGFQPTNGVGYQPYRVVVLSFELLHAPATVCGPKKSTNLVKNKCVNFNFNGLTGTGVLTESNKKFLPFQQFGRDIADTTDAVRDPQTLEILDITPCSFGGVSVITPGTNTSNQVAVLYQGVNCTEVPVAIHADQLTPTWRVYSTGSNVFQTRAGCLIGAEHVNNSYECDIPIGAGICASYQTQTNSPRRARSVASQSIIAYTMSLGAENSVAYSNNSCAIPTNFTISVTTEILPVSMTKTSVDCTMYICGDSTECSNLLLQYGSFCTQLNRALTGIAVEQDKNTQEVFAQVKQIYKTPPIKDFGGFNFSQILPDPSKPSKRSFIEDLLFNKVTLADAGFIKQYGDCLGDIAARDLICAQKFNGLTVLPPLLTDEMIAQYTSALLAGTITSGWTFGAGAALQIPFAMQMAYRFNGIGVTQNVLYENQKLIANQFNSAIGKIQDSLSSTASALGKLQDVVNQNAQALNTLVKQLSSNFGAISSVLNDILSRLDKVEAEVQIDRLITGRLQSLQTYVTQQLIRAAEIRASANLAATKMSECVLGQSKRVDFCGKGYHLMSFPQSAPHGVVFLHVTYVPAQEKNFTCAPAICHDGKAHFPREGVFVSNGTHWFVTQRNFYEPQIITTDNTFVSGNCDVVIGIVNNTVYDPLQPELDSGGGGSDIIKLLNEQVNKEMQSSNLYMSMSSWCYTHSLDGAGLFLFDHAAEEYEHAKKLIIFLNENNVPVQLTSISAPEHKFEGLTQIFQKAYEHEQHISESINNIVDHAIKSKDHATFNFLQWYVAEQHEEEVLFKDILDKIELIGNENHGLYLADQYVKGIAKSRKS

SEQ ID NO: 9044 - protein, 1315 aa, Artificial Sequence
  SARS-CoV-2/USA/UT-00033/2020__EPI_ISL_417976 spike protein (1-1147)(I712C_T1077C) Ferritin construct
MFVFLVLLPLVSSQCVNLTTRTQLPPAYTNSFTRGVYYPDKVFRSSVLHSTQDLFLPFFSNVTWFHAIHVSGTNGTKRFDNPVLPFNDGVYFASTEKSNIIRGWIFGTTLDSKTQSLLIVNNATNVVIKVCEFQFCNDPFLGVYYHKNNKSWMESEFRVYSSANNCTFEYVSQPFLMDLEGKQGNFKNLREFVFKNIDGYFKIYSKHTPINLVRDLPQGFSALEPLVDLPIGINITRFQTLLALHRSYLTPGDSSSGLTAGAAAYYVGYLQPRTFLLKYNENGTITDAVDCALDPLSETKCTLKSFTVEKGIYQTSNFRVQPTESIVRFPNITNLCPFGEVFNATRFASVYAWNRKRISNCVADYSVLYNSASFSTFKCYGVSPTKLNDLCFTNVYADSFVIRGDEVRQIAPGQTGKIADYNYKLPDDFTGCVIAWNSNNLDSKVGGNYNYLYRLFRKSNLKPFERDISTEIYQAGSTPCNGVEGFNCYFPLQSYGFQPTNGVGYQPYRVVVLSFELLHAPATVCGPKKSTNLVKNKCVNFNFNGLTGTGVLTESNKKFLPFQQFGRDIADTTDAVRDPQTLEILDITPCSFGGVSVITPGTNTSNQVAVLYQGVNCTEVPVAIHADQLTPTWRVYSTGSNVFQTRAGCLIGAEHVNNSYECDIPIGAGICASYQTQTNSPRRARSVASQSIIAYTMSLGAENSVAYSNNSCAIPTNFTISVTTEILPVSMTKTSVDCTMYICGDSTECSNLLLQYGSFCTQLNRALTGIAVEQDKNTQEVFAQVKQIYKTPPIKDFGGFNFSQILPDPSKPSKRSFIEDLLFNKVTLADAGFIKQYGDCLGDIAARDLICAQKFNGLTVLPPLLTDEMIAQYTSALLAGTITSGWTFGAGAALQIPFAMQMAYRFNGIGVTQNVLYENQKLIANQFNSAIGKIQDSLSSTASALGKLQDVVNQNAQALNTLVKQLSSNFGAISSVLNDILSRLDKVEAEVQIDRLITGRLQSLQTYVTQQLIRAAEIRASANLAATKMSECVLGQSKRVDFCGKGYHLMSFPQSAPHGVVFLHVTYVPAQEKNFTCAPAICHDGKAHFPREGVFVSNGTHWFVTQRNFYEPQIITTDNTFVSGNCDVVIGIVNNTVYDPLQPELDSGGGGSDIIKLLNEQVNKEMQSSNLYMSMSSWCYTHSLDGAGLFLFDHAAEEYEHAKKLIIFLNENNVPVQLTSISAPEHKFEGLTQIFQKAYEHEQHISESINNIVDHAIKSKDHATFNFLQWYVAEQHEEEVLFKDILDKIELIGNENHGLYLADQYVKGIAKSRKS

SEQ ID NO: 9045 - protein, 1315 aa, Artificial Sequence
  SARS-CoV-2/USA/WI-13/2020__EPI_ISL_417516 spike protein (1-1147)(I712C_T1077C) Ferritin construct
MFVFLVLLPLVSSQCVNLTTRTQLPPAYTNSFTRGVYYPDKVFRSSVLHSTQDLFLPFFSNVTWFHAIHVSGTNGTKRFDNPVLPFNDGVYFASTEKSNIIRGWIFGTTLDSKTQSLLIVNNATNVVIKVCEFQFCNDPFLGVYYHKNNKSWMESEFRVYSSANNCTFEYVSQPFLMDLEGKQGNFKNLREFVFKNIDGYFKIYSKHTPINLVRDLPQGFSALEPLVDLPIGINITRFQTLLALHRSYLTPGDSSSGWTAGAAAYYVGYLQPRTFLLKYNENGTITDAVDCALDPLSETKCTLKSFTVEKGIYQTSNFRVLPTESIVRFPNITNLCPFGEVFNATRFASVYAWNRKRISNCVADYSVLYNSASFSTFKCYGVSPTKLNDLCFTNVYADSFVIRGDEVRQIAPGQTGKIADYNYKLPDDFTGCVIAWNSNNLDSKVGGNYNYLYRLFRKSNLKPFERDISTEIYQAGSTPCNGVEGFNCYFPLQSYGFQPTNGVGYQPYRVVVLSFELLHAPATVCGPKKSTNLVKNKCVNFNFNGLTGTGVLTESNKKFLPFQQFGRDIADTTDAVRDPQTLEILDITPCSFGGVSVITPGTNTSNQVAVLYQGVNCTEVPVAIHADQLTPTWRVYSTGSNVFQTRAGCLIGAEHVNNSYECDIPIGAGICASYQTQTNSPRRARSVASQSIIAYTMSLGAENSVAYSNNSCAIPTNFTISVTTEILPVSMTKTSVDCTMYICGDSTECSNLLLQYGSFCTQLNRALTGIAVEQDKNTQEVFAQVKQIYKTPPIKDFGGFNFSQILPDPSKPSKRSFIEDLLFNKVTLADAGFIKQYGDCLGDIAARDLICAQKFNGLTVLPPLLTDEMIAQYTSALLAGTITSGWTFGAGAALQIPFAMQMAYRFNGIGVTQNVLYENQKLIANQFNSAIGKIQDSLSSTASALGKLQDVVNQNAQALNTLVKQLSSNFGAISSVLNDILSRLDKVEAEVQIDRLITGRLQSLQTYVTQQLIRAAEIRASANLAATKMSECVLGQSKRVDFCGKGYHLMSFPQSAPHGVVFLHVTYVPAQEKNFTCAPAICHDGKAHFPREGVFVSNGTHWFVTQRNFYEPQIITTDNTFVSGNCDVVIGIVNNTVYDPLQPELDSGGGGSDIIKLLNEQVNKEMQSSNLYMSMSSWCYTHSLDGAGLFLFDHAAEEYEHAKKLIIFLNENNVPVQLTSISAPEHKFEGLTQIFQKAYEHEQHISESINNIVDHAIKSKDHATFNFLQWYVAEQHEEEVLFKDILDKIELIGNENHGLYLADQYVKGIAKSRKS

SEQ ID NO: 9046 - protein, 1314 aa, Artificial Sequence
  SARS-CoV-2/India/1-27/2020__EPI_ISL_413522 spike protein (1-1146)(I711C_T1076C) Ferritin construct
MFVFLVLLPLVSSQCVNLTTRTQLPPAYTNSFTRGVYYPDKVFRSSVLHSTQDLFLPFFSNVTWFHAIHVSGTNGTKRFDNPVLPFNDGVYFASTEKSNIIRGWIFGTTLDSKTQSLLIVNNATNVVIKVCEFQFCNDPFLGVYHKNNKSWMESEFRVYSSANNCTFEYVSQPFLMDLEGKQGNFKNLREFVFKNIDGYFKIYSKHTPINLVRDLPQGFSALEPLVDLPIGINITRFQTLLALHRSYLTPGDSSSGWTAGAAAYYVGYLQPRTFLLKYNENGTITDAVDCALDPLSETKCTLKSFTVEKGIYQTSNFRVQPTESIVRFPNITNLCPFGEVFNATRFASVYAWNRKRISNCVADYSVLYNSASFSTFKCYGVSPTKLNDLCFTNVYADSFVIRGDEVIQIAPGQTGKIADYNYKLPDDFTGCVIAWNSNNLDSKVGGNYNYLYRLFRKSNLKPFERDISTEIYQAGSTPCNGVEGFNCYFPLQSYGFQPTNGVGYQPYRVVVLSFELLHAPATVCGPKKSTNLVKNKCVNFNFNGLTGTGVLTESNKKFLPFQQFGRDIADTTDAVRDPQTLEILDITPCSFGGVSVITPGTNTSNQVAVLYQDVNCTEVPVAIHADQLTPTWRVYSTGSNVFQTRAGCLIGAEHVNNSYECDIPIGAGICASYQTQTNSPRRARSVASQSIIAYTMSLGAENSVAYSNNSCAIPTNFTISVTTEILPVSMTKTSVDCTMYICGDSTECSNLLLQYGSFCTQLNRALTGIAVEQDKNTQEVFAQVKQIYKTPPIKDFGGFNFSQILPDPSKPSKRSFIEDLLFNKVTLADAGFIKQYGDCLGDIAARDLICAQKFNGLTVLPPLLTDEMIAQYTSALLAGTITSGWTFGAGAALQIPFAMQMAYRFNGIGVTQNVLYENQKLIANQFNSAIGKIQDSLSSTASALGKLQDVVNQNAQALNTLVKQLSSNFGAISSVLNDILSRLDKVEAEVQIDRLITGRLQSLQTYVTQQLIRAAEIRASANLAATKMSECVLGQSKRVDFCGKGYHLMSFPQSAPHGVVFLHVTYVPAQEKNFTCAPAICHDGKAHFPREGVFVSNGTHWFVTQRNFYEPQIITTDNTFVSGNCDVVIGIVNNTVYDPLQPELDSGGGGSDIIKLLNEQVNKEMQSSNLYMSMSSWCYTHSLDGAGLFLFDHAAEEYEHAKKLIIFLNENNVPVQLTSISAPEHKFEGLTQIFQKAYEHEQHISESINNIVDHAIKSKDHATFNFLQWYVAEQHEEEVLFKDILDKIELIGNENHGLYLADQYVKGIAKSRKS

SEQ ID NO: 9047 - protein, 1309 aa, Artificial Sequence
  SARS-CoV-2/pangolin/Guangxi/P4L/2017__EPI_ISL_410538 spike protein (1-1141)(I706C_T1071C) Ferritin construct
MFVFLFVLPLVSSQCVNLTTRTGIPPGYTNSSTRGVYYPDKVFRSSILHLTQDLFLPFFSNVTWFNTINYQGGFKKFDNPVLPFNDGVYFASTEKSNIIRGWIFGTTLDARTQSLLIVNNATNVVIKVCEFQFCTDPFLGVYYHNNNKTWVENEFRVYSSANNCTFEYISQPFLMDLEGKQGNFKNLREFVFKNVDGYFKIYSKHTPIDLVRDLPRGFAALEPLVDLPIGINITRFQTLLALHRSYLTPGNLESGWTTGAAAYYVGYLQQRTFLLSYNQNGTITDAVDCSLDPLSETKCTLKSLTVEKGIYQTSNFRVQPTISIVRFPNITNLCPFGEVFNASKFASVYAWNRKRISNCVADYSVLYNSTSFSTFKCYGVSPTKLNDLCFTNVYADSFVVKGDEVRQIAPGQTGVIADYNYKLPDDFTGCVIAWNSVKQDALTGGNYGYLYRLFRKSKLKPFERDISTEIYQAGSTPCNGQVGLNCYYPLERYGFHPTTGVNYQPFRVVVLSFELLNGPATVCGPKLSTTLVKDKCVNFNFNGLTGTGVLTTSKKQFLPFQQFGRDISDTTDAVRDPQTLEILDITPCSFGGVSVITPGTNTSNQVAVLYQDVNCTEVPMAIHAEQLTPAWRVYSAGANVFQTRAGCLVGAEHVNNSYECDIPVGAGICASYHSMSSLRSVNQRSIIAYTMSLGAENSVAYSNNSCAIPTNFTISVTTEILPVSMTKTSVDCTMYICGDSIECSNLLLQYGSFCTQLNRALTGIAVEQDKNTQEVFAQVKQIYKTPPIKDFGGFNFSQILPDPSKPSKRSFIEDLLFNKVTLADAGFIKQYGDCLGDIAARDLICAQKFNGLTVLPPLLTDEMIAQYTSALLAGTITSGWTFGAGAALQIPFAMQMAYRFNGIGVTQNVLYENQKLIANQFNSAIGKIQDSLSSTASALGKLQDVVNQNAQALNTLVKQLSSNFGAISSVLNDILSRLDKVEAEVQIDRLITGRLQSLQTYVTQQLIRAAEIRASANLAATKMSECVLGQSKRVDFCGKGYHLMSFPQSAPHGVVFLHVTYVPAQEKNFTCAPAICHEGKAHFPREGVFVSNGTHWFITQRNFYEPQIITTDNTFVSGSCDVVIGIVNNTVYDPLQPELDSGGGGSDIIKLLNEQVNKEMQSSNLYMSMSSWCYTHSLDGAGLFLFDHAAEEYEHAKKLIIFLNENNVPVQLTSISAPEHKFEGLTQIFQKAYEHEQHISESINNIVDHAIKSKDHATFNFLQWYVAEQHEEEVLFKDILDKIELIGNENHGLYLADQYVKGIAKSRKS

SEQ ID NO: 9048 - protein, 1309 aa, Artificial Sequence
  SARS-CoV-2/pangolin/Guangxi/P5L/2017__EPI_ISL_410540 spike protein (1-1141)(I706C_T1071C) Ferritin construct
MFVFLFVLPLVSSQCVNLTTRTGIPPGYTNSSTRGVYYPDKVFRSSILHLTQDLFLPFFSNVTWFNTINYQGGFKKFDNPVLPFNDGVYFASTEKSNIIRGWIFGTTLDARTQSLLIVNNATNVVIKVCEFQFCTDPFLGVYYHNNNKTWVENEFRVYSSANNCTFEYISQPFLMDLEGKQGNFKNLREFVFKNVDGYFKIYSKHTPIDLVRDLPRGFAALEPLVDLPIGINITRFQTLLALHRSYLTPGKLESGWTTGAAAYYVGYLQQRTFLLSYNQNGTITDAVDCSLDPLSETKCTLKSLTVEKGIYQTSNFRVQPTISIVRFPNITNLCPFGEVFNASKFASVYAWNRKRISNCVADYSVLYNSTSFSTFKCYGVSPTKLNDLCFTNVYADSFVVKGDEVRQIAPGQTGVIADYNYKLPDDFTGCVIAWNSVKQDALTGGNYGYLYRLFRKSKLKPFERDISTEIYQAGSTPCNGQVGLNCYYPLERYGFHPTTGVNYQPFRVVVLSFELLNGPATVCGPKLSTTLVKDKCVNFNFNGLTGTGVLTTSKKQFLPFQQFGRDISDTTDAVRDPQTLEILDITPCSFGGVSVITPGTNTSNQVAVLYQDVNCTEVPMAIHAEQLTPAWRVYSAGANVFQTRAGCLVGAEHVNNSYECDIPVGAGICASYHSMSSFRSVNQRSIIAYTMSLGAENSVAYSNNSCAIPTNFTISVTTEILPVSMTKTSVDCTMYICGDSIECSNLLLQYGSFCTQLNRALTGIAVEQDKNTQEVFAQVKQIYKTPPIKDFGGFNFSQILPDPSKPSKRSFIEDLLFNKVTLADAGFIKQYGDCLGDIAARDLICAQKFNGLTVLPPLLTDEMIAQYTSALLAGTITSGWTFGAGAALQIPFAMQMAYRFNGIGVTQNVLYENQKLIANQFNSAIGKIQDSLSSTASALGKLQDVVNQNAQALNTLVKQLSSNFGAISSVLNDILSRLDKVEAEVQIDRLITGRLQSLQTYVTQQLIRAAEIRASANLAATKMSECVLGQSKRVDFCGKGYHLMSFPQSAPHGVVFLHVTYVPAQEKNFTCAPAICHEGKAHFPREGVFVSNGTHWFITQRNFYEPQIITTDNTFVSGSCDVVIGIVNNTVYDPLQPELDSGGGGSDIIKLLNEQVNKEMQSSNLYMSMSSWCYTHSLDGAGLFLFDHAAEEYEHAKKLIIFLNENNVPVQLTSISAPEHKFEGLTQIFQKAYEHEQHISESINNIVDHAIKSKDHATFNFLQWYVAEQHEEEVLFKDILDKIELIGNENHGLYLADQYVKGIAKSRKS

SEQ ID NO: 9049 - protein, 1309 aa, Artificial Sequence
  SARS-CoV-2/pangolin/Guangxi/P5E/2017__EPI_ISL_410541 spike protein (1-1141)(I706C_T1071C) Ferritin construct
MFVFLFVLPLVSSQCVNLTTRTGIPPGYTNSSTRGVYYPDKVFRSSILHLTQDLFLPFFSNVTWFNTITYQGGSKKFDNPVLPFNDGVYFASTEKSNIIRGWIFGTTLDARTQSLLIVNNATNVVIKVCEFQFCTDPFLGVYYHNNNKTWVENEFRVYSSANNCTFEYISQPFLMDLEGKQGNFKNLREFVFKNVDGYFKIYSKHTPIDLVRDLPRGFAALEPLVDLPIGINITRFQTLLALHRSYLTPGKLESGWTTGAAAYYVGYLQQRTFLLSYNQNGTITDAVDCSLDPLSETKCTLKSLTVEKGIYQTSNFRVQPTISIVRFPNITNLCPFGEVFNASKFASVYAWNRKRISNCVADYSVLYNSTSFSTFKCYGVSPTKLNDLCFTNVYADSFVVKGDEVRQIAPGQTGVIADYNYKLPDDFTGCVIAWNSVKQDALTGDNYGYLYRLFRKSKLKPFERDISTEIYQAGSTPCNGQVGLNCYYPLERYGFHPTTGVNYQPFRVVVLSFELLNGPATVCGPKLSTTLVKDKCVNFNFNGLTGTGVLTTSKKQFLPFQQFGRDISDTTDAVRDPQTLEILDITPCSFGGVSVITPGTNTSNQVAVLYQDVNCTEVPMAIHAEQLTPAWRVYSAGANVFQTRAGCLVGAEHVNNSYECDIPVGAGICASYHSMSSFRSVNQRSIIAYTMSLGAENSVAYSNNSCAIPTNFTISVTTEILPVSMTKTSVDCTMYICGDSIECSNLLLQYGSFCTQLNRALTGIAVEQDKNTQEVFAQVKQIYKTPPIKDFGGFNFSQILPDPSKPSKRSFIEDLLFNKVTLADAGFIKQYGDCLGDIAARDLICAQKFNGLTVLPPLLTDEMIAQYTSALLAGTITSGWTFGAGAALQIPFAMQMAYRFNGIGVTQNVLYENQKLIANQFNSAIGKIQDSLSSTASALGKLQDVVNQNAQALNTLVKQLSSNFGAISSVLNDILSRLDKVEAEVQIDRLITGRLQSLQTYVTQQLIRAAEIRASANLAATKMSECVLGQSKRVDFCGKGYHLMSFPQSAPHGVVFLHVTYVPAQEKNFTCAPAICHEGKAHFPREGVFVSNGTHWFITQRNFYEPQIITTDNTFVSGSCDVVIGIVNNTVYDPLQPELDSGGGGSDIIKLLNEQVNKEMQSSNLYMSMSSWCYTHSLDGAGLFLFDHAAEEYEHAKKLIIFLNENNVPVQLTSISAPEHKFEGLTQIFQKAYEHEQHISESINNIVDHAIKSKDHATFNFLQWYVAEQHEEEVLFKDILDKIELIGNENHGLYLADQYVKGIAKSRKS

SEQ ID NO: 9050 - protein, 1307 aa, Artificial Sequence
  SARS-CoV-2/pangolin/Guangxi/P1E/2017__EPI_ISL_410539 spike protein (1-1139)(I704C_T1069C) Ferritin construct
MFVFLFVLPLVSSQCVNLTTRTGIQPGYTNSSTRGVYYPDKVFRSSILHLTQDLFLPFFSNVTWFNTINYQGGFKKFDNPVLPFNDGVYFASTEKSNIIRGWIFGTTLDARTQSLLIVNNATNVVIKVCEFQFCTDPFLGVYYHNNNKTWVENEFRVYSSANNCTFEYISQPFLMDLEGKQGNFKNLREFVFKNVDGYFKIYSKHTPIDLVRDLPRGFAALEPLVDLPIGINITRFQTLLALHRSYLTPGKLESGWTTGAAAYYVGYLQQRTFLLSYNQNGTITDAVDCSLDPLSETKCTLKSLTVEKGIYQTSNFRVQPTISIVRFPNITNLCPFGEVFNASKFASVYAWNRKRISNCVADYSVLYNSTSFSTFKCYGVSPTKLNDLCFTNVYADSFVVKGDEVRQIAPGQTGVIADYNYKLPDDFTGCVIAWNSVKQDALTGGNYLYRLFRKSKLKPFERDISTEIYQAGSTPCNGQVGLNCYYPLERYGFHPTTGVNYQPFRVVVLSFELLNGPATVCGPKLSTTLVKDKCVNFNFNGLTGTGVLTTSKKQFLPFQQFGRDISDTTDAVRDPQTLEILDITPCSFGGVSVITPGTNTSNQVAVLYQDVNCTEVPMAIHAEQLTPAWRVYSAGANVFQTRAGCLVGAEHVNNSYECDIPVGAGICASYHSMSSLRSVNQRSIIAYTMSLGAENSVAYSNNSCAIPTNFTISVTTEILPVSMTKTSVDCTMYICGDSIECSNLLLQYGSFCTQLNRALTGIAVEQDKNTQEVFAQVKQIYKTPPIKDFGGFNFSQILPDPSKPSKRSFIEDLLFNKVTLADAGFIKQYGDCLGDIAARDLICAQKFNGLTVLPPLLTDEMIAQYTSALLAGTITSGWTFGAGAALQIPFAMQMAYRFNGIGVTQNVLYENQKLIANQFNSAIGKIQDSLSSTASALGKLQDVVNQNAQALNTLVKQLSSNFGAISSVLNDILSRLDKVEAEVQIDRLITGRLQSLQTYVTQQLIRAAEIRASANLAATKMSECVLGQSKRVDFCGKGYHLMSFPQSAPHGVVFLHVTYVPAQEKNFTCAPAICHEGKAHFPREGVFVSNGTHWFITQRNFYEPQIITTDNTFVSGSCDVVIGIVNNTVYDPLQPELDSGGGGSDIIKLLNEQVNKEMQSSNLYMSMSSWCYTHSLDGAGLFLFDHAAEEYEHAKKLIIFLNENNVPVQLTSISAPEHKFEGLTQIFQKAYEHEQHISESINNIVDHAIKSKDHATFNFLQWYVAEQHEEEVLFKDILDKIELIGNENHGLYLADQYVKGIAKSRKS

SEQ ID NO: 9051 - protein, 1315 aa, Artificial Sequence
  SARS-CoV-2/Wuhan/WIV05/2019__EPI_ISL_402128 spike protein (1-1147)(I714C_Y1110C) Ferritin construct
MFVFLVLLPLVSSQCVNLTTRTQLPPAYTNSFTRGVYYPDKVFRSSVLHSTQDLFLPFFSNVTWFHAIHVSGTNGTKRFDNPVLPFNDGVYFASTEKSNIIRGWIFGTTLDSKTQSLLIVNNATNVVIKVCEFQFCNDPFLGVYYHKNNKSWMESEFRVYSSANNCTFEYVSQPFLMDLEGKQGNFKNLREFVFKNIDGYFKIYSKHTPINLVRDLPQGFSALEPLVDLPIGINITRFQTLLALHRSYLTPGDSSSGWTAGAAAYYVGYLQPRTFLLKYNENGTITDAVDCALDPLSETKCTLKSFTVEKGIYQTSNFRVQPTESIVRFPNITNLCPFGEVFNATRFASVYAWNRKRISNCVADYSVLYNSASFSTFKCYGVSPTKLNDLCFTNVYADSFVIRGDEVRQIAPGQTGKIADYNYKLPDDFTGCVIAWNSNNLDSKVGGNYNYLYRLFRKSNLKPFERDISTEIYQAGSTPCNGVEGFNCYFPLQSYGFQPTNGVGYQPYRVVVLSFELLHAPATVCGPKKSTNLVKNKCVNFNFNGLTGTGVLTESNKKFLPFQQFGRDIADTTDAVRDPQTLEILDITPCSFGGVSVITPGTNTSNQVAVLYQDVNCTEVPVAIHADQLTPTWRVYSTGSNVFQTRAGCLIGAEHVNNSYECDIPIGAGICASYQTQTNSPRRARSVASQSIIAYTMSLGAENSVAYSNNSIACPTNFTISVTTEILPVSMTKTSVDCTMYICGDSTECSNLLLQYGSFCTQLNRALTGIAVEQDKNTQEVFAQVKQIYKTPPIKDFGGFNFSQILPDPSKPSKRSFIEDLLFNKVTLADAGFIKQYGDCLGDIAARDLICAQKFNGLTVLPPLLTDEMIAQYTSALLAGTITSGWTFGAGAALQIPFAMQMAYRFNGIGVTQNVLYENQKLIANQFNSAIGKIQDSLSSTASALGKLQDVVNQNAQALNTLVKQLSSNFGAISSVLNDILSRLDKVEAEVQIDRLITGRLQSLQTYVTQQLIRAAEIRASANLAATKMSECVLGQSKRVDFCGKGYHLMSFPQSAPHGVVFLHVTYVPAQEKNFTTAPAICHDGKAHFPREGVFVSNGTHWFVTQRNFCEPQIITTDNTFVSGNCDVVIGIVNNTVYDPLQPELDSGGGGSDIIKLLNEQVNKEMQSSNLYMSMSSWCYTHSLDGAGLFLFDHAAEEYEHAKKLIIFLNENNVPVQLTSISAPEHKFEGLTQIFQKAYEHEQHISESINNIVDHAIKSKDHATFNFLQWYVAEQHEEEVLFKDILDKIELIGNENHGLYLADQYVKGIAKSRKS

SEQ ID NO: 9052 - protein, 1311 aa, Artificial Sequence
  SARS-CoV-2/bat/Yunnan/RaTG13/2013__EPI_ISL_402131 spike protein (1-1143)(I710C_Y1106C) Ferritin construct
MFVFLVLLPLVSSQCVNLTTRTQLPPAYTNSSTRGVYYPDKVFRSSVLHLTQDLFLPFFSNVTWFHAIHVSGTNGIKRFDNPVLPFNDGVYFASTEKSNIIRGWIFGTTLDSKTQSLLIVNNATNVVIKVCEFQFCNDPFLGVYYHKNNKSWMESEFRVYSSANNCTFEYVSQPFLMDLEGKQGNFKNLREFVFKNIDGYFKIYSKHTPINLVRDLPPGFSALEPLVDLPIGINITRFQTLLALHRSYLTPGDSSSGWTAGAAAYYVGYLQPRTFLLKYNENGTITDAVDCALDPLSETKCTLKSFTVEKGIYQTSNFRVQPTDSIVRFPNITNLCPFGEVFNATTFASVYAWNRKRISNCVADYSVLYNSTSFSTFKCYGVSPTKLNDLCFTNVYADSFVITGDEVRQIAPGQTGKIADYNYKLPDDFTGCVIAWNSKHIDAKEGGNFNYLYRLFRKANLKPFERDISTEIYQAGSKPCNGQTGLNCYYPLYRYGFYPTDGVGHQPYRVVVLSFELLNAPATVCGPKKSTNLVKNKCVNFNFNGLTGTGVLTESNKKFLPFQQFGRDIADTTDAVRDPQTLEILDITPCSFGGVSVITPGTNASNQVAVLYQDVNCTEVPVAIHADQLTPTWRVYSTGSNVFQTRAGCLIGAEHVNNSYECDIPIGAGICASYQTQTNSRSVASQSIIAYTMSLGAENSVAYSNNSIACPTNFTISVTTEILPVSMTKTSVDCTMYICGDSTECSNLLLQYGSFCTQLNRALTGIAVEQDKNTQEVFAQVKQIYKTPPIKDFGGFNFSQILPDPSKPSKRSFIEDLLFNKVTLADAGFIKQYGDCLGDIAARDLICAQKFNGLTVLPPLLTDEMIAQYTSALLAGTITSGWTFGAGAALQIPFAMQMAYRFNGIGVTQNVLYENQKLIANQFNSAIGKIQDSLSSTASALGKLQDVVNQNAQALNTLVKQLSSNFGAISSVLNDILSRLDKVEAEVQIDRLITGRLQSLQTYVTQQLIRAAEIRASANLAATKMSECVLGQSKRVDFCGKGYHLMSFPQSAPHGVVFLHVTYVPAQEKNFTTAPAICHDGKAHFPREGVFVSNGTHWFVTQRNFCEPQIITTDNTFVSGSCDVVIGIVNNTVYDPLQPELDSGGGGSDIIKLLNEQVNKEMQSSNLYMSMSSWCYTHSLDGAGLFLFDHAAEEYEHAKKLIIFLNENNVPVQLTSISAPEHKFEGLTQIFQKAYEHEQHISESINNIVDHAIKSKDHATFNFLQWYVAEQHEEEVLFKDILDKIELIGNENHGLYLADQYVKGIAKSRKS

SEQ ID NO: 9053 - protein, 1315 aa, Artificial Sequence
  SARS-CoV-2/Wuhan/HBCDC-HB-01/2019__EPI_ISL_402132 spike protein (1-1147)(I714C_Y1110C) Ferritin construct
MFVFLVLLPLVSSQCVNLTTRTQLPPAYTNSITRGVYYPDKVFRSSVLHSTQDLFLPFFSNVTWFHAIHVSGTNGTKRFDNPVLPFNDGVYFASTEKSNIIRGWIFGTTLDSKTQSLLIVNNATNVVIKVCEFQFCNDPFLGVYYHKNNKSWMESEFRVYSSANNCTFEYVSQPFLMDLEGKQGNFKNLREFVFKNIDGYFKIYSKHTPINLVRDLPQGFSALEPLVDLPIGINITRFQTLLALHRSYLTPGDSSSGWTAGAAAYYVGYLQPRTFLLKYNENGTITDAVDCALDPLSETKCTLKSFTVEKGIYQTSNFRVQPTESIVRFPNITNLCPFGEVFNATRFASVYAWNRKRISNCVADYSVLYNSASFSTFKCYGVSPTKLNDLCFTNVYADSFVIRGDEVRQIAPGQTGKIADYNYKLPDDFTGCVIAWNSNNLDSKVGGNYNYLYRLFRKSNLKPFERDISTEIYQAGSTPCNGVEGFNCYFPLQSYGFQPTNGVGYQPYRVVVLSFELLHAPATVCGPKKSTNLVKNKCVNFNFNGLTGTGVLTESNKKFLPFQQFGRDIADTTDAVRDPQTLEILDITPCSFGGVSVITPGTNTSNQVAVLYQDVNCTEVPVAIHADQLTPTWRVYSTGSNVFQTRAGCLIGAEHVNNSYECDIPIGAGICASYQTQTNSPRRARSVASQSIIAYTMSLGAENSVAYSNNSIACPTNFTISVTTEILPVSMTKTSVDCTMYICGDSTECSNLLLQYGSFCTQLNRALTGIAVEQDKNTQEVFAQVKQIYKTPPIKDFGGFNFSQILPDPSKPSKRSFIEDLLFNKVTLADAGFIKQYGDCLGDIAARDLICAQKFNGLTVLPPLLTDEMIAQYTSALLAGTITSGWTFGAGAALQIPFAMQMAYRFNGIGVTQNVLYENQKLIANQFNSAIGKIQDSLSSTASALGKLQDVVNQNAQALNTLVKQLSSNFGAISSVLNDILSRLDKVEAEVQIDRLITGRLQSLQTYVTQQLIRAAEIRASANLAATKMSECVLGQSKRVDFCGKGYHLMSFPQSAPHGVVFLHVTYVPAQEKNFTTAPAICHDGKAHFPREGVFVSNGTHWFVTQRNFCEPQIITTDNTFVSGNCDVVIGIVNNTVYDPLQPELDSGGGGSDIIKLLNEQVNKEMQSSNLYMSMSSWCYTHSLDGAGLFLFDHAAEEYEHAKKLIIFLNENNVPVQLTSISAPEHKFEGLTQIFQKAYEHEQHISESINNIVDHAIKSKDHATFNFLQWYVAEQHEEEVLFKDILDKIELIGNENHGLYLADQYVKGIAKSRKS

SEQ ID NO: 9054 - protein, 1315 aa, Artificial Sequence
  SARS-CoV-2/Guangdong/20SF028/2020__EPI_ISL_403936 spike protein (1-1147)(I714C_Y1110C) Ferritin construct
MFVFLVLLPLVSSQCVNLTTRTQLPPAYTNSFTRGVYYPDKVFRSSVLYSTQDLFLPFFSNVTWFHAIHVSGTNGTKRFDNPVLPFNDGVYFASTEKSNIIRGWIFGTTLDSKTQSLLIVNNATNVVIKVCEFQFCNDPFLGVYYHKNNKSWMESEFRVYSSANNCTFEYVSQPFLMDLEGKQGNFKNLREFVFKNIDGYFKIYSKHTPINLVRDLPQGFSALEPLVDLPIGINITRFQTLLALHRSYLTPGDSSSGWTAGAAAYYVGYLQPRTFLLKYNENGTITDAVDCALDPLSETKCTLKSFTVEKGIYQTSNFRVQPTESIVRFPNITNLCPFGEVFNATRFASVYAWNRKRISNCVADYSVLYNSASFSTFKCYGVSPTKLNDLCFTNVYADSFVIRGDEVRQIAPGQTGKIADYNYKLPDDFTGCVIAWNSNNLDSKVGGNYNYLYRLFRKSNLKPFERDISTEIYQAGSTPCNGVEGFNCYFPLQSYGFQPTNGVGYQPYRVVVLSFELLHAPATVCGPKKSTNLVKNKCVNFNFNGLTGTGVLTESNKKFLPFQQFGRDIADTTDAVRDPQTLEILDITPCSFGGVSVITPGTNTSNQVAVLYQDVNCTEVPVAIHADQLTPTWRVYSTGSNVFQTRAGCLIGAEHVNNSYECDIPIGAGICASYQTQTNSPRRARSVASQSIIAYTMSLGAENSVAYSNNSIACPTNFTISVTTEILPVSMTKTSVDCTMYICGDSTECSNLLLQYGSFCTQLNRALTGIAVEQDKNTQEVFAQVKQIYKTPPIKDFGGFNFSQILPDPSKPSKRSFIEDLLFNKVTLADAGFIKQYGDCLGDIAARDLICAQKFNGLTVLPPLLTDEMIAQYTSALLAGTITSGWTFGAGAALQIPFAMQMAYRFNGIGVTQNVLYENQKLIANQFNSAIGKIQDSLSSTASALGKLQDVVNQNAQALNTLVKQLSSNFGAISSVLNDILSRLDKVEAEVQIDRLITGRLQSLQTYVTQQLIRAAEIRASANLAATKMSECVLGQSKRVDFCGKGYHLMSFPQSAPHGVVFLHVTYVPAQEKNFTTAPAICHDGKAHFPREGVFVSNGTHWFVTQRNFCEPQIITTDNTFVSGNCDVVIGIVNNTVYDPLQPELDSGGGGSDIIKLLNEQVNKEMQSSNLYMSMSSWCYTHSLDGAGLFLFDHAAEEYEHAKKLIIFLNENNVPVQLTSISAPEHKFEGLTQIFQKAYEHEQHISESINNIVDHAIKSKDHATFNFLQWYVAEQHEEEVLFKDILDKIELIGNENHGLYLADQYVKGIAKSRKS

SEQ ID NO: 9055 - protein, 1315 aa, Artificial Sequence
  SARS-CoV-2/Shenzhen/SZTH-001/2020__EPI_ISL_406592 spike protein (1-1147)(I714C_Y1110C) Ferritin construct
MFVFLVLLPLVSSQCVNLTTRTQLPPAYTNSFTRGVYYPDKVFRSSVLHSTQDLFLPFFSNVTWFHAIHVSGTNGTKRFDNPVLPFNDGVYFASTEKSNIIRGWIFGTTLDSKTQSLLIVNNATNVVIKVCEFQFCNDPFLGVYYHKNNKSWMESEFRVYSSANNCTFEYVSQPFLMDLEGKQGNFKNLREFVFKNIDGYFKIYSKHTPINLVRDLPQGFSALEPLVDLPIGINITRFQTLLALHRSYLTPGDSSSGWTAGAAAYYVGYLQPRTFLLKYNENGTITDAVDCALDPLSETKCTLKSFTVEKGIYQTSNFRVQPTESIVRFPNITNLCPFGEVFNATRFASVYAWNRKRISNCVADYSVLYNSASFSTFKCYGVSPTKLNDLCFTNVYADSFVIRGDEVRQIAPGQTGKIADYNYKLPDDFTGCVIAWNSNNLDSKVGGNYNYLYRLFRKSNLKPFERDISTEIYQAGSTPCNGVEGFNCYFPLQSYGFQPTNGVGYQPYRVVVLSFELLHAPATVCGPKKSTNLVKNKCVNFNFNGLTGTGVLTESNKKFLPFQQFGRDIADTTDAVRDPQTLEILDITPCSFGGVSVITPGTNTSNQVAVLYQDVNCTEVPVAIHADQLTPTWRVYSTGSNVFQTRAGCLIGAEHVNNSYECDIPIGAGICASYQTQTNSPRRARSVASQSIIAYTMSLGAENSVAYSNNSIACPTNFTISVTTEILPVSMTKTSVDCTMYICGDSTECSNLLLQYGSFCTQLNRALTGIAVEQDKNTQEVFAQVKQIYKTPPIKDFGGFNFSQILPDPSKPSKRSFIEDLLFNKVTLADAGFIKQYGDCLGDIAARDLICAQKFNGLTVLPPLLTDEMIAQYTSALLAGTITSGWTFGAGAALQIPFAMQMAYRFNGIGVTQNVLYENQKLIANQFNSAIGKIQDSLSSTASALGKLQDVVNQNAQALNTLVKQLSSNFGAISSVLNDILSRLDKVEAEVQIDRLITGRLQSLQTYVTQQLIRAAEIRASANLAATKMSECVLGQSKRVDFCGKGYHLMSFPQSAPHGVVFLHVTYVPAQEKNFTTAPAICHDGKAHFPREGVFVSNGTHWFVTQRNFCEPQIITTDNTFVSGNCDVLIGIVNNTVYDPLQPELDSGGGGSDIIKLLNEQVNKEMQSSNLYMSMSSWCYTHSLDGAGLFLFDHAAEEYEHAKKLIIFLNENNVPVQLTSISAPEHKFEGLTQIFQKAYEHEQHISESINNIVDHAIKSKDHATFNFLQWYVAEQHEEEVLFKDILDKIELIGNENHGLYLADQYVKGIAKSRKS

SEQ ID NO: 9056 - protein, 1315 aa, Artificial Sequence
  SARS-CoV-2/Shenzhen/SZTH-004/2020__EPI_ISL_406595 spike protein (1-1147)(I714C_Y1110C) Ferritin construct
MFVFLVLLPLVSSQCVNLTTRTQLPPAYTNSFTRGVYYPDKVFRSSVLHSTQDLFLPFFSNVTWFHAIHVSGTNGTKRFDNPVLPFNDGVYFASTEKSNIIRGWIFGTTLDSKTQSLLIVNNATNVVIKVCEFQFCNDPFLGVYYHKNNKSWMESEFRVYSSANNCTFEYVSQPFLMDLEGKQGNFKNLREFVFKNIDGYFKIYSKHTPINLVRDLPQGFSALEPLVDLPIGINITRFQTLLALHRSYLTPGDSSSGWTAGAAAYYVGYLQPRTFLLKYNENGTITDAVDCALDPLSETKCTLKSFTVEKGIYQTSNFRVQPTESIVRFPNITNLCPFGEVFNATRFASVYAWDRKRISNCVAYYSVLYNSASFSTFKCYGVSPTKLNDLCFTNVYADSFVIRGDEVRQIAPGQTGKIADYNYKLPDDFTGCVIAWNSNNLDSKVGGNYNYLYRLFRKSNLKPFERDISTEIYQAGSTPCNGVEGFNCYFPLQSYGFQPTNGVGYQPYRVVVLSFELLHAPATVCGPKKSTNLVKNKCVNFNFNGLTGTGVLTESNKKFLPFQQFGRDIADTTDAVRDPQTLEILDITPCSFGGVSVITPGTNTSNQVAVLYQDVNCTEVPVAIHADQLTPTWRVYSTGSNVFQTRAGCLIGAEHVNNSYECDIPIGAGICASYQTQTNSPRRARSVASQSIIAYTMSLGAENSVAYSNNSIACPTNFTISVTTEILPVSMTKTSVDCTMYICGDSTECSNLLLQYGSFCTQLNRALTGIAVEQDKNTQEVFAQVKQIYKTPPIKDFGGFNFSQILPDPSKPSKRSFIEDLLFNKVTLADAGFIKQYGDCLGDIAARDLICAQKFNGLTVLPPLLTDEMIAQYTSALLAGTITSGWTFGAGAALQIPFAMQMAYRFNGIGVTQNVLYENQKLIANQFNSAIGKIQDSLSSTASALGKLQDVVNQNAQALNTLVKQLSSNFGAISSVLNDILSRLDKVEAEVQIDRLITGRLQSLQTYVTQQLIRAAEIRASANLAATKMSECVLGQSKRVDFCGKGYHLMSFPQSAPHGVVFLHVTYVPAQEKNFTTAPAICHDGKAHFPREGVFVSNGTHWFVTQRNFCEPQIITTDNTFVSGNCDVVIGIVNNTVYDPLQPELDSGGGGSDIIKLLNEQVNKEMQSSNLYMSMSSWCYTHSLDGAGLFLFDHAAEEYEHAKKLIIFLNENNVPVQLTSISAPEHKFEGLTQIFQKAYEHEQHISESINNIVDHAIKSKDHATFNFLQWYVAEQHEEEVLFKDILDKIELIGNENHGLYLADQYVKGIAKSRKS

SEQ ID NO: 9057 - protein, 1315 aa, Artificial Sequence
  SARS-CoV-2/France/IDF0372/2020__EPI_ISL_406596 spike protein (1-1147)(I714C_Y1110C) Ferritin construct
MFVFLVLLPLVSSQCVNLTTRTQLPPAYTNSFTRGVYYPDKVFRSSVLHSTQDLFLPFFSNVTWFHAIHVSGTNGTKRFDNPVLPFNDGVYFASTEKSNIIRGWIFGTTLDSKTQSLLIVNNATNVVIKVCEFQFCNDPFLGVYYHKNNKSWMESEFRVYSSANNCTFEYVSQPFLMDLEGKQGNFKNLREFVFKNIDGYFKIYSKHTPINLVRDLPQGFSALEPLVDLPIGINITRFQTLLALHRSYLTPGDSSSGWTAGAAAYYVGYLQPRTFLLKYNENGTITDAVDCALDPLSETKCTLKSFTVEKGIYQTSNFRVQPTESIVRFPNITNLCPFGEVFNATRFASVYAWNRKRISNCVADYSFLYNSASFSTFKCYGVSPTKLNDLCFTNVYADSFVIRGDEVRQIAPGQTGKIADYNYKLPDDFTGCVIAWNSNNLDSKVGGNYNYLYRLFRKSNLKPFERDISTEIYQAGSTPCNGVEGFNCYFPLQSYGFQPTNGVGYQPYRVVVLSFELLHAPATVCGPKKSTNLVKNKCVNFNFNGLTGTGVLTESNKKFLPFQQFGRDIADTTDAVRDPQTLEILDITPCSFGGVSVITPGTNTSNQVAVLYQDVNCTEVPVAIHADQLTPTWRVYSTGSNVFQTRAGCLIGAEHVNNSYECDIPIGAGICASYQTQTNSPRRARSVASQSIIAYTMSLGAENSVAYSNNSIACPTNFTISVTTEILPVSMTKTSVDCTMYICGDSTECSNLLLQYGSFCTQLNRALTGIAVEQDKNTQEVFAQVKQIYKTPPIKDFGGFNFSQILPDPSKPSKRSFIEDLLFNKVTLADAGFIKQYGDCLGDIAARDLICAQKFNGLTVLPPLLTDEMIAQYTSALLAGTITSGWTFGAGAALQIPFAMQMAYRFNGIGVTQNVLYENQKLIANQFNSAIGKIQDSLSSTASALGKLQDVVNQNAQALNTLVKQLSSNFGAISSVLNDILSRLDKVEAEVQIDRLITGRLQSLQTYVTQQLIRAAEIRASANLAATKMSECVLGQSKRVDFCGKGYHLMSFPQSAPHGVVFLHVTYVPAQEKNFTTAPAICHDGKAHFPREGVFVSNGTHWFVTQRNFCEPQIITTDNTFVSGNCDVVIGIVNNTVYDPLQPELDSGGGGSDIIKLLNEQVNKEMQSSNLYMSMSSWCYTHSLDGAGLFLFDHAAEEYEHAKKLIIFLNENNVPVQLTSISAPEHKFEGLTQIFQKAYEHEQHISESINNIVDHAIKSKDHATFNFLQWYVAEQHEEEVLFKDILDKIELIGNENHGLYLADQYVKGIAKSRKS

SEQ ID NO: 9058 - protein, 1315 aa, Artificial Sequence
  SARS-CoV-2/Australia/VIC01/2020__EPI_ISL_406844 spike protein (1-1147)(I714C_Y1110C) Ferritin construct
MFVFLVLLPLVSSQCVNLTTRTQLPPAYTNSFTRGVYYPDKVFRSSVLHSTQDLFLPFFSNVTWFHAIHVSGTNGTKRFDNPVLPFNDGVYFASTEKSNIIRGWIFGTTLDSKTQSLLIVNNATNVVIKVCEFQFCNDPFLGVYYHKNNKSWMESEFRVYSSANNCTFEYVSQPFLMDLEGKQGNFKNLREFVFKNIDGYFKIYSKHTPINLVRDLPQGFSALEPLVDLPIGINITRFQTLLALHRRYLTPGDSSSGWTAGAAAYYVGYLQPRTFLLKYNENGTITDAVDCALDPLSETKCTLKSFTVEKGIYQTSNFRVQPTESIVRFPNITNLCPFGEVFNATRFASVYAWNRKRISNCVADYSVLYNSASFSTFKCYGVSPTKLNDLCFTNVYADSFVIRGDEVRQIAPGQTGKIADYNYKLPDDFTGCVIAWNSNNLDSKVGGNYNYLYRLFRKSNLKPFERDISTEIYQAGSTPCNGVEGFNCYFPLQSYGFQPTNGVGYQPYRVVVLSFELLHAPATVCGPKKSTNLVKNKCVNFNFNGLTGTGVLTESNKKFLPFQQFGRDIADTTDAVRDPQTLEILDITPCSFGGVSVITPGTNTSNQVAVLYQDVNCTEVPVAIHADQLTPTWRVYSTGSNVFQTRAGCLIGAEHVNNSYECDIPIGAGICASYQTQTNSPRRARSVASQSIIAYTMSLGAENSVAYSNNSIACPTNFTISVTTEILPVSMTKTSVDCTMYICGDSTECSNLLLQYGSFCTQLNRALTGIAVEQDKNTQEVFAQVKQIYKTPPIKDFGGFNFSQILPDPSKPSKRSFIEDLLFNKVTLADAGFIKQYGDCLGDIAARDLICAQKFNGLTVLPPLLTDEMIAQYTSALLAGTITSGWTFGAGAALQIPFAMQMAYRFNGIGVTQNVLYENQKLIANQFNSAIGKIQDSLSSTASALGKLQDVVNQNAQALNTLVKQLSSNFGAISSVLNDILSRLDKVEAEVQIDRLITGRLQSLQTYVTQQLIRAAEIRASANLAATKMSECVLGQSKRVDFCGKGYHLMSFPQSAPHGVVFLHVTYVPAQEKNFTTAPAICHDGKAHFPREGVFVSNGTHWFVTQRNFCEPQIITTDNTFVSGNCDVVIGIVNNTVYDPLQPELDSGGGGSDIIKLLNEQVNKEMQSSNLYMSMSSWCYTHSLDGAGLFLFDHAAEEYEHAKKLIIFLNENNVPVQLTSISAPEHKFEGLTQIFQKAYEHEQHISESINNIVDHAIKSKDHATFNFLQWYVAEQHEEEVLFKDILDKIELIGNENHGLYLADQYVKGIAKSRKS

SEQ ID NO: 9059 - protein, 1315 aa, Artificial Sequence
  SARS-CoV-2/Germany/BavPat1/2020__EPI_ISL_406862 spike protein (1-1147)(I714C_Y1110C) Ferritin construct
MFVFLVLLPLVSSQCVNLTTRTQLPPAYTNSFTRGVYYPDKVFRSSVLHSTQDLFLPFFSNVTWFHAIHVSGTNGTKRFDNPVLPFNDGVYFASTEKSNIIRGWIFGTTLDSKTQSLLIVNNATNVVIKVCEFQFCNDPFLGVYYHKNNKSWMESEFRVYSSANNCTFEYVSQPFLMDLEGKQGNFKNLREFVFKNIDGYFKIYSKHTPINLVRDLPQGFSALEPLVDLPIGINITRFQTLLALHRSYLTPGDSSSGWTAGAAAYYVGYLQPRTFLLKYNENGTITDAVDCALDPLSETKCTLKSFTVEKGIYQTSNFRVQPTESIVRFPNITNLCPFGEVFNATRFASVYAWNRKRISNCVADYSVLYNSASFSTFKCYGVSPTKLNDLCFTNVYADSFVIRGDEVRQIAPGQTGKIADYNYKLPDDFTGCVIAWNSNNLDSKVGGNYNYLYRLFRKSNLKPFERDISTEIYQAGSTPCNGVEGFNCYFPLQSYGFQPTNGVGYQPYRVVVLSFELLHAPATVCGPKKSTNLVKNKCVNFNFNGLTGTGVLTESNKKFLPFQQFGRDIADTTDAVRDPQTLEILDITPCSFGGVSVITPGTNTSNQVAVLYQGVNCTEVPVAIHADQLTPTWRVYSTGSNVFQTRAGCLIGAEHVNNSYECDIPIGAGICASYQTQTNSPRRARSVASQSIIAYTMSLGAENSVAYSNNSIACPTNFTISVTTEILPVSMTKTSVDCTMYICGDSTECSNLLLQYGSFCTQLNRALTGIAVEQDKNTQEVFAQVKQIYKTPPIKDFGGFNFSQILPDPSKPSKRSFIEDLLFNKVTLADAGFIKQYGDCLGDIAARDLICAQKFNGLTVLPPLLTDEMIAQYTSALLAGTITSGWTFGAGAALQIPFAMQMAYRFNGIGVTQNVLYENQKLIANQFNSAIGKIQDSLSSTASALGKLQDVVNQNAQALNTLVKQLSSNFGAISSVLNDILSRLDKVEAEVQIDRLITGRLQSLQTYVTQQLIRAAEIRASANLAATKMSECVLGQSKRVDFCGKGYHLMSFPQSAPHGVVFLHVTYVPAQEKNFTTAPAICHDGKAHFPREGVFVSNGTHWFVTQRNFCEPQIITTDNTFVSGNCDVVIGIVNNTVYDPLQPELDSGGGGSDIIKLLNEQVNKEMQSSNLYMSMSSWCYTHSLDGAGLFLFDHAAEEYEHAKKLIIFLNENNVPVQLTSISAPEHKFEGLTQIFQKAYEHEQHISESINNIVDHAIKSKDHATFNFLQWYVAEQHEEEVLFKDILDKIELIGNENHGLYLADQYVKGIAKSRKS

SEQ ID NO: 9060 - protein, 1315 aa, Artificial Sequence
  SARS-CoV-2/Wuhan/HBCDC-HB-02/2020__EPI_ISL_412978 spike protein (1-1147)(I714C_Y1110C) Ferritin construct
MFVFLVLLPLVSSQCVNLTTRTQLPPAYTNSFTRGVYYPDKVFRSSVLHSTQDLFLPFFSNVTWFHAIHVSGTNGTKRFDNPVLPFNDGVYFASTEKSNIIRGWIFGTTLDSKTQSLLIVNNATNVVIKVCEFQFCNDPFLGVYYHKNNKSWMESEFRVYSSANNCTFEYVSQPFLMDLEGKQGNFKNLREFVFKNIDGYFKIYSKHTPINLVRDLPQGFSALEPLVDLPIGINITRFQTLLALHRSYLTPGDSSSGWTAGAAAYYVGYLQPRTFLLKYNENGTITDAVDCALDPLSETKCTLKSFTVEKGIYQTSNFRVQPTESIVRFPNITNLCPFGEVFNATRFASVYAWNRKRISNCVADYSVLYNSASFSTFKCYGVSPTKLNDLCFTNVYADSFVIRGDEVRQIAPGQTGKIADYNYKLPDDFTGCVIAWNSNNLDSKVGGNYNYLYRLFRKSNLKPFERDISTEIYQAGSTPCNGVEGFNCYFPLQSYGFQPTNGVGYQPYRVVVLSFELLHAPATVCGPKKSTNLVKNKCVNFNFNGLTGTGVLTESNKKFLPFQQFGRDIADTTDAVRDPQTLEILDITPCSFGGVSVITPGTNTSNQVAVLYQDVNCTEVPVAIHADQLTPTWRVYSTGSNVFQTRAGCLIGAEHVNNSYECDIPIGAGICASYQTQTNSPRRARSVASQSIIAYTMSLGAENSVAYSNNSIACPTNFTISVTTEILPVSMTKTSVDCTMYICGDSTECSNFLLQYGSFCTQLNRALTGIAVEQDKNTQEVFAQVKQIYKTPPIKDFGGFNFSQILPDPSKPSKRSFIEDLLFNKVTLADAGFIKQYGDCLGDIAARDLICAQKFNGLTVLPPLLTDEMIAQYTSALLAGTITSGWTFGAGAALQIPFAMQMAYRFNGIGVTQNVLYENQKLIANQFNSAIGKIQDSLSSTASALGKLQDVVNQNAQALNTLVKQLSSNFGAISSVLNDILSRLDKVEAEVQIDRLITGRLQSLQTYVTQQLIRAAEIRASANLAATKMSECVLGQSKRVDFCGKGYHLMSFPQSAPHGVVFLHVTYVPAQEKNFTTAPAICHDGKAHFPREGVFVSNGTHWFVTQRNFCEPQIITTDNTFVSGNCDVVIGIVNNTVYDPLQPELDSGGGGSDIIKLLNEQVNKEMQSSNLYMSMSSWCYTHSLDGAGLFLFDHAAEEYEHAKKLIIFLNENNVPVQLTSISAPEHKFEGLTQIFQKAYEHEQHISESINNIVDHAIKSKDHATFNFLQWYVAEQHEEEVLFKDILDKIELIGNENHGLYLADQYVKGIAKSRKS

SEQ ID NO: 9061 - protein, 1315 aa, Artificial Sequence
  SARS-CoV-2/Australia/QLD02/2020__EPI_ISL_407896 spike protein (1-1147)(I714C_Y1110C) Ferritin construct
MFVFLVLLPLVSSQCVNLTTRTQLPPAYTNSFTRGVYYPDKVFRSSVLHSTQDLFLPFFSNVTWFHAIHVSGTNGTKRFDNPVLPFNDGVYFASTEKSNIIRGWIFGTTLDSKTQSLLIVNNATNVVIKVCEFQFCNDPFLGVYYHKNNKSWMESEFRVYSSANNCTFEYVSQPFLMDLEGKQGNFKNLREFVFKNIDGYFKIYSKHTPINLVRDLPQGFSALEPLVDLPIGINITRFQTLLALHRSYLTPGDSSSGWTAGAAAYYVGYLQPRTFLLKYNENGTITDAVDCALDPLSETKCTLKSFTVEKGIYQTSNFRVQPTESIVRFPNITNLCPFGEVFNATRFASVYAWNRKRISNCVADYSVLYNSASFSTFKCYGVSPTKLNDLCFTNVYADSFVIRGDEVRQIAPGQTGKIADYNYKLPDDFTGCVIAWNSNNLDSKVGGNYNYLYRLFRKSNLKPFERDISTEIYQAGSTPCNGVEGFNCYFPLQSYGFQPTNGVGYQPYRVVVLSFELLHAPATVCGPKKSTNLVKNKCVNFNFNGLTGTGVLTESNKKFLPFQQFGRDIADTTDAVRDPQTLEILDITPCSFGGVSVITPGTNTSNQVAVLYQDVNCTEVPVAIHADQLTPTWRVYSTGSNVFQTRAGCLIGAEHVNNSYECDIPIGAGICASYQTQTNSPRRARSVASQSIIAYTMSLGAENSVAYSNNSIACPTNFTISVTTEILPVSMTKTSVDCTMYICGDSTECSNLLLQYGSFCTQLNRALTGIAVEQDKNTQEVFAQVKQIYKTPPIKDFGGFNFSQILPDPSKPSKRSFIEDLLFNKVTLADAGFIKQYGDCLGDIAARDLICAQKFNGLTVLPPLLTDEMIAQYTSALLAGTITSGWTFGAGAALQIPFAMQMAYRFNGIGVTQNVLYENQKLIANQFNSAIGKIQDSLSSTASALGKLQDVVNQNAQALNTLVKQLSSNFGAISSVLNDILSRLDKVEAEVQIDRLITGRLQSLQTYVTQQLIRAAEIRASANLAATKMSECVLGQSKRVDFCGKGYHLMSFPQSAPHGVVFLHVTYVPAQEKNFTTAPAICHDGKAHFPREGVFVSNGTHWFVTQRNFCEPQIITTDNTFVSGNCDVVIGIVNNTVYDPLQLELDSGGGGSDIIKLLNEQVNKEMQSSNLYMSMSSWCYTHSLDGAGLFLFDHAAEEYEHAKKLIIFLNENNVPVQLTSISAPEHKFEGLTQIFQKAYEHEQHISESINNIVDHAIKSKDHATFNFLQWYVAEQHEEEVLFKDILDKIELIGNENHGLYLADQYVKGIAKSRKS

SEQ ID NO: 9062 - protein, 1315 aa, Artificial Sequence
  SARS-CoV-2/India/1-31/2020__EPI_ISL_413523 spike protein (1-1147)(I714C_Y1110C) Ferritin construct
MFVFLVLLPLVSSQCVNLTTRTQLPPAYTNSFTRGVYYPDKVFRSSVLHSTQDLFLPFFSNVTWFHAIHVSGTNGTKRFDNPVLPFNDGVYFASTEKSNIIRGWIFGTTLDSKTQSLLIVNNATNVVIKVCEFQFCNDPFLGVYYHKNNKSWMESEFRVYSSANNCTFEYVSQPFLMDLEGKQGNFKNLREFVFKNIDGYFKIYSKHTPINLVRDLPQGFSALEPLVDLPIGINITRFQTLLALHRSYLTPGDSSSGWTAGAAAYYVGYLQPRTFLLKYNENGTITDAVDCALDPLSETKCTLKSFTVEKGIYQTSNFRVQPTESIVRFPNITNLCPFGEVFNATRFASVYAWNRKRISNCVADYSVLYNSASFSTFKCYGVSPTKLNDLCFTNVYADSFVIRGDEVRQIAPGQTGKIADYNYKLPDDFTGCVIAWNSNNLDSKVGGNYNYLYRLFRKSNLKPFERDISTEIYQAGSTPCNGVEGFNCYFPLQSYGFQPTNGVGYQPYRVVVLSFELLHAPATVCGPKKSTNLVKNKCVNFNFNGLTGTGVLTESNKKFLPFQQFGRDIADTTDAVRDPQTLEILDITPCSFGGVSVITPGTNTSNQVAVLYQDVNCTEVPVAIHADQLTPTWRVYSTGSNVFQTRAGCLIGAEHVNNSYECDIPIGAGICASYQTQTNSPRRARSVASQSIIAYTMSLGAENSVAYSNNSIACPTNFTISVTTEILPVSMTKTSVDCTMYICGDSTECSNLLLQYGSFCTQLNRALTGIAVEQDKNTQEVFAQVKQIYKTPPIKDFGGFNFSQILPDPSKPSKRSFIEDLLFNKVTLADAGFIKQYGDCLGDIAARDLICAQKFNGLTVLPPLLTDEMIAQYTSALLAGTITSGWTFGAGAALQIPFAMQMAYRFNGIGVTQNVLYENQKLIANQFNSVIGKIQDSLSSTASALGKLQDVVNQNAQALNTLVKQLSSNFGAISSVLNDILSRLDKVEAEVQIDRLITGRLQSLQTYVTQQLIRAAEIRASANLAATKMSECVLGQSKRVDFCGKGYHLMSFPQSAPHGVVFLHVTYVPAQEKNFTTAPAICHDGKAHFPREGVFVSNGTHWFVTQRNFCEPQIITTDNTFVSGNCDVVIGIVNNTVYDPLQPELDSGGGGSDIIKLLNEQVNKEMQSSNLYMSMSSWCYTHSLDGAGLFLFDHAAEEYEHAKKLIIFLNENNVPVQLTSISAPEHKFEGLTQIFQKAYEHEQHISESINNIVDHAIKSKDHATFNFLQWYVAEQHEEEVLFKDILDKIELIGNENHGLYLADQYVKGIAKSRKS

SEQ ID NO: 9063 - protein, 1315 aa, Artificial Sequence
  SARS-CoV-2/Guangdong/GD2020087-P0008/2020__EPI_ISL_413863 spike protein (1-1147)(I714C_Y1110C) Ferritin construct
MFVFLVLLPLVSSQCVNLTTRTQLPPAYTNSFTRGVYYPDKVFRSSVLHSTQDLFLPFFSNVTWFHAIHVSGTNGTKRFDNPVLPFNDGVYFASTEKSNIIRGWIFGTTLDSKTQSLLIVNNATNVVIKVCEFQFCNDPFLGVYYHKNNKSWMESEFRVYSSANNCTFEYVSQPFLMDLEGKQGNFKNLREFVFKNIDGYFKIYSKHTPINLVRDLPQGFSALEPLVDLPIGINITRFQTLLALHRSYLTPGDSSSGWTAGAAAYYVGYLQPRTFLLKYNENGTITDAVDCALDPLSETKCTLKSFTVEKGIYQTSNFRVQPTESIVRFPNITNLCPFGEVFNATRFASVYAWNRKRISNCVADYSVLYNSASFSTFKCYGVSPTKLNDLCFTNVYADSFVIRGDEVREIAPGQTGKIADYNYKLPDDFTGCVIAWNSNNLDSKVGGNYNYLYRLFRKSNLKPFERDISTEIYQAGSTPCNGVEGFNCYFPLQSYGFQPTNGVGYQPYRVVVLSFELLHAPATVCGPKKSTNLVKNKCVNFNFNGLTGTGVLTESNKKFLPFQQFGRDIADTTDAVRDPQTLEILDITPCSFGGVSVITPGTNTSNQVAVLYQDVNCTEVPVAIHADQLTPTWRVYSTGSNVFQTRAGCLIGAEHVNNSYECDIPIGAGICASYQTQTNSPRRARSVASQSIIAYTMSLGAENSVAYSNNSIACPTNFTISVTTEILPVSMTKTSVDCTMYICGDSTECSNLLLQYGSFCTQLNRALTGIAVEQDKNTQEVFAQVKQIYKTPPIKDFGGFNFSQILPDPSKPSKRSFIEDLLFNKVTLADAGFIKQYGDCLGDIAARDLICAQKFNGLTVLPPLLTDEMIAQYTSALLAGTITSGWTFGAGAALQIPFAMQMAYRFNGIGVTQNVLYENQKLIANQFNSAIGKIQDSLSSTASALGKLQDVVNQNAQALNTLVKQLSSNFGAISSVLNDILSRLDKVEAEVQIDRLITGRLQSLQTYVTQQLIRAAEIRASANLAATKMSECVLGQSKRVDFCGKGYHLMSFPQSAPHGVVFLHVTYVPAQEKNFTTAPAICHDGKAHFPREGVFVSNGTHWFVTQRNFCEPQIITTDNTFVSGNCDVVIGIVNNTVYDPLQPELDSGGGGSDIIKLLNEQVNKEMQSSNLYMSMSSWCYTHSLDGAGLFLFDHAAEEYEHAKKLIIFLNENNVPVQLTSISAPEHKFEGLTQIFQKAYEHEQHISESINNIVDHAIKSKDHATFNFLQWYVAEQHEEEVLFKDILDKIELIGNENHGLYLADQYVKGIAKSRKS

SEQ ID NO: 9064 - protein, 1315 aa, Artificial Sequence
  SARS-CoV-2/Sweden/01/2020__EPI_ISL_411951 spike protein (1-1147)(I714C_Y1110C) Ferritin construct
MFVFLVLLPLVSSQCVNLTTRTQLPPAYTNSFTRGVYYPDKVFRSSVLHSTQDLFLPFFSNVTWFHAIHVSGTNGTKRFDNPVLPFNDGVYFASTEKSNIIRGWIFGTTLDSKTQSLLIVNNATNVVIKVCEFQFCNDPFLGVYYHKNNKSWMESEFRVYSSANNCTFEYVSQPFLMDLEGKQGNFKNLREFVFKNIDGYFKIYSKHTPINLVRDLPQGFSALEPLVDLPIGINITRFQTLLALHRSYLTPGDSSSGWTAGAAAYYVGYLQPRTFLLKYNENGTITDAVDCALDPLSETKCTLKSFTVEKGIYQTSNFRVQPTESIVRFPNITNLCPFGEVFNATRFASVYAWNRKRISNCVADYSVLYNSASFSTFKCYGVSPTKLNDLCFTNVYADSFVIRGDEVRQIAPGQTGKIADYNYKLPDDFTGCVIAWNSNNLDSKVGGNYNYLYRLFRKSNLKPFERDISTEIYQAGSTPCNGVEGFNCYFPLQSYGFQPTNGVGYQPYRVVVLSFELLHAPATVCGPKKSTNLVKNKCVNFNFNGLTGTGVLTESNKKFLPFQQFGRDIADTTDAVRDPQTLEILDITPCSFGGVSVITPGTNTSNQVAVLYQDVNCTEVPVAIHADQLTPTWRVYSTGSNVFQTRAGCLIGAEHVNNSYECDIPIGAGICASYQTQTNSPRRARSVASQSIIAYTMSLGAENSVAYSNNSIACPTNFTISVTTEILPVSMTKTSVDCTMYICGDSTECSNLLLQYGSFCTQLNRALTGIAVEQDKNTQEVFAQVKQIYKTPPIKDCGGFNFSQILPDPSKPSKRSFIEDLLFNKVTLADAGFIKQYGDCLGDIAARDLICAQKFNGLTVLPPLLTDEMIAQYTSALLAGTITSGWTFGAGAALQIPFAMQMAYRFNGIGVTQNVLYENQKLIANQFNSAIGKIQDSLSSTASALGKLQDVVNQNAQALNTLVKQLSSNFGAISSVLNDILSRLDKVEAEVQIDRLITGRLQSLQTYVTQQLIRAAEIRASANLAATKMSECVLGQSKRVDFCGKGYHLMSFPQSAPHGVVFLHVTYVPAQEKNFTTAPAICHDGKAHFPREGVFVSNGTHWFVTQRNFCEPQIITTDNTFVSGNCDVVIGIVNNTVYDPLQPELDSGGGGSDIIKLLNEQVNKEMQSSNLYMSMSSWCYTHSLDGAGLFLFDHAAEEYEHAKKLIIFLNENNVPVQLTSISAPEHKFEGLTQIFQKAYEHEQHISESINNIVDHAIKSKDHATFNFLQWYVAEQHEEEVLFKDILDKIELIGNENHGLYLADQYVKGIAKSRKS

SEQ ID NO: 9065 - protein, 1315 aa, Artificial Sequence
  SARS-CoV-2/Tianmen/HBCDC-HB-07/2020__EPI_ISL_412983 spike protein (1-1147)(I714C_Y1110C) Ferritin construct
MFVFLVLLPLVSSQCVNLTTRTQLPPAYTNSFTRGVYYPDKVFRSSVLHSTQDLFLPFFSNVTWFHAIHVSGTNGTKRFDNPVLPFNDGVYFASTEKSNIIRGWIFGTTLDSKTQSLLIVNNATNVVIKVCEFQFCNDPFLGVYYHKNNKSWMESEFRVYSSANNCTFEYVSQPFLMDLEGKQGNFKNLREFVFKNIDGYFKIYSKHTPINLVRDLPQGFSALEPLVDLPIGINITRFQTLLALHRSYLTPGDSSSGWTAGAAAYYVGYLQPRTFLLKYNENGTITDAVDCALDPLSETKCTLKSFTVEKGIYQTSNFRVQPTESIVRFPNITNLCPFGEVFNATRFASVYAWNRKRISNCVADYSVLYNSASFSTFKCYGVSPTKLNDLCFTNVYADSFVIRGDEVRQIAPGQTGKIADYNYKLPDDFTGCVIAWNSNNLDSKVGGNYNYLYRLFRKSNLKPFERDISTEIYQAGSTPCNGVEGFNCYFPLQSYGFQPTNGVGYQPYRVVVLSFELLHAPATVCGPKKSTNLVKNKCVNFNFNGLTGTGVLTESNKKFLPFQQFGRDIADTTDAVRDPQTLEILDITPCSFGGVSVITPGTNTSNQVAVLYQDLNCTEVPVAIHADQLTPTWRVYSTGSNVFQTRAGCLIGAEHVNNSYECDIPIGAGICASYQTQTNSPRRARSVASQSIIAYTMSLGAENSVAYSNNSIACPTNFTISVTTEILPVSMTKTSVDCTMYICGDSTECSNLLLQYGSFCTQLNRALTGIAVEQDKNTQEVFAQVKQIYKTPPIKDFGGFNFSQILPDPSKPSKRSFIEDLLFNKVTLADAGFIKQYGDCLGDIAARDLICAQKFNGLTVLPPLLTDEMIAQYTSALLAGTITSGWTFGAGAALQIPFAMQMAYRFNGIGVTQNVLYENQKLIANQFNSAIGKIQDSLSSTASALGKLQDVVNQNAQALNTLVKQLSSNFGAISSVLNDILSRLDKVEAEVQIDRLITGRLQSLQTYVTQQLIRAAEIRASANLAATKMSECVLGQSKRVDFCGKGYHLMSFPQSAPHGVVFLHVTYVPAQEKNFTTAPAICHDGKAHFPREGVFVSNGTHWFVTQRNFCEPQIITTDNTFVSGNCDVVIGIVNNTVYDPLQPELDSGGGGSDIIKLLNEQVNKEMQSSNLYMSMSSWCYTHSLDGAGLFLFDHAAEEYEHAKKLIIFLNENNVPVQLTSISAPEHKFEGLTQIFQKAYEHEQHISESINNIVDHAIKSKDHATFNFLQWYVAEQHEEEVLFKDILDKIELIGNENHGLYLADQYVKGIAKSRKS

SEQ ID NO: 9066 - protein, 1315 aa, Artificial Sequence
  SARS-CoV-2/Hong Kong/case42_VM20002493/2020__EPI_ISL_414527 spike protein (1-1147)(I714C_Y1110C) Ferritin construct
MFVFLVLLPLVSSQCVNLTTRTQLPPAYTNSFTRGVYYPDKVFRSSVLHSTQDLFLPFFSNVTWFHAIHVSGTNGTKRFDNPVLPFNDGVYFASTEKSNIIRGWIFGTTLDSKTQSLLIVNNATNVVIKVCEFQFCNDPFLGVYYHKNNKSWMESEFRVYSSANNCTFEYVSQPFLMDLEGKQGNFKNLREFVFKNIDGYFKIYSKHTPINLVRDLPQGFSALEPLVDLPIGINITRFQTLLALHRSYLTPGDSSSGWTAGAAAYYVGYLQPRTFLLKYNENGTITDAVDCALDPLSETKCTLKSFTVEKGIYQTSNFRVQPTESIVRFPNITNLCPFGEVFNATRFASVYAWNRKRISNCVADYSVLYNSASFSTFKCYGVSPTKLNDLCFTNVYADSFVIRGDEVRQIAPGQTGKIADYNYKLPDDFTGCVIAWNSNNLDSKVGGNYNYLYRLFRKSNLKPFERDISTEIYQAGSTPCNGVEGFNCYFPLQSYGFQPTNGVGYQPYRVVVLSFELLHAPATVCGPKKSTNLVKNKCVNFNFNGLTGTGVLTESNKKFLPFQQFGRDIADTTDAVRDPQTLEILDITPCSFGGVSVITPGTNTSNQVAVLYQDVNCTEVPVAIHADQLTPTWRVYSTGSNVFQTRAGCLIGAEHVNNSYECDIPIGAGICASYQTQTNSPRRARSVASQSIIAYTMSLGAENSVAYSNNSIACPTNFAISVTTEILPVSMTKTSVDCTMYICGDSTECSNLLLQYGSFCTQLNRALTGIAVEQDKNTQEVFAQVKQIYKTPPIKDFGGFNFSQILPDPSKPSKRSFIEDLLFNKVTLADAGFIKQYGDCLGDIAARDLICAQKFNGLTVLPPLLTDEMIAQYTSALLAGTITSGWTFGAGAALQIPFAMQMAYRFNGIGVTQNVLYENQKLIANQFNSAIGKIQDSLSSTASALGKLQDVVNQNAQALNTLVKQLSSNFGAISSVLNDILSRLDKVEAEVQIDRLITGRLQSLQTYVTQQLIRAAEIRASANLAATKMSECVLGQSKRVDFCGKGYHLMSFPQSAPHGVVFLHVTYVPAQEKNFTTAPAICHDGKAHFPREGVFVSNGTHWFVTQRNFCEPQIITTDNTFVSGNCDVVIGIVNNTVYDPLQPELDSGGGGSDIIKLLNEQVNKEMQSSNLYMSMSSWCYTHSLDGAGLFLFDHAAEEYEHAKKLIIFLNENNVPVQLTSISAPEHKFEGLTQIFQKAYEHEQHISESINNIVDHAIKSKDHATFNFLQWYVAEQHEEEVLFKDILDKIELIGNENHGLYLADQYVKGIAKSRKS

SEQ ID NO: 9067 - protein, 1315 aa, Artificial Sequence
  SARS-CoV-2/USA/CruiseA-23/2020__EPI_ISL_414482 spike protein (1-1147)(I714C_Y1110C) Ferritin construct
MFVFLVLLPLVSSQCVNLTTRTQLPPAYTNSFTRGVYYPDKVFRSSVLHSTQDLFLPFFSNVTWFHAIHVSGTNGTKRFDNPVLPFNDGVYFASTEKSNIIRGWIFGTTLDSKTQSLLIVNNATNVVIKVCEFQFCNDPFLGVYYHKNNKSWMESEFRVYSSANNCTFEYVSQPFLMDLEVKQGNFKNLREFVFKNIDGYFKIYSKHTPINLVRDLPQGFSALEPLVDLPIGINITRFQTLLALHRSYLTPGDSSSGWTAGAAAYYVGYLQPRTFLLKYNENGTITDAVDCALDPLSETKCTLKSFTVEKGIYQTSNFRVQPTESIVRFPNITNLCPFGEVFNATRFASVYAWNRKRISNCVADYSVLYNSASFSTFKCYGVSPTKLNDLCFTNVYADSFVIRGDEVRQIAPGQTGKIADYNYKLPDDFTGCVIAWNSNNLDSKVGGNYNYLYRLFRKSNLKPFERDISTEIYQAGSTPCNGVEGFNCYFPLQSYGFQPTNGVGYQPYRVVVLSFELLHAPATVCGPKKSTNLVKNKCVNFNFNGLTGTGVLTESNKKFLPFQQFGRDIADTTDAVRDPQTLEILDITPCSFGGVSVITPGTNTSNQVAVLYQDVNCTEVPVAIHADQLTPTWRVYSTGSNVFQTRAGCLIGAEHVNNSYECDIPIGAGICASYQTQTNSPRRARSVASQSIIAYTMSLGAENSVAYSNNSIACPTNFTISVTTEILPVSMTKTSVDCTMYICGDSTECSNLLLQYGSFCTQLNRALTGIAVEQDKNTQEVFAQVKQIYKTPPIKDFGGFNFSQILPDPSKPSKRSFIEDLLFNKVTLADAGFIKQYGDCLGDIAARDLICAQKFNGLTVLPPLLTDEMIAQYTSALLAGTITSGWTFGAGAALQIPFAMQMAYRFNGIGVTQNVLYENQKLIANQFNSAIGKIQDSLSSTASALGKLQDVVNQNAQALNTLVKQLSSNFGAISSVLNDILSRLDKVEAEVQIDRLITGRLQSLQTYVTQQLIRAAEIRASANLAATKMSECVLGQSKRVDFCGKGYHLMSFPQSAPHGVVFLHVTYVPAQEKNFTTAPAICHDGKAHFPREGVFVSNGTHWFVTQRNFCEPQIITTDNTFVSGNCDVVIGIVNNTVYDPLQPELDSGGGGSDIIKLLNEQVNKEMQSSNLYMSMSSWCYTHSLDGAGLFLFDHAAEEYEHAKKLIIFLNENNVPVQLTSISAPEHKFEGLTQIFQKAYEHEQHISESINNIVDHAIKSKDHATFNFLQWYVAEQHEEEVLFKDILDKIELIGNENHGLYLADQYVKGIAKSRKS

SEQ ID NO: 9068 - protein, 1315 aa, Artificial Sequence
  SARS-CoV-2/Hong Kong/case85_VM20002868/2020__EPI_ISL_414519 spike protein (1-1147)(I714C_Y1110C) Ferritin construct
MFVFLVLVPLVSSQCVNLTTRTQLPPAYTNSFTRGVYYPDKVFRSSVLHSTQDLFLPFFSNVTWFHAIHVSGTNGTKRFDNPVLPFNDGVYFASTEKSNIIRGWIFGTTLDSKTQSLLIVNNATNVVIKVCEFQFCNDPFLGVYYHKNNKSWMESEFRVYSSANNCTFEYVSQPFLMDLEGKQGNFKNLREFVFKNIDGYFKIYSKHTPINLVRDLPQGFSALEPLVDLPIGINITRFQTLLALHRSYLTPGDSSSGWTAGAAAYYVGYLQPRTFLLKYNENGTITDAVDCALDPLSETKCTLKSFTVEKGIYQTSNFRVQPTESIVRFPNITNLCPFGEVFNATRFASVYAWNRKRISNCVADYSVLYNSASFSTFKCYGVSPTKLNDLCFTNVYADSFVIRGDEVRQIAPGQTGKIADYNYKLPDDFTGCVIAWNSNNLDSKVGGNYNYLYRLFRKSNLKPFERDISTEIYQAGSTPCNGVEGFNCYFPLQSYGFQPTNGVGYQPYRVVVLSFELLHAPATVCGPKKSTNLVKNKCVNFNFNGLTGTGVLTESNKKFLPFQQFGRDIADTTDAVRDPQTLEILDITPCSFGGVSVITPGTNTSNQVAVLYQDVNCTEVPVAIHADQLTPTWRVYSTGSNVFQTRAGCLIGAEHVNNSYECDIPIGAGICASYQTQTNSPRRARSVASQSIIAYTMSLGAENSVAYSNNSIACPTNFTISVTTEILPVSMTKTSVDCTMYICGDSTECSNLLLQYGSFCTQLNRALTGIAVEQDKNTQEVFAQVKQIYKTPPIKDFGGFNFSQILPDPSKPSKRSFIEDLLFNKVTLADAGFIKQYGDCLGDIAARDLICAQKFNGLTVLPPLLTDEMIAQYTSALLAGTITSGWTFGAGAALQIPFAMQMAYRFNGIGVTQNVLYENQKLIANQFNSAIGKIQDSLSSTASALGKLQDVVNQNAQALNTLVKQLSSNFGAISSVLNDILSRLDKVEAEVQIDRLITGRLQSLQTYVTQQLIRAAEIRASANLAATKMSECVLGQSKRVDFCGKGYHLMSFPQSAPHGVVFLHVTYVPAQEKNFTTAPAICHDGKAHFPREGVFVSNGTHWFVTQRNFCEPQIITTDNTFVSGNCDVVIGIVNNTVYDPLQPELDSGGGGSDIIKLLNEQVNKEMQSSNLYMSMSSWCYTHSLDGAGLFLFDHAAEEYEHAKKLIIFLNENNVPVQLTSISAPEHKFEGLTQIFQKAYEHEQHISESINNIVDHAIKSKDHATFNFLQWYVAEQHEEEVLFKDILDKIELIGNENHGLYLADQYVKGIAKSRKS

SEQ ID NO: 9069 - protein, 1315 aa, Artificial Sequence; identical to SEQ ID NO: 9059
  SARS-CoV-2/England/200990660/2020__EPI_ISL_414523 spike protein (1-1147)(I714C_Y1110C) Ferritin construct

SEQ ID NO: 9070 - protein, 1315 aa, Artificial Sequence
  SARS-CoV-2/Australia/NSW09/2020__EPI_ISL_413595 spike protein (1-1147)(I714C_Y1110C) Ferritin construct
MFVFLVLLPLVSSQCVNLTTRTQLPPAYTNSFTRGVYYPDKVFRSSVLHSTQDLFLPFFSNVTWFHAIHVSGTNGTKRFDNPVLPFNDGVYFASTEKSNIIRGWIFGTTLDSKTQSLLIVNNATNVVIKVCEFQFCNDPFLGVYYHKNNKSWMESEFRVYSSANNCTFEYVSQPFLMDLEGKQGNFKNLREFVFKNIDGYFKIYSKHTPINLVRDLPQGFSALEPLVDLPIGINITRFQTLLALHRSYLTPGDSSSGWTAGAAAYYVGYLQPRTFLLKYNENGTITDAVDCALDPLSETKCTLKSFTVEKGIYQTSNFRVQPTESIVRFPNITNLCPFGEVFNATRFASVYAWNRKRISNCVADYSVLYNSASFSTFKCYGVSPTKLNDLCFTNVYADSFVIRGDEVRQIAPGQTGKIADYNYKLPDDFTGCVIAWNSNNLDSKVGGNYNYLYRLFRKSNLKPFERDISTEIYQAGSTPCNGVEGFNCYFPLQSYGFQPTNGVGYQPYRVVVLSFELLHAPATVCGPKKSTNLVKNKCVNFNFNGLTGTGVLTESNKKFLPFQQFGRDIADTTDAVRDPQTLEILDITPCSFGGVSVITPGTNTSNQVAVLYQDVNCTEVPVAIHADQLTPTWRVYSTGSNVFQTRAGCLIGAEHVNNSYECDIPIGAGICASYQTQTNSPRRARSVASQSIIAYTMSLGAENSVAYSNNSIACPTNFTISVTTEILPVSMTKTSVDCTMYICGDSTECSNLLLQYGSFCTQLNRALTGIAVEQDKNTQEVFAQVKQIYKTPPIKDFGGFNFSQILPDPSKPSKRSFIEDLLFNKVTLADAGFIKQYGDCLGDIAARDLICAQKFNGLTVLPPLLTDEMIAQYTSALLAGTITSGWTFGAGAALQIPFAMQMAYRFNGIGVTQNVLYENQKLIANQFNSAIGKIQDSLSFTASALGKLQDVVNQNAQALNTLVKQLSSNFGAISSVLNDILSRLDKVEAEVQIDRLITGRLQSLQTYVTQQLIRAAEIRASANLAATKMSECVLGQSKRVDFCGKGYHLMSFPQSAPHGVVFLHVTYVPAQEKNFTTAPAICHDGKAHFPREGVFVSNGTHWFVTQRNFCEPQIITTDNTFVSGNCDVVIGIVNNTVYDPLQPELDSGGGGSDIIKLLNEQVNKEMQSSNLYMSMSSWCYTHSLDGAGLFLFDHAAEEYEHAKKLIIFLNENNVPVQLTSISAPEHKFEGLTQIFQKAYEHEQHISESINNIVDHAIKSKDHATFNFLQWYVAEQHEEEVLFKDILDKIELIGNENHGLYLADQYVKGIAKSRKS

SEQ ID NO: 9071 - protein, 1315 aa, Artificial Sequence; identical to SEQ ID NO: 9051
  SARS-CoV-2/Australia/NSW10/2020__EPI_ISL_413596 spike protein (1-1147)(I714C_Y1110C) Ferritin construct

SEQ ID NO: 9072 - protein, 1315 aa, Artificial Sequence
  SARS-CoV-2/Switzerland/1000477797/2020__EPI_ISL_413023 spike protein (1-1147)(I714C_Y1110C) Ferritin construct
MFVFLVLLPLVSSQCVNLTTRTQLPPAYTNSFTRGVYYPDKVFRSSVLHSTQDLFLPFFSNVTWFHAIHVSGTNGTKRFDNPVLPFNDGVYFASTEKSNIIRGWIFGTTLDSKTQSLLIVNNATNVVIKVCEFQFCNDPFLGVYYHKNNKSWMESEFRVYSSANNCTFEYVSQPFLMDLEGKQGNFKNLREFVFKNIDGYFNIYSKHTPINLVRDLPQGFSALEPLVDLPIGINITRFQTLLALHRSYLTPGDSSSGWTAGAAAYYVGYLQPRTFLLKYNENGTITDAVDCALDPLSETKCTLKSFTVEKGIYQTSNFRVQPTESIVRFPNITNLCPFGEVFNATRFASVYAWNRKRISNCVADYSVLYNSASFSTFKCYGVSPTKLNDLCFTNVYADSFVIRGDEVRQIAPGQTGKIADYNYKLPDDFTGCVIAWNSNNLDSKVGGNYNYLYRLFRKSNLKPFERDISTEIYQAGSTPCNGVEGFNCYFPLQSYGFQPTNGVGYQPYRVVVLSFELLHAPATVCGPKKSTNLVKNKCVNFNFNGLTGTGVLTESNKKFLPFQQFGRDIADTTDAVRDPQTLEILDITPCSFGGVSVITPGTNTSNQVAVLYQGVNCTEVPVAIHADQLTPTWRVYSTGSNVFQTRAGCLIGAEHVNNSYECDIPIGAGICASYQTQTNSPRRARSVASQSIIAYTMSLGAENSVAYSNNSIACPTNFTISVTTEILPVSMTKTSVDCTMYICGDSTECSNLLLQYGSFCTQLNRALTGIAVEQDKNTQEVFAQVKQIYKTPPIKDFGGFNFSQILPDPSKPSKRSFIEDLLFNKVTLADAGFIKQYGDCLGDIAARDLICAQKFNGLTVLPPLLTDEMIAQYTSALLAGTITSGWTFGAGAALQIPFAMQMAYRFNGIGVTQNVLYENQKLIANQFNSAIGKIQDSLSSTASALGKLQDVVNQNAQALNTLVKQLSSNFGAISSVLNDILSRLDKVEAEVQIDRLITGRLQSLQTYVTQQLIRAAEIRASANLAATKMSECVLGQSKRVDFCGKGYHLMSFPQSAPHGVVFLHVTYVPAQEKNFTTAPAICHDGKAHFPREGVFVSNGTHWFVTQRNFCEPQIITTDNTFVSGNCDVVIGIVNNTVYDPLQPELDSGGGGSDIIKLLNEQVNKEMQSSNLYMSMSSWCYTHSLDGAGLFLFDHAAEEYEHAKKLIIFLNENNVPVQLTSISAPEHKFEGLTQIFQKAYEHEQHISESINNIVDHAIKSKDHATFNFLQWYVAEQHEEEVLFKDILDKIELIGNENHGLYLADQYVKGIAKSRKS

SEQ ID NO: 9073 - protein, 1315 aa, Artificial Sequence
  SARS-CoV-2/Belgium/BA-02291/2020__EPI_ISL_415159 spike protein (1-1147)(I714C_Y1110C) Ferritin construct
MFVFLVLLPLVSSQCVNLTTRTQLPPAYTNSFTRGVYYPDKVFRSSVLHSTQDLFLPFFSNVTWFHAIHVSGTNGTKRFDNPVLPFNDGVYFASTEKSNIIRGWIFGTTLDSKTQSLLIVNNATNVVIKVCEFQFCNDPFLGVYYHKNNKSWMESEFRVYSSANNCTFEYVSQPFLMDLEGKQGNFKNLREFVFKNIDGYFKIYSKHTPINLVRDLPQGFSALEPLVDLPIGINITRFQTLLALHRSYLTPGDSSSGWTAGAAAYYVGYLQPRTFLLKYNENGTITDAVDCALDPLSETKCTLKSFTVEKGIYQTSNFRVQPTESIVRFPNITNLCPFGEVFNATRFASVYAWNRKRISNCVADYSVLYNSASFSTFKCYGVSPTKLNDLCFTNVYADSFVIRGDEVRQIAPGQTGKIADYNYKLPDDFTGCVIAWNSNNLDSKVGGNYNYLYRLFRRSNLKPFERDISTEIYQAGSTPCNGVEGFNCYFPLQSYGFQPTNGVGYQPYRVVVLSFELLPAPATVCGPKKSTNLVKNKCVNFNFNGLTGTGVLTESNKKFLPFQQFGRDIADTTDAVRDPQTLEILDITPCSFGGVSVITPGTNTSNQVAVLYQGVNCTEVPVAIHADQLTPTWRVYSTGSNVFQTRAGCLIGAEHVNNSYECDIPIGAGICASYQTQTNSPRRARSVASQSIIAYTMSLGAENSVAYSNNSIACPTNFTISVTTEILPVSMTKTSVDCTMYICGDSTECSNLLLQYGSFCTQLNRALTGIAVEQDKNTQEVFAQVKQIYKTPPIKDFGGFNFSQILPDPSKPSKRSFIEDLLFNKVTLADAGFIKQYGDCLGDIAARDLICAQKFNGLTVLPPLLTDEMIAQYTSALLAGTITSGWTFGAGAALQIPFAMQMAYRFNGIGVTQNVLYENQKLIANQFNSAIGKIQDSLSSAAPALGKLQDVVNQNAQALNTLVKQLSSNFGAISSVLNDILSRLDKVEAEVQIDRLITGRLQSLQTYVTQQLIRAAEIRASANLAATKMSECVLGQSKRVDFCGKGYHLMSFPQSAPHGVVFLHVTYVPAQEKNFTTAPAICHDGKAHFPREGVFVSNGTHWFVTQRNFCEPQIITTDNTFVSGNCDVVIGIVNNTVYDPLQPELDSGGGGSDIIKLLNEQVNKEMQSSNLYMSMSSWCYTHSLDGAGLFLFDHAAEEYEHAKKLIIFLNENNVPVQLTSISAPEHKFEGLTQIFQKAYEHEQHISESINNIVDHAIKSKDHATFNFLQWYVAEQHEEEVLFKDILDKIELIGNENHGLYLADQYVKGIAKSRKS

SEQ ID NO: 9074 - protein, 1315 aa, Artificial Sequence
  SARS-CoV-2/USA/WA8-UW5/2020__EPI_ISL_413486 spike protein (1-1147)(I714C_Y1110C) Ferritin construct
MFVFLVLLPLVSSQCVNLTTRTQLPPAYTNSFTRGVYYPDKVFRSSVLHSTQDLFLPFFSNVTWFHAIHVSGTNGTKRFDNPVLPFNDGVYFASTEKSNIIRGWIFGTTLDSKTQSLLIVNNATNVVIKVCEFQFCNDPFLGVYYHKNNKSWMESEFRVYSSANNCTFEYVSQPFLMDLEGKQGNFKNLREFVFKNIDGYFKIYSKHTPINLVRDLPQGFSALEPLVDLPIGINITRFQTLLALHRSYLTPGDSSSGWTAGAAAYYVGYLQPRTFLLKYNENGTITDAVDCALDPLSETKCTLKSFTVEKGIYQTSNFRVQPTESIVRFPNITNLCPFGEVFNATRFASVYAWNRKRISNCVADYSVLYNSASFSTFKCYGVSPTKLNDLCFTNVYADSFVIRGDEVRQIAPGQTGKIADYNYKLPDDFTGCVIAWNSNNLDSKVGGNYNYLYRLFRKSNLKPFERDISTEIYQAGSTPCNGVEGFNCYFPLQSYGFQPTNGVGYQPYRVVVLSFELLHAPATVCGPKKSTNLVKNKCVNFNFNGLTGTGVLTESNKKFLPFQQFGRDIADTTDAVRDPQTLEILDITPCSFGGVSVITPGTNTSNQVAVLYQDVNCTEVPVAIHADQLTPTWRVYSTGSNVFQTRAGCLIGAEYVNNSYECDIPIGAGICASYQTQTNSPRRARSVASQSIIAYTMSLGAENSVAYSNNSIACPTNFTISVTTEILPVSMTKTSVDCTMYICGDSTECSNLLLQYGSFCTQLNRALTGIAVEQDKNTQEVFAQVKQIYKTPPIKDFGGFNFSQILPDPSKPSKRSFIEDLLFNKVTLADAGFIKQYGDCLGDIAARDLICAQKFNGLTVLPPLLTDEMIAQYTSALLAGTITSGWTFGAGAALQIPFAMQMAYRFNGIGVTQNVLYENQKLIANQFNSAIGKIQDSLSSTASALGKLQDVVNQNAQALNTLVKQLSSNFGAISSVLNDILSRLDKVEAEVQIDRLITGRLQSLQTYVTQQLIRAAEIRASANLAATKMSECVLGQSKRVDFCGKGYHLMSFPQSAPHGVVFLHVTYVPAQEKNFTTAPAICHDGKAHFPREGVFVSNGTHWFVTQRNFCEPQIITTDNTFVSGNCDVVIGIVNNTVYDPLQPELDSGGGGSDIIKLLNEQVNKEMQSSNLYMSMSSWCYTHSLDGAGLFLFDHAAEEYEHAKKLIIFLNENNVPVQLTSISAPEHKFEGLTQIFQKAYEHEQHISESINNIVDHAIKSKDHATFNFLQWYVAEQHEEEVLFKDILDKIELIGNENHGLYLADQYVKGIAKSRKS

SEQ ID NO: 9075 - protein, 1315 aa, Artificial Sequence
  SARS-CoV-2/England/20102000506/2020__EPI_ISL_415147 spike protein (1-1147)(I714C_Y1110C) Ferritin construct
MFVFLVLLPLVSSQCVNLTTRTQLPPAYTNSFTRGVYYPDKVFRSSVLHSTQDLFLPFFSNVTWFHAIHVSGTNGTKRFDNPVLPFNDGVYFASTEKSNIIRGWIFGTTLDSKTQSLLIVNNATNVVIKVCEFQFCNDPFLGVYYHKNNKSWMESEFRVYSSANNCTFEYVSQPFLMDLEGKQGNFKNLREFVFKNIDGYFKIYSKHTPINLVRDLPQGFSALEPLVDLPIGINITRFQTLLALHRSYLTPGDSSSGWTAGAAAYYVGYLQPRTFLLKYNENGTITDAVDCALDPLSETKCTLKSFTVEKGIYQTSNFRVQPTESIVRFPNITNLCPFGEVFNATRFASVYAWNRKRISNCVADYSVLYNSASFSTFKCYGVSPTKLNDLCFTNVYADSFVIRGDEVRQIAPGQTGKIADYNYKLPDDFTGCVIAWNSNNLDSKVGGNYNYLYRLFRKSNLKPFERDISTEIYQAGSTPCNGVEGFNCYFPLQSYGFQPTNGVGYQPYRVVVLSFELLHAPATVCGPKKSTNLVKNKCVNFNFNGLTGTGVLTESNKKFLPFQQFGRDIADTTDAVRDPQTLEILDITPCSFGGVSVITPGTNTSNQVAVLYQGVNCTEVPVAIHADQLTPTWRVYSTGSNVFQTRAGCLIGAEHVNNSYECDIPIGAGICASYQTQTNSPRRARSVASQSIIAYTMSLGAENSVAYSNNSIACPTNFTISVTTEILPVSMTKTSVDCTMYICGDSTECSNLLLQYGSFCTQLNRALTGIAVEQDKNTQEVFAQVKQIYKTPPIKDFGGFNFSQILPDPSKPSKRSFIEDLLFNKVTLADAGFIKQYGYCLGDIAARDLICAQKFNGLTVLPPLLTDEMIAQYTSALLAGTITSGWTFGAGAALQIPFAMQMAYRFNGIGVTQNVLYENQKLIANQFNSAIGKIQDSLSSTASALGKLQDVVNQNAQALNTLVKQLSSNFGAISSVLNDILSRLDKVEAEVQIDRLITGRLQSLQTYVTQQLIRAAEIRASANLAATKMSECVLGQSKRVDFCGKGYHLMSFPQSAPHGVVFLHVTYVPAQEKNFTTAPAICHDGKAHFPREGVFVSNGTHWFVTQRNFCEPQIITTDNTFVSGNCDVVIGIVNNTVYDPLQPELDSGGGGSDIIKLLNEQVNKEMQSSNLYMSMSSWCYTHSLDGAGLFLFDHAAEEYEHAKKLIIFLNENNVPVQLTSISAPEHKFEGLTQIFQKAYEHEQHISESINNIVDHAIKSKDHATFNFLQWYVAEQHEEEVLFKDILDKIELIGNENHGLYLADQYVKGIAKSRKS

SEQ ID NO: 9076 - protein, 1315 aa, Artificial Sequence
  SARS-CoV-2/Belgium/VAG-03013/2020__EPI_ISL_415155 spike protein (1-1147)(I714C_Y1110C) Ferritin construct
MFVFLVLLPLVSSQCVNLTTRTQLPPAYTNSFTRGVYYPDKVFRSSVLHSTQDLFLPFFSNVTWFHAIHVSGTNGTKRFDNPVLPFNDGVYFASTEKSNIIRGWIFGTTLDSKTQSLLIVNNATNVVIKVCEFQFCNDPFLGVYYHKNNKSWMESEFRVYSSANNCTFEYVSQPFLMDLEGKQGNFKNLREFVFKNIDGYFKIYSKHTPINLVRDLPQGFSALEPLVDLPIGINITRFQTLLALHRSYLTPGDSSSGWTAGAAAYYVGYLQPRTFLLKYNENGTITDAVDCALDPLSETKCTLKSFTVEKGIYQTSNFRVQPTESIVRFPNITNLCPFGEVFNATRFASVYAWNRKRISNCVADYSVLYNSASFSTFKCYGVSPTKLNDLCFTNVYADSFVIRGDEVRQIAPGQTGKIADYNYKLPDDFTGCVIAWNSNNLDSKVGGNYNYLYRLFRKSNLKPFERDISTEIYQAGSTPCNGVEGFNCYFPLQSYGFQPTNGVGYQPYRVVVLSFELLHAPATVCGPKKSTNLVKNKCVNFNFNGLTGTGVLTESNKKFLPFQQFGRDIADTTDAVRDPQTLEILDITPCSFGGVSVITPGTNTSNQVAVLYQGVNCTEVPVAIHADQLTPTWRVYSTGSNVFQTRAGCLIGAEHVNNSYECDIPIGAGICASYQTQTNSPRRARSVASQSIIAYTMSLGAENSVAYSNNSIACPTNFTISVTTEILPVSMTKTSVDCTMYICGDSTECSNLLLQYGSFCTQLNRALTGIAVEQDKNTQEVFAQVKQIYKTPPIKDFGGFNFSQILPDPSKPSKRSFIEDLLFNKVTLADAGFIKQYGDCLGDIAARDLICAQKFNGLTVLPPLLTDEMIAQYTSALLAGTITSGWTFGAGAALQIPFAMQMAYRFNGIGVTQNVLYENQKLIANQFNSAIGKIQDSLSSTATALGKLQDVVNQNAQALNTLVKQLSSNFGAISSVLNDILSRLDKVEAEVQIDRLITGRLQSLQTYVTQQLIRAAEIRASANLAATKMSECVLGQSKRVDFCGKGYHLMSFPQSAPHGVVFLHVTYVPAQEKNFTTAPAICHDGKAHFPREGVFVSNGTHWFVTQRNFCEPQIITTDNTFVSGNCDVVIGIVNNTVYDPLQPELDSGGGGSDIIKLLNEQVNKEMQSSNLYMSMSSWCYTHSLDGAGLFLFDHAAEEYEHAKKLIIFLNENNVPVQLTSISAPEHKFEGLTQIFQKAYEHEQHISESINNIVDHAIKSKDHATFNFLQWYVAEQHEEEVLFKDILDKIELIGNENHGLYLADQYVKGIAKSRKS

SEQ ID NO: 9077 - protein, 1315 aa, Artificial Sequence
  SARS-CoV-2/Belgium/BC-03016/2020__EPI_ISL_415157 spike protein (1-1147)(I714C_Y1110C) Ferritin construct
MFVFLVLLPLVSSQCVNLTTRTQLPPAYTNSFTRGVYYPDKVFRSSVLHSTQDLFLPFFSNVTWFHAIHVSGTNGTKRFDNPVLPFNDGVYFASTEKSNIIRGWIFGTTLDSKTQSLLIVNNATNVVIKVCEFQFCNDPFLGVYYHKNNKSWMESEFRVYSSANNCTFEYVSQPFLMDLEGKQGNFKNLREFVFKNIDGYFKIYSKHTPINLVRDLPQGFSALEPLVDLPIGINITRFQTLLALHRSYLTPGDSSSGWTAGAAAYYVGYLQPRTFLLKYNENGTITDAVDCALDPLSETKCTLKSFTVEKGIYQTSNFRVQPTESIVRFPNITNLCPFGEVFNATRFASVYAWNRKRISNCVADYSVLYNSASFSTFKCYGVSPTKLNDLCFTNVYADSFVIRGDEVRQIAPGQTGKIADYNYKLPDDFTGCVIAWNSNNLDSKVGGNYNYLYRLFRKSNLKPFERDISTEIYQAGSTPCNGVEGFNCYFPLQSYGFQPTNGVGYQPYRVVVLSFELLHAPATVCGPKKSTNLVKNKCVNFNFNGLTGTGVLTESNKKFLPFQQFGRDIADTTDAVRDPQTLEILDITPCSFGGVSVITPGTNTSNQVAVLYQGVNCTEVPVAIHADQLTPTWRVYSTGSNVFQTRAGCLIGAEHVNNSYECDIPIGAGICASYQTQTNSPRRARSVASQSIIAYTMSLGAENSVAYSNNSIACPTNFTISVTTEILPVSMTKTSVDCTMYICGDSTECSNLLLQYGSFCTQLNRALTGIAVEQDKNTQEVFAQVKQIYKTPPIKDFGGFNFSQILPDPSKPSKRSFIEDLLFNKVTLADAGFIKQYGDCLGDIAARDLICAQKFNGLTVLPPLLTDEMIAQYTSALLAGTITSGWTFGAGAALQIPFAMQMAYRFNGIGVTQNVLYENQKLIANQFNSAIGKIQDSLSSTAPALGKLQDVVNQNAQALNTLVKQLSSNFGAISSVLNDILSRLDKVEAEVQIDRLITGRLQSLQTYVTQQLIRAAEIRASANLAATKMSECVLGQSKRVDFCGKGYHLMSFPQSAPHGVVFLHVTYVPAQEKNFTTAPAICHDGKAHFPREGVFVSNGTHWFVTQRNFCEPQIITTDNTFVSGNCDVVIGIVNNTVYDPLQPELDSGGGGSDIIKLLNEQVNKEMQSSNLYMSMSSWCYTHSLDGAGLFLFDHAAEEYEHAKKLIIFLNENNVPVQLTSISAPEHKFEGLTQIFQKAYEHEQHISESINNIVDHAIKSKDHATFNFLQWYVAEQHEEEVLFKDILDKIELIGNENHGLYLADQYVKGIAKSRKS

SEQ ID NO: 9078 - protein, 1315 aa, Artificial Sequence
  SARS-CoV-2/Germany/BavPat3/2020__EPI_ISL_414521 spike protein (1-1147)(I714C_Y1110C) Ferritin construct
MFVFLVLLPLVSSQCVNLTTRTQLPPAYTNSFTRGVYYPDKVFRSSVLHSTQDLFLPFFSNVTWFHAIHVSGTNGTKRFDNPVLPFNDGVYFASTEKSNIIRGWIFGTTLDSKTQSLLIVNNATNVVIKVCEFQFCNDPFLGVYYHKNNKSWMESEFRVYSSANNCTFEYVSQPFLMDLEGKQGNFKNLREFVFKNIDGYFKIYSKHTPINLVRDLPQGFSALEPLVDLPIGINITRFQTLLALHRSYLTPGDSSSGWTAGAAAYYVGYLQPRTFLLKYNENGTITDAVDCALDPLSETKCTLKSFTVEKGIYQTSNFRVQPTESIVRFPNITNLCPFGEVFNATRFASVYAWNRKRISNCVADYSVLYNSASFSTFKCYGVSPTKLNDLCFTNVYADSFVIRGDEVRQIAPGQTGKIADYNYKLPDDFTGCVIAWNSNNLDSKVGGNYNYLYRLFRKSNLKPFERDISTEIYQAGSTPCNGVEGFNCYFPLQSYGFQPTNGVGYQPYRVVVLSFELLHAPATVCGPKKSTNLVKNKCVNFNFNGLTGTGVLTESNKKFLPFQQFGRDIADTTDAVRDPQTLEILDITPCSFGGVSVITPGTNTSNQVAVLYQDVNCTEVPVAIHADQLTPTWRVYSTGSNVFQTRAGCLIGAEHVNNSYECDIPIGAGICASYQTQTNSPRRARSVASQSIIAYTMSLGAENSVAYSNNSIACPTNFTISVTTEILPVSMTKTSVDCTMYICGDSTECSNLLLQYGSFCTQLNRALTGIAVEQDKNTQQVFAQVKQIYKTPPIKDFGGFNFSQILPDPSKPSKRSFIEDLLFNKVTLADAGFIKQYGDCLGDIAARDLICAQKFNGLTVLPPLLTDEMIAQYTSALLAGTITSGWTFGAGAALQIPFAMQMAYRFNGIGVTQNVLYENQKLIANQFNSAIGKIQDSLSSTASALGKLQDVVNQNAQALNTLVKQLSSNFGAISSVLNDILSRLDKVEAEVQIDRLITGRLQSLQTYVTQQLIRAAEIRASANLAATKMSECVLGQSKRVDFCGKGYHLMSFPQSAPHGVVFLHVTYVPAQEKNFTTAPAICHDGKAHFPREGVFVSNGTHWFVTQRNFCEPQIITTDNTFVSGNCDVVIGIVNNTVYDPLQPELDSGGGGSDIIKLLNEQVNKEMQSSNLYMSMSSWCYTHSLDGAGLFLFDHAAEEYEHAKKLIIFLNENNVPVQLTSISAPEHKFEGLTQIFQKAYEHEQHISESINNIVDHAIKSKDHATFNFLQWYVAEQHEEEVLFKDILDKIELIGNENHGLYLADQYVKGIAKSRKS

SEQ ID NO: 9079 - protein, 1315 aa, Artificial Sequence
  SARS-CoV-2/France/HF1805/2020__EPI_ISL_414628 spike protein (1-1147)(I714C_Y1110C) Ferritin construct
MFVFLVLLPLVSSQCVNLTTRTQLPPAYTNSFTRGVYYPDKVFRSSVLHSTQDLFLPFFSNVTWFHAIHVSGTNGTKRFDNPVLPFNDGVYFASTEKSNIIRGWIFGTTLDSKTQSLLIVNNATNVVIKVCEFQFCNDPFLGVYYHKNNKSWMESEFRVYSSANNCTFEYVSQPFLMDLEGKQGNFKNLREFVFKNIDGYFKIYSKHTPINLVRDLPQGFSALEPLVDLPIGINITRFQTLLALHRSYLTPGDSSSGWTAGAAAYYVGYLQPRTFLLKYNENGTITDAVDCALDPLSETKCTLKSFTVEKGIYQTSNFRVQPTESIVRFPNITNLCPFGEVFNATRFASVYAWNRKRISNCVADYSVLYNSASFSTFKCYGVSPTKLNDLCFTNVYADSFVIRGDEVRQIAPGQTGKIADYNYKLPDDFTGCVIAWNSNNLDSKVGGNYNYLYRLFRKSNLKPFERDISTEIYQAGSTPCNGVEGFNCYFPLQSYGFQPTNGVGYQPYRVVVLSFELLHAPATVCGPKKSTNLVKNKCVNFNFNGLTGTGVLTESNKKFLPFQQFGRDIADTTDAVRDPQTLEILDITPCSFGGVSVITPGTNTSNQVAVLYQGVNCTEVPVAIHADQLTPTWRVYSTGSNVFQTRAGCLIGAEHVNNSYECDIPIGAGICASYQTQTNSPRRARSVASQSIIAYTMSLGAENSVAYSNNSIACPTNFTISVTTEILPVSMTKTSVDCTMYICGDSTECSNLLLQYGSFCTQLNRALTGIAVEQDKNTQEVFAQVKQIYKTPPIKDFGGFNFSQILPDPSKPSKRSFIEDLLFNKVTLADAGFIKQYGDCLGDIAARDLICAQKFNGLTVLPPLLTDEMIAQYTSALLAGTITSGWTFGAGAALQIPFAMQMAYRFNGIGVTQNVLYENQKLIANQFNSAIGKIQDSLSSTASALGKLQDVVNQNAQALNTLVKQLSSNFGAISSVLNDILSRLDKVEAEVQIDRLITGRLQSLQTYVTQQLIRAAEIRASANLAATKMSECVLGQSKRVDFCGKGYHLMSFPQSAPHGVVFLHVTYVPAQEKNFTTAPAICHDGKAHFPREGVFVSNGTHWFVTQRNFCEPQIITTDNTFVSGNCDVVIGVVNNTVYDPLQPELDSGGGGSDIIKLLNEQVNKEMQSSNLYMSMSSWCYTHSLDGAGLFLFDHAAEEYEHAKKLIIFLNENNVPVQLTSISAPEHKFEGLTQIFQKAYEHEQHISESINNIVDHAIKSKDHATFNFLQWYVAEQHEEEVLFKDILDKIELIGNENHGLYLADQYVKGIAKSRKS

SEQ ID NO: 9080 - protein, 1315 aa, Artificial Sequence
  SARS-CoV-2/Netherlands/ZuidHolland_9/2020__EPI_ISL_414445 spike protein (1-1147)(I714C_Y1110C) Ferritin construct
MFVFLVLLPLVSSQCVNLTTRTQLPPAYTNSFTRGVYYPDKVFRSSVLHSTQDLFLPFFSNVTWFHAIHVSGTNGTKRFDNPVLPFNDGVYFASTEKSNIIRGWIFGTTLDSKTQSLLIVNNATNVVIKVCEFQFCNDPFLGVYYHKNNKSWMESEFRVYSSANNCTFEYVSQPFLMDLEGKQGNFKNLREFVFKNIDGYFKIYSKHTPINLVRDLPQGFSALEPLVDLPIGINITRFQTLLALHRSYLTPGDSSSGWTAGAAAYYVGYLQPRTFLLKYNENGTITDAVDCALDPLSETKCTLKSFTVEKGIYQTSNFRVQPTESIVRFPNITNLCPFGEVFNATRFASVYAWNRKRISNCVADYSVLYNSASFSTFKCYGVSPTKLNDLCFTNVYADSFVIRGDEVRQIAPGQTGKIADYNYKLPDDFTGCVIAWNSNNLDSKVGGNYNYLYRLFRKSNLKPFERDISTEIYQAGSTPCNGVEGFNCYFPLQSYGFQPTNGVGYQPYRVVVLSFELLHAPATVCGPKKSTNLVKNKCVNFNFNGLTGTGVLTESNKKFLPFQQFGRDIADTTDAVRDPQTLEILDITPCSFGGVSVITPGTNTSNQVAVLYQGVNCTEVPVAIHADQLTPTWRVYSTGSNVFQTRAGCLIGAEHVNNSYECDIPIGAGICASYQTQTNSPRRARSVASQSIIAYTMSLGAENSVAYSNNSIACPTNFTISVTTEILPVSMTKTSVDCTMYICGDSTECSNLLLQYGSFCTQLNRALTGIAVEQDKNTQEVFAQVKQIYKTPPIKDFGGFNFSQILPDPSKPSKRSFIEDLLFNKVTLADAGFIKQYGDCLGDIAARDLICVQKFNGLTVLPPLLTDEMIAQYTSALLAGTITSGWTFGAGAALQIPFAMQMAYRFNGIGVTQNVLYENQKLIANQFNSAIGKIQDSLSSTASALGKLQDVVNQNAQALNTLVKQLSSNFGAISSVLNDILSRLDKVEAEVQIDRLITGRLQSLQTYVTQQLIRAAEIRASANLAATKMSECVLGQSKRVDFCGKGYHLMSFPQSAPHGVVFLHVTYVPAQEKNFTTAPAICHDGKAHFPREGVFVSNGTHWFVTQRNFCEPQIITTDNTFVSGNCDVVIGIVNNTVYDPLQPELDSGGGGSDIIKLLNEQVNKEMQSSNLYMSMSSWCYTHSLDGAGLFLFDHAAEEYEHAKKLIIFLNENNVPVQLTSISAPEHKFEGLTQIFQKAYEHEQHISESINNIVDHAIKSKDHATFNFLQWYVAEQHEEEVLFKDILDKIELIGNENHGLYLADQYVKGIAKSRKS

SEQ ID NO: 9081 - protein, 1315 aa, Artificial Sequence
  SARS-CoV-2/Finland/FIN03032020A/2020__EPI_ISL_413602 spike protein (1-1147)(I714C_Y1110C) Ferritin construct
MFVFLVLLPLVSSQCVNLTTRTQLPPAYTNSFTRGVYYPDKVFRSSVLHSTQDLFLPFFSNVTWFHAIHVSGTNGTKRFDNPVLPFNDGVYFASTEKSNIIRGWIFGTTLDSKTQSLLIVNNATNVVIKVCEFQFCNDPFLGVYYHKNNKSWMESEFRVYSSANNCTFEYVSQPFLMDLEGKQGNFKNLREFVFKNIDGYFKIYSKHTPINLVRDLPQGFSALEPLVDLPIGINITRFQTLLALHRSYLTPGDSSSGWTAGAAAYYVGYLQPRTFLLKYNENGTITDAVDCALDPLSETKCTLKSFTVEKGIYQTSNFRVQPTESIVRFPNITNLCPFGEVFNATRFASVYAWNRKRISNCVADYSVLYNSASFSTFKCYGVSPTKLNDLCFTNVYADSFVIRGDEVRQIAPGQTGKIADYNYKLPDDFTGCVISWNSNNLDSKVGGNYNYLYRLFRKSNLKPFERDISTEIYQAGSTPCNGVEGFNCYFPLQSYGFQPTNGVGYQPYRVVVLSFELLHAPATVCGPKKSTNLVKNKCVNFNFNGLTGTGVLTESNKKFLPFQQFGRDIADTTDAVRDPQTLEILDITPCSFGGVSVITPGTNTSNQVAVLYQGVNCTEVPVAIHADQLTPTWRVYSTGSNVFQTRAGCLIGAEHVNNSYECDIPIGAGICASYQTQTNSPRRARSVASQSIIAYTMSLGAENSVAYSNNSIACPTNFTISVTTEILPVSMTKTSVDCTMYICGDSTECSNLLLQYGSFCTQLNRALTGIAVEQDKNTQEVFAQVKQIYKTPPIKDFGGFNFSQILPDPSKPSKRSFIEDLLFNKVTLADAGFIKQYGDCLGDIAARDLICAQKFNGLTVLPPLLTDEMIAQYTSALLAGTITSGWTFGAGAALQIPFAMQMAYRFNGIGVTQNVLYENQKLIANQFNSAIGKIQDSLSSTASALGKLQDVVNQNAQALNTLVKQLSSNFGAISSVLNDILSRLDKVEAEVQIDRLITGRLQSLQTYVTQQLIRAAEIRASANLAATKMSECVLGQSKRVDFCGKGYHLMSFPQSAPHGVVFLHVTYVPAQEKNFTTAPAICHDGKAHFPREGVFVSNGTHWFVTQRNFCEPQIITTDNTFVSGNCDVVIGIVNNTVYDPLQPELDSGGGGSDIIKLLNEQVNKEMQSSNLYMSMSSWCYTHSLDGAGLFLFDHAAEEYEHAKKLIIFLNENNVPVQLTSISAPEHKFEGLTQIFQKAYEHEQHISESINNIVDHAIKSKDHATFNFLQWYVAEQHEEEVLFKDILDKIELIGNENHGLYLADQYVKGIAKSRKS

SEQ ID NO: 9082 - protein, 1315 aa, Artificial Sequence
  SARS-CoV-2/France/GE1977/2020__EPI_ISL_414632 spike protein (1-1147)(I714C_Y1110C) Ferritin construct
MFVFLVLLPLVSSQCVNLTTRTQLPPAYTNSFTRGVYYPDKVFRSSVLHSTQDLFLPFFSNVTWFHAIHVSGTNGTKRFDNPVLPFNDGVYFASTEKSNIIRGWIFGTTLDSKTQSLLIVNNATNVVIKVCEFQFCNDPFLGVYYHKNNKSWMESEFRVYSSANNCTFEYVSQPFLMDLEGKQGNFKNLREFVFKNIDGYFKIYSKHTPINLVRDLPQGFSALEPLVDLPIGINITRFQTLLALHRSYLTPGDSSSGWTAGAAAYYVGYLQPRTFLLKYNENGTITDAVDCALDPLSETKCTLKSFTVEKGIYQTSNFRVQPTESIVRFPNITNLCPFGEVFNATRFASVYAWNRKRISNCVADYSVLYNSASFSTFKCYGVSPTKLNDLCFTNVYADSFVIRGDEVRQIAPGQTGKIADYNYKLPDDFTGCVIAWNSNNLDSKVGGNYNYLYRLFRKSNLKPFERDISTEIYQAGSTPCNGVEGFNCYFPLQSYGFQPTNGVGYQPYRVVVLSFELLHAPATVCGPKKSTNLVKNKCVNFNFNGLTGTGVLTESNKKFLPFQQFGRDIADTTDAVRDPQTLEILDITPCSFGGVSVITPGTNTSNQVAVLYQGVNCTEVPVAIHADQLTPTWRVYSTGSNVFQTRAGCLIGAEHVNNSYECDIPIGAGICASYQTQTNSPRRARSVASQSIIAYTMSLGAENSVAYSNNSIACPTNFTISVTTEILPVSMTKTSVDCTMYICGDSTECSNLLLQYGSFCTQLNRALTGIAVEQDKNTQEVFAQVKQIYKTPPIKDFGGFNFSQILPDPSKPSKRSFIEDLLFNKVTLADAGFIKQYGDCLGDIAARDLICAQKFNGLTVLPPLLTDEMIAQYTSALLAGTITSGWTFGAGAALQIPFAMQMAYRFNGIGVTQNVLYENQKLIANQFNSAIGKIQDSLFSTASALGKLQDVVNQNAQALNTLVKQLSSNFGAISSVLNDILSRLDKVEAEVQIDRLITGRLQSLQTYVTQQLIRAAEIRASANLAATKMSECVLGQSKRVDFCGKGYHLMSFPQSAPHGVVFLHVTYVPAQEKNFTTAPAICHDGKAHFPREGVFVSNGTHWFVTQRNFCEPQIITTDNTFVSGNCDVVIGIVNNTVYDPLQPELDSGGGGSDIIKLLNEQVNKEMQSSNLYMSMSSWCYTHSLDGAGLFLFDHAAEEYEHAKKLIIFLNENNVPVQLTSISAPEHKFEGLTQIFQKAYEHEQHISESINNIVDHAIKSKDHATFNFLQWYVAEQHEEEVLFKDILDKIELIGNENHGLYLADQYVKGIAKSRKS

SEQ ID NO: 9083 - protein, 1315 aa, Artificial Sequence
  SARS-CoV-2/Finland/FIN-313/2020__EPI_ISL_414641 spike protein (1-1147)(I714C_Y1110C) Ferritin construct
MFVFLVLLPLVSSQCVNLTTRTQLPPAYTNSFTRGVYYPDKVFRSSVLHSTQDLFLPFFSNVTWFHAIHVSGTNGTKRFDNPVLPFNDGVYFASTEKSNIIRGWIFGTTLDSKTQSLLIVNNATNVVIKVCEFQFCNDPFLGVYYHKNNKSWMESEFRVYSSANNCTFEYVSQPFLMDLEGKQGNFKNLREFVFKNIDGYFKIYSKHTPINLVRDLPQGFSALEPLVDLPIGINITRFKTLLALHRSYLTPGDSSSGWTAGAAAYYVGYLQPRTFLLKYNENGTITDAVDCALDPLSETKCTLKSFTVEKGIYQTSNFRVQPTESIVRFPNITNLCPFGEVFNATRFASVYAWNRKRISNCVADYSVLYNSASFSTFKCYGVSPTKLNDLCFTNVYADSFVIRGDEVRQIAPGQTGKIADYNYKLPDDFTGCVIAWNSNNLDSKVGGNYNYLYRLFRKSNLKPFERDISTEIYQAGSTPCNGVEGFNCYFPLQSYGFQPTNGVGYQPYRVVVLSFELLHAPATVCGPKKSTNLVKNKCVNFNFNGLTGTGVLTESNKKFLPFQQFGRDIADTTDAVRDPQTLEILDITPCSFGGVSVITPGTNTSNQVAVLYQGVNCTEVPVAIHADQLTPTWRVYSTGSNVFQTRAGCLIGAEHVNNSYECDIPIGAGICASYQTQTNSPRRARSVASQSIIAYTMSLGAENSVAYSNNSIACPTNFTISVTTEILPVSMTKTSVDCTMYICGDSTECSNLLLQYGSFCTQLNRALTGIAVEQDKNTQEVFAQVKQIYKTPPIKDFGGFNFSQILPDPSKPSKRSFIEDLLFNKVTLADAGFIKQYGDCLGDIAARDLICAQKFNGLTVLPPLLTDEMIAQYTSALLAGTITSGWTFGAGAALQIPFAMQMAYRFNGIGVTQNVLYENQKLIANQFNSAIGKIQDSLSSTASALGKLQDVVNQNAQALNTLVKQLSSNFGAISSVLNDILSRLDKVEAEVQIDRLITGRLQSLQTYVTQQLIRAAEIRASANLAATKMSECVLGQSKRVDFCGKGYHLMSFPQSAPHGVVFLHVTYVPAQEKNFTTAPAICHDGKAHFPREGVFVSNGTHWFVTQRNFCEPQIITTDNTFVSGNCDVVIGIVNNTVYDPLQPELDSGGGGSDIIKLLNEQVNKEMQSSNLYMSMSSWCYTHSLDGAGLFLFDHAAEEYEHAKKLIIFLNENNVPVQLTSISAPEHKFEGLTQIFQKAYEHEQHISESINNIVDHAIKSKDHATFNFLQWYVAEQHEEEVLFKDILDKIELIGNENHGLYLADQYVKGIAKSRKS

SEQ ID NO: 9084 - protein, 1315 aa, Artificial Sequence
  SARS-CoV-2/Netherlands/ZuidHolland_2/2020__EPI_ISL_414556 spike protein (1-1147)(I714C_Y1110C) Ferritin construct
MFVFLVLLPLVSSQCVNLTTRTQLPPAYTNSFTRGVYYPDKVFRSSVLHSTQDLFLPFFSNVTWFHAIHVSGTNGTKRFDNPVLPFNDGVYFASTEKSNIIRGWIFGTTLDSKTQSLLIVNNATNVVIKVCEFQFCNDPFLGVYYHKNNKSWMESEFRVYSSANNCTFEYVSQPFLMDLEGKQGNFKNLREFVFKNIDGYFKIYSKHTPINLVRDLPQGFSALEPLVDLPIGINITRFQTLLALHRSYLTPGDSSSGWTAGAAAYYVGYLQPRTFLLKYNENGTITDAVDCALDPLSETKCTLKSFTVEKGIYQTSNFRVQPTESIVRFPNITNLCPFGEVFNATRFASVYAWNRKRISNCVADYSVLYNSASFSTFKCYGVSPTKLNDLCFTNVYADSFVIRGDEVRQIAPGQTGKIADYNYKLPDDFTGCVIAWNSNNLDSKVGGNYNYLYRLFRKSNLKPFERDISTEIYQAGSTPCNGVEGFNCYFPLQSYGFQPTNGVGYQPYRVVVLSFELLHAPATVCGPKKSTNLVKNKCVNFNFNGLTGTGVLTESNKKFLPFQQFGRDIADTTDAVRDPQTLEILDITPCSFGGVSVITPGTNTSNQVAVLYQGVNCTEVPVAIHADQLTPTWRVYSTGSNVFQTRAGCLIGAEHVNNSYECDIPIGAGICASYQTQTNSPRRARSVASQSIIAYTMSLGAENSVAYSNNSIACPTNFTISVTTEILPVSMTKTSVDCTMYICGDSTECSNLLLQYGSFCTQLNRALTGIALEQDKNTQEVFAQVKQIYKTPPIKDFGGFNFSQILPDPSKPSKRSFIEDLLFNKVTLADAGFIKQYGDCLGDIAARDLICAQKFNGLTVLPPLLTDEMIAQYTSALLAGTITSGWTFGAGAALQIPFAMQMAYRFNGIGVTQNVLYENQKLIANQFNSAIGKIQDSLSSTASALGKLQDVVNQNAQALNTLVKQLSSNFGAISSVLNDILSRLDKVEAEVQIDRLITGRLQSLQTYVTQQLIRAAEIRASANLAATKMSECVLGQSKRVDFCGKGYHLMSFPQSAPHGVVFLHVTYVPAQEKNFTTAPAICHDGKAHFPREGVFVSNGTHWFVTQRNFCEPQIITTDNTFVSGNCDVVIGIVNNTVYDPLQPELDSGGGGSDIIKLLNEQVNKEMQSSNLYMSMSSWCYTHSLDGAGLFLFDHAAEEYEHAKKLIIFLNENNVPVQLTSISAPEHKFEGLTQIFQKAYEHEQHISESINNIVDHAIKSKDHATFNFLQWYVAEQHEEEVLFKDILDKIELIGNENHGLYLADQYVKGIAKSRKS

SEQ ID NO: 9085 - protein, 1315 aa, Artificial Sequence
  SARS-CoV-2/USA/WA-UW31/2020__EPI_ISL_414618 spike protein (1-1147)(I714C_Y1110C) Ferritin construct
MFVFLVLLPLVSSQCVNLTTRTQLPPAYTNSFTRGVYYPDKVFRSSVLHSTQDLFLPFFSNVTWFHAIHVSGTNGTKRFDNPVLPFNDGVYFASTEKSNIIRGWIFGTTLDSKTQSLLIVNNATNVVIKVCEFQFCNDPFLGVYYHKNNKSWMESEFRVYSSANNCTFEYVSQPFLMDLEGKQGNFKNLREFVFKNIDGYFKIYSKHTPINLVRDLPQGFSALEPLVDLPIGINITRFQTLLALHRSYLTPGDSSSGWTAGAAAYYVGYLQPRTFLLKYNENGTITDAVDCALDPLSETKCTLKSFTVEKGIYQTSNFRVQPTESIVRFPNITNLCPFGEVFNATRFASVYAWNRKRISNCVADYSVLYNSASFSTFKCYGVSPTKLNDLCFTNVYADSFVIRGDEVRQIAPGQTGKIADYNYKLPDDFTGCVIAWNSNNLDSKVGGNYNYLYRLFRKSNLKPFERDISTEIYQAGSTPCNGAEGFNCYFPLQSYGFQPTNGVGYQPYRVVVLSFELLHAPATVCGPKKSTNLVKNKCVNFNFNGLTGTGVLTESNKKFLPFQQFGRDIADTTDAVRDPQTLEILDITPCSFGGVSVITPGTNTSNQVAVLYQDVNCTEVPVAIHADQLTPTWRVYSTGSNVFQTRAGCLIGAEHVNNSYECDIPIGAGICASYQTQTNSPRRARSVASQSIIAYTMSLGAENSVAYSNNSIACPTNFTISVTTEILPVSMTKTSVDCTMYICGDSTECSNLLLQYGSFCTQLNRALTGIAVEQDKNTQEVFAQVKQIYKTPPIKDFGGFNFSQILPDPSKPSKRSFIEDLLFNKVTLADAGFIKQYGDCLGDIAARDLICAQKFNGLTVLPPLLTDEMIAQYTSALLAGTITSGWTFGAGAALQIPFAMQMAYRFNGIGVTQNVLYENQKLIANQFNSAIGKIQDSLSSTASALGKLQDVVNQNAQALNTLVKQLSSNFGAISSVLNDILSRLDKVEAEVQIDRLITGRLQSLQTYVTQQLIRAAEIRASANLAATKMSECVLGQSKRVDFCGKGYHLMSFPQSAPHGVVFLHVTYVPAQEKNFTTAPAICHDGKAHFPREGVFVSNGTHWFVTQRNFCEPQIITTDNTFVSGNCDVVIGIVNNTVYDPLQPELDSGGGGSDIIKLLNEQVNKEMQSSNLYMSMSSWCYTHSLDGAGLFLFDHAAEEYEHAKKLIIFLNENNVPVQLTSISAPEHKFEGLTQIFQKAYEHEQHISESINNIVDHAIKSKDHATFNFLQWYVAEQHEEEVLFKDILDKIELIGNENHGLYLADQYVKGIAKSRKS

SEQ ID NO: 9086 - protein, 1315 aa, Artificial Sequence
  SARS-CoV-2/South Korea/SNU01/2020__EPI_ISL_411929 spike protein (1-1147)(I714C_Y1110C) Ferritin construct
MFVFLVLLPLVSSQCVNLTTRTQLPPAYTNSFTRGVYYPDKVFRSSVLHSTQDLFLPFFSNVTWFHAIHVSGTNGTKRFDNPVLPFNDGVYFASTEKSNIIRGWIFGTTLDSKTQSLLIVNNATNVVIKVCEFQFCNDPFLGVYYHKNNKSWMESEFRVYSSANNCTFEYVSQPFLMDLEGKQGNFKNLREFVFKNIDGYFKIYSKHTPINLVRDLPQGFWALEPLVDLPIGINITRFQTLLALHRSYLTPGDSSSGWTAGAAAYYVGYLQPRTFLLKYNENGTITDAVDCALDPLSETKCTLKSFTVEKGIYQTSNFRVQPTESIVRFPNITNLCPFGEVFNATRFASVYAWNRKRISNCVADYSVLYNSASFSTFKCYGVSPTKLNDLCFTNVYADSFVIRGDEVRQIAPGQTGKIADYNYKLPDDFTGCVIAWNSNNLDSKVGGNYNYLYRLFRKSNLKPFERDISTEIYQAGSTPCNGVEGFNCYFPLQSYGFQPTNGVGYQPYRVVVLSFELLHAPATVCGPKKSTNLVKNKCVNFNFNGLTGTGVLTESNKKFLPFQQFGRDIADTTDAVRDPQTLEILDITPCSFGGVSVITPGTNTSNQVAVLYQDVNCTEVPVAIHADQLTPTWRVYSTGSNVFQTRAGCLIGAEHVNNSYECDIPIGAGICASYQTQTNSPRRARSVASQSIIAYTMSLGAENSVAYSNNSIACPTNFTISVTTEILPVSMTKTSVDCTMYICGDSTECSNLLLQYGSFCTQLNRALTGIAVEQDKNTQEVFAQVKQIYKTPPIKDFGGFNFSQILPDPSKPSKRSFIEDLLFNKVTLADAGFIKQYGDCLGDIAARDLICAQKFNGLTVLPPLLTDEMIAQYTSALLAGTITSGWTFGAGAALQIPFAMQMAYRFNGIGVTQNVLYENQKLIANQFNSAIGKIQDSLSSTASALGKLQDVVNQNAQALNTLVKQLSSNFGAISSVLNDILSRLDKVEAEVQIDRLITGRLQSLQTYVTQQLIRAAEIRASANLAATKMSECVLGQSKRVDFCGKGYHLMSFPQSAPHGVVFLHVTYVPAQEKNFTTAPAICHDGKAHFPREGVFVSNGTHWFVTQRNFCEPQIITTDNTFVSGNCDVVIGIVNNTVYDPLQPELDSGGGGSDIIKLLNEQVNKEMQSSNLYMSMSSWCYTHSLDGAGLFLFDHAAEEYEHAKKLIIFLNENNVPVQLTSISAPEHKFEGLTQIFQKAYEHEQHISESINNIVDHAIKSKDHATFNFLQWYVAEQHEEEVLFKDILDKIELIGNENHGLYLADQYVKGIAKSRKS

SEQ ID NO: 9087 - protein, 1315 aa, Artificial Sequence
  SARS-CoV-2/China/WF0004/2020__EPI_ISL_413694 spike protein (1-1147)(I714C_Y1110C) Ferritin construct
MFVFLVLLPLVSSQCVNLTTRTQLPPAYTNSFTRGVYYPDKVFRSSVLHSTQDLFLPFFSNVTWFHAIHVSGTNGTKRFDNPVLPFNDGVYFASTEKSNIIRGWIFGTTLDSKTQSLLIVNNATNVVIKVCEFQFCNDPFLGVYYHKNNKSWTESEFRVYSSANNCTFEYVSQPFLMDLEGKQGNFKNLREFVFKNIDGYFKIYSKHTPINLVRDLPQGFSALEPLVDLPIGINITRFQTLLALHRSYLTPGDSSSGWTAGAAAYYVGYLQPRTFLLKYNENGTITDAVDCALDPLSETKCTLKSFTVEKGIYQTSNFRVQPTESIVRFPNITNLCPFGEVFNATRFASVYAWNRKRISNCVADYSVLYNSASFSTFKCYGVSPTKLNDLCFTNVYADSFVIRGDEVRQIAPGQTGKIADYNYKLPDDFTGCVIAWNSNNLDSKVGGNYNYLYRLFRKSNLKPFERDISTEIYQAGSTPCNGVEGFNCYFPLQSYGFQPTNGVGYQPYRVVVLSFELLHAPATVCGPKKSTNLVKNKCVNFNFNGLTGTGVLTESNKKFLPFQQFGRDIADTTDAVRDPQTLEILDITPCSFGGVSVITPGTNTSNQVAVLYQDVNCTEVPVAIHADQLTPTWRVYSTGSNVFQTRAGCLIGAEHVNNSYECDIPIGAGICASYQTQTNSPRRARSVASQSIIAYTMSLGAENSVAYSNNSIACPTNFTISVTTEILPVSMTKTSVDCTMYICGDSTECSNLLLQYGSFCTQLNRALTGIAVEQDKNTQEVFAQVKQIYKTPPIKDFGGFNFSQILPDPSKPSKRSFIEDLLFNKVTLADAGFIKQYGDCLGDIAARDLICAQKFNGLTVLPPLLTDEMIAQYTSALLAGTITSGWTFGAGAALQIPFAMQMAYRFNGIGVTQNVLYENQKLIANQFNSAIGKIQDSLSSTASALGKLQDVVNQNAQALNTLVKQLSSNFGAISSVLNDILSRLDKVEAEVQIDRLITGRLQSLQTYVTQQLIRAAEIRASANLAATKMSECVLGQSKRFDFCGKGYHLMSFPQSAPHGVVFLHVTYVPAQEKNFTTAPAICHDGKAHFPREGVFVSNGTHWFVTQRNFCEPQIITTDNTFVSGNCDVVIGIVNNTVYDPLQPELDSGGGGSDIIKLLNEQVNKEMQSSNLYMSMSSWCYTHSLDGAGLFLFDHAAEEYEHAKKLIIFLNENNVPVQLTSISAPEHKFEGLTQIFQKAYEHEQHISESINNIVDHAIKSKDHATFNFLQWYVAEQHEEEVLFKDILDKIELIGNENHGLYLADQYVKGIAKSRKS

SEQ ID NO: 9088 - protein, 1315 aa, Artificial Sequence
  SARS-CoV-2/China/WF0028/2020__EPI_ISL_413791 spike protein (1-1147)(I714C_Y1110C) Ferritin construct
MFVFLVLLPLVSSQCVNLTTRTQLPPAYTNSFTRGVYYPDKVFRSSVLHSTQDLFLPFFSNVTWFHAIHVSGTNGTKRFDNPVLPFNDGVYFASTEKSNIIRGWIFGTTLDSKTQSLLIVNNATNVVIKVCEFQFCNDPFLGVYYHKNNKSWMESEFRVYSSANNCTFEYVSQPFLMDLEGKQGNFKNLREFVFKNIDGYFKIYSKHTPINLVRDLPQGFSALEPLVDLPIGINITRFQTLLALHRSYLTPGDSSSGWTAGAAAYYVGYLQPRTFLLKYNENGTITDAVDCALDPLSETKCTLKSFTVEKGIYQTSNFRVQPTESIVRFPNITNLCPFGEVFNATRFASVYAWNRKRISNCVADYSVLYNSASFSTFKCYGVSPTKLNDLCFTNVYADSFVIRGDEVRQIAPGQTGKIADYNYKLPDDFTGCVIAWNSNNLDSKVGGNYNYLYRLFRKSNLKPFERDISTEIYQAGSTPCNGVEGFNCYFPLQSYGFQPTNGVGYQPYRVVVLSFELLHAPATVCGPKKSTNLVKNKCVNFNFNGLTGTGVLTESNKKFLPFQQFGRDIADTTDAVRDPQTLEILDITPCSFGGVSVITPGTNTSNQVAVLYQDVNCTEVPVAIHADQLTPTWRVYSTGSNVFQTRAGCLIGAEHVNNSYECDIPIGAGICASYQTQTNSPRRARSVASQSIIAYTMSLGAENSVAYSNNSIACPTNFTISVTTEILPVSMTKTSVDCTMYICGDSTECSNLLLQYGSFCTQLNRALTGIAVEQDKNTQEVFAQVKQIYKTPPIKDFGGFNFSQILPDPSKPSKRSFIEDLLFNKVTLADAGFIKQYGDCLGDIAARDLICAQKFNGLTVLPPLLTDEMIAQYTSALLAGTITSGWTFGAGAALQIPFAMQMAYRFNGIGVTQNVLYENQKLIANQFNSAIGKIQDSLSSTASALGKLQDVVNQNAQALNTLVKQLSSNFGAISSVLNDILSRLDKVEAEVQIDRLITGRLQSLQTYVTQQLIRAAEIRASANLAATKMSECVLGQSKRVDFCGKGYHLMSFPQSAPHGVVFLHVTYVPAQEKNFTTAPAICHDGKAHFPREGVFVSNGTHWFVTQRNFCEPQIITTDNTFVSGNCDVVIGIVNNTVYDPLQPELESGGGGSDIIKLLNEQVNKEMQSSNLYMSMSSWCYTHSLDGAGLFLFDHAAEEYEHAKKLIIFLNENNVPVQLTSISAPEHKFEGLTQIFQKAYEHEQHISESINNIVDHAIKSKDHATFNFLQWYVAEQHEEEVLFKDILDKIELIGNENHGLYLADQYVKGIAKSRKS

SEQ ID NO: 9089 - protein, 1315 aa, Artificial Sequence
  SARS-CoV-2/2019-nCoV/USA-CruiseA-18/2020__MT159716.1 spike protein (1-1147)(I714C_Y1110C) Ferritin construct
MFVFLVLLPLVSSQCVNLTTRTQLPPAYTNSFTRGVYYPDKVFRSSVLHSTQDLFLPFFSNVTWFHAIHVSGTNGTKRFDNPVLPFNDGVYFASTEKSNIIRGWIFGTTLDSKTQSLLIVNNATNVVIKVCEFQFCNDPFLGVYYHKNNKSWMESELRVYSSANNCTFEYVSQPFLMDLEGKQGNFKNLREFVFKNIDGYFKIYSKHTPINLVRDLPQGFSALEPLVDLPIGINITRFQTLLALHRSYLTPGDSSSGWTAGAAAYYVGYLQPRTFLLKYNENGTITDAVDCALDPLSETKCTLKSFTVEKGIYQTSNFRVQPTESIVRFPNITNLCPFGEVFNATRFASVYAWNRKRISNCVADYSVLYNSASFSTFKCYGVSPTKLNDLCFTNVYADSFVIRGDEVRQIAPGQTGKIADYNYKLPDDFTGCVIAWNSNNLDSKVGGNYNYLYRLFRKSNLKPFERDISTEIYQAGSTPCNGVEGFNCYFPLQSYGFQPTNGVGYQPYRVVVLSFELLHAPATVCGPKKSTNLVKNKCVNFNFNGLTGTGVLTESNKKFLPFQQFGRDIADTTDAVRDPQTLEILDITPCSFGGVSVITPGTNTSNQVAVLYQDVNCTEVPVAIHADQLTPTWRVYSTGSNVFQTRAGCLIGAEHVNNSYECDIPIGAGICASYQTQTNSPRRARSVASQSIIAYTMSLGAENSVAYSNNSIACPTNFTISVTTEILPVSMTKTSVDCTMYICGDSTECSNLLLQYGSFCTQLNRALTGIAVEQDKNTQEVFAQVKQIYKTPPIKDFGGFNFSQILPDPSKPSKRSFIEDLLFNKVTLADAGFIKQYGDCLGDIAARDLICAQKFNGLTVLPPLLTDEMIAQYTSALLAGTITSGWTFGAGAALQIPFAMQMAYRFNGIGVTQNVLYENQKLIANQFNSAIGKIQDSLSSTASALGKLQDVVNQNAQALNTLVKQLSSNFGAISSVLNDILSRLDKVEAEVQIDRLITGRLQSLQTYVTQQLIRAAEIRASANLAATKMSECVLGQSKRVDFCGKGYHLMSFPQSAPHGVVFLHVTYVPAQEKNFTTAPAICHDGKAHFPREGVFVSNGTHWFVTQRNFCEPQIITTDNTFVSGNCDVVIGIVNNTVYDPLQPELDSGGGGSDIIKLLNEQVNKEMQSSNLYMSMSSWCYTHSLDGAGLFLFDHAAEEYEHAKKLIIFLNENNVPVQLTSISAPEHKFEGLTQIFQKAYEHEQHISESINNIVDHAIKSKDHATFNFLQWYVAEQHEEEVLFKDILDKIELIGNENHGLYLADQYVKGIAKSRKS

SEQ ID NO: 9090 - protein, 1315 aa, Artificial Sequence
  SARS-CoV-2/SARS-CoV-2/Yunnan-01/human/2020/CHN__MT049951.1 spike protein (1-1147)(I714C_Y1110C) Ferritin construct
MFVFLVLLPLVSSQCVNLTTRTQLPPANTNSFTRGVYYPDKVFRSSVLHSTQDLFLPFFSNVTWFHAIHVSGTNGTKRFDNPVLPFNDGVYFASTEKSNIIRGWIFGTTLDSKTQSLLIVNNATNVVIKVCEFQFCNDPFLGVYYHKNNKSWMESEFRVYSSANNCTFEYVSQPFLMDLEGKQGNFKNLREFVFKNIDGYFKIYSKHTPINLVRDLPQGFSALEPLVDLPIGINITRFQTLLALHRSYLTPGDSSSGWTAGAAAYYVGYLQPRTFLLKYNENGTITDAVDCALDPLSETKCTLKSFTVEKGIYQTSNFRVQPTESIVRFPNITNLCPFGEVFNATRFASVYAWNRKRISNCVADYSVLYNSASFSTFKCYGVSPTKLNDLCFTNVYADSFVIRGDEVRQIAPGQTGKIADYNYKLPDDFTGCVIAWNSNNLDSKVGGNYNYLYRLFRKSNLKPFERDISTEIYQAGSTPCNGVEGFNCYFPLQSYGFQPTNGVGYQPYRVVVLSFELLHAPATVCGPKKSTNLVKNKCVNFNFNGLTGTGVLTESNKKFLPFQQFGRDIADTTDAVRDPQTLEILDITPCSFGGVSVITPGTNTSNQVAVLYQDVNCTEVPVAIHADQLTPTWRVYSTGSNVFQTRAGCLIGAEHVNNSYECDIPIGAGICASYQTQTNSPRRARSVASQSIIAYTMSLGAENSVAYSNNSIACPTNFTISVTTEILPVSMTKTSVDCTMYICGDSTECSNLLLQYGSFCTQLNRALTGIAVEQDKNTQEVFAQVKQIYKTPPIKDFGGFNFSQILPDPSKPSKRSFIEDLLFNKVTLADAGFIKQYGDCLGDIAARDLICAQKFNGLTVLPPLLTDEMIAQYTSALLAGTITSGWTFGAGAALQIPFAMQMAYRFNGIGVTQNVLYENQKLIANQFNSAIGKIQDSLSSTASALGKLQDVVNQNAQALNTLVKQLSSNFGAISSVLNDILSRLDKVEAEVQIDRLITGRLQSLQTYVTQQLIRAAEIRASANLAATKMSECVLGQSKRVDFCGKGYHLMSFPQSAPHGVVFLHVTYVPAQEKNFTTAPAICHDGKAHFPREGVFVSNGTHWFVTQRNFCEPQIITTDNTFVSGNCDVVIGIVNNTVYDPLQPELDSGGGGSDIIKLLNEQVNKEMQSSNLYMSMSSWCYTHSLDGAGLFLFDHAAEEYEHAKKLIIFLNENNVPVQLTSISAPEHKFEGLTQIFQKAYEHEQHISESINNIVDHAIKSKDHATFNFLQWYVAEQHEEEVLFKDILDKIELIGNENHGLYLADQYVKGIAKSRKS

SEQ ID NO: 9091 - protein, 1315 aa, Artificial Sequence
  SARS-CoV-2/USA/WA-UW292/2020__EPI_ISL_418077 spike protein (1-1147)(I714C_Y1110C) Ferritin construct
MFVFLVLLPLVSSQCVNLTTRTQLPPAYTNSFTRGVYYPDKVFRSSVLHSTQDLFLPFFSNVTWFHAIHVSGTNGTKRFDNPVLPFNDGVYFASTEKSNIIRGWIFGTTLDSKTQSLLIVNNATNVVIKVCEFQFCNDPFLGVYYHKNNKSWMESEFRVYSSANNCTFEYVSQPFLMDLEGKQGNFKNLREFVFKNIDGYFKIYSKHTPINLVRDLPQGFSALEPLVDLPIGINITRFQTLLALHRSYLTPGDSSSGWTAGAAAYYVGYLQPRTFLLKYNENGTITDAVDCALDPLSETKCTLKSFTVEKGIYQTSNFRVQPTESIVRFPNITNLCPFGEVFNATRFASVYAWNRKRISNCVADYSVLYNSASFSTFKCYGVSPTKLNDLCFTNVYADSFVIRGDEVRQIAPGQTGKIADYNYKLPDDFTGCVIAWNSNNLDSKVGGNYNYLYRLFRKSNLKPFERDISTEIYQASSTPCNGVEGFNCYFPLQSYGFQPTNGVGYQPYRVVVLSFELLHAPATVCGPKKSTNLVKNKCVNFNFNGLTGTGVLTESNKKFLPFQQFGRDIADTTDAVRDPQTLEILDITPCSFGGVSVITPGTNTSNQVAVLYQDVNCTEVPVAIHADQLTPTWRVYSTGSNVFQTRAGCLIGAEHVNNSYECDIPIGAGICASYQTQTNSPRRARSVASQSIIAYTMSLGAENSVAYSNNSIACPTNFTISVTTEILPVSMTKTSVDCTMYICGDSTECSNLLLQYGSFCTQLNRALTGIAVEQDKNTQEVFAQVKQIYKTPPIKDFGGFNFSQILPDPSKPSKRSFIEDLLFNKVTLADAGFIKQYGDCLGDIAARDLICAQKFNGLTVLPPLLTDEMIAQYTSALLAGTITSGWTFGAGAALQIPFAMQMAYRFNGIGVTQNVLYENQKLIANQFNSAIGKIQDSLSSTASALGKLQDVVNQNAQALNTLVKQLSSNFGAISSVLNDILSRLDKVEAEVQIDRLITGRLQSLQTYVTQQLIRAAEIRASANLAATKMSECVLGQSKRVDFCGKGYHLMSFPQSAPHGVVFLHVTYVPAQEKNFTTAPAICHDGKAHFPREGVFVSNGTHWFVTQRNFCEPQIITTDNTFVSGNCDVVIGIVNNTVYDPLQPELDSGGGGSDIIKLLNEQVNKEMQSSNLYMSMSSWCYTHSLDGAGLFLFDHAAEEYEHAKKLIIFLNENNVPVQLTSISAPEHKFEGLTQIFQKAYEHEQHISESINNIVDHAIKSKDHATFNFLQWYVAEQHEEEVLFKDILDKIELIGNENHGLYLADQYVKGIAKSRKS

SEQ ID NO: 9092 - protein, 1315 aa, Artificial Sequence
  SARS-CoV-2/Iceland/192/2020__EPI_ISL_417819 spike protein (1-1147)(I714C_Y1110C) Ferritin construct
MFVFFVLLPLVSSQCVNLTTRTQLPPAYTNSFTRGVYYPDKVFRSSVLHSTQDLFLPFFSNVTWFHAIHVSGTNGTKRFDNPVLPFNDGVYFASTEKSNIIRGWIFGTTLDSKTQSLLIVNNATNVVIKVCEFQFCNDPFLGVYYHKNNKSWMESEFRVYSSANNCTFEYVSQPFLMDLEGKQGNFKNLREFVFKNIDGYFKIYSKHTPINLVRDLPQGFSALEPLVDLPIGINITRFQTLLALHRSYLTPGDSSSGWTAGAAAYYVGYLQPRTFLLKYNENGTITDAVDCALDPLSETKCTLKSFTVEKGIYQTSNFRVQPTESIVRFPNITNLCPFGEVFNATRFASVYAWNRKRISNCVADYSVLYNSASFSTFKCYGVSPTKLNDLCFTNVYADSFVIRGDEVRQIAPGQTGKIADYNYKLPDDFTGCVIAWNSNNLDSKVGGNYNYLYRLFRKSNLKPFERDISTEIYQAGSTPCNGVEGFNCYFPLQSYGFQPTNGVGYQPYRVVVLSFELLHAPATVCGPKKSTNLVKNKCVNFNFNGLTGTGVLTESNKKFLPFQQFGRDIADTTDAVRDPQTLEILDITPCSFGGVSVITPGTNTSNQVAVLYQGVNCTEVPVAIHADQLTPTWRVYSTGSNVFQTRAGCLIGAEHVNNSYECDIPIGAGICASYQTQTNSPRRARSVASQSIIAYTMSLGAENSVAYSNNSIACPTNFTISVTTEILPVSMTKTSVDCTMYICGDSTECSNLLLQYGSFCTQLNRALTGIAVEQDKNTQEVFAQVKQIYKTPPIKDFGGFNFSQILPDPSKPSKRSFIEDLLFNKVTLADAGFIKQYGDCLGDIAARDLICAQKFNGLTVLPPLLTDEMIAQYTSALLAGTITSGWTFGAGAALQIPFAMQMAYRFNGIGVTQNVLYENQKLIANQFNSAIGKIQDSLSSTASALGKLQDVVNQNAQALNTLVKQLSSNFGAISSVLNDILSRLDKVEAEVQIDRLITGRLQSLQTYVTQQLIRAAEIRASANLAATKMSECVLGQSKRVDFCGKGYHLMSFPQSAPHGVVFLHVTYVPAQEKNFTTAPAICHDGKAHFPREGVFVSNGTHWFVTQRNFCEPQIITTDNTFVSGNCDVVIGIVNNTVYDPLQPELDSGGGGSDIIKLLNEQVNKEMQSSNLYMSMSSWCYTHSLDGAGLFLFDHAAEEYEHAKKLIIFLNENNVPVQLTSISAPEHKFEGLTQIFQKAYEHEQHISESINNIVDHAIKSKDHATFNFLQWYVAEQHEEEVLFKDILDKIELIGNENHGLYLADQYVKGIAKSRKS

SEQ ID NO: 9093 - protein, 1315 aa, Artificial Sequence
  SARS-CoV-2/Belgium/ULG-6939/2020__EPI_ISL_417020 spike protein (1-1147)(I714C_Y1110C) Ferritin construct
MFVFLVLLPLVSSQCVNLTTRTQLPPAYTNSFTRGVYYPDKVFRSSVLHSTQDLFLPFFSNVTWFHAIHVSGTNGTKRFDNPVLPFNDGVYFASTEKSNIIRGWIFGTTLDSKTQSLLIVNNATNVVIKVCEFQFCNDPFLGVYYHKNNKSWMESEFRVYSSANNCTFEYVSQPFLMDLEGKQGNFKNLREFVFKNIDGYFKIYSKHTPINLVRDLPQGFSALEPLVDLPIGINITRFQTLLALHRSYLTPGDSSSGWTAGAAAYYVGYLQPRTFLLKYNENGTITDAVDCALDPLSETKCTLKSFTVEKGIYQTSNFRVQPTESIVRFPNITNLCPFGEVFNATRFASVYAWNRKRISNCVADYSVLYNSASFSTFKCYGVSPTKLNDLCFTNVYADSFVIRGDEVRQIAPGQTGKIADYNYKLPDDFTGCVIAWNSNNLDSKVGGNYNYLYRLFRKSNLKPFERDISTEIYQAGSTPCNGVEGFNCYFPLQSYGFQPTNGVGYQPYRVVVLSFELLHAPATVCGPKKSTNLVKNKCVNFNFNGLTGTGVLTESNKKFLPFQQFGRDIADTTDAVRDPQTLEILDITPCSFGGVSVITPGTNTSNQVAVLYQGVNCTEVPVAIHADQLTPTWRVYSTGSNVFQTRAGCLIGAEHVNNSYECDIPIGAGICASYQTQTNSPRRARSVASQSIIAYTMSLGAENSVVYSNNSIACPTNFTISVTTEILPVSMTKTSVDCTMYICGDSTECSNLLLQYGSFCTQLNRALTGIAVEQDKNTQEVFAQVKQIYKTPPIKDFGGFNFSQILPDPSKPSKRSFIEDLLFNKVTLADAGFIKQYGDCLGDIAARDLICAQKFNGLTVLPPLLTDEMIAQYTSALLAGTITSGWTFGAGAALQIPFAMQMAYRFNGIGVTQNVLYENQKLIANQFNSAIGKIQDSLSSTASALGKLQDVVNQNAQALNTLVKQLSSNFGAISSVLNDILSRLDKVEAEVQIDRLITGRLQSLQTYVTQQLIRAAEIRASANLAATKMSECVLGQSKRVDFCGKGYHLMSFPQSAPHGVVFLHVTYVPAQEKNFTTAPAICHDGKAHFPREGVFVSNGTHWFVTQRNFCEPQIITTDNTFVSGNCDVVIGIVNNTVYDPLQPELDSGGGGSDIIKLLNEQVNKEMQSSNLYMSMSSWCYTHSLDGAGLFLFDHAAEEYEHAKKLIIFLNENNVPVQLTSISAPEHKFEGLTQIFQKAYEHEQHISESINNIVDHAIKSKDHATFNFLQWYVAEQHEEEVLFKDILDKIELIGNENHGLYLADQYVKGIAKSRKS

SEQ ID NO: 9094 - protein, 1315 aa, Artificial Sequence
  SARS-CoV-2/France/HF2496/2020__EPI_ISL_418231 spike protein (1-1147)(I714C_Y1110C) Ferritin construct
MFVFLVLLPLVSSQCVNLTTRTQLPPAYTNSFTRGVYYPDKVFRSSVLHSTQDLFLPFFSNVTWFHAIHVSGTNGTKRFDNPVLPFNDGVYFASTEKSNIIRGWIFGTTLDSKTQSLLIVNNATNVVIKVCEFQFCNDPFLGVYYHKNNKSWMESEFRVYSSANNCTFEYVSQPFLMDLEGKQGNFKNLREFVFKNIDGYFKIYSKHTPINLVRDLPQGFSALEPLVDLPIGINITRFQTLLALHRSYLTPGDSSSGWTAGAAAYYVGYLQPRTFLLKYNENGTITDAVDCALDPLSETKCTLKSFTVEKGIYQTSNFRVQPTESIVRFPNITNLCPFGEVFNATRFASVYAWNRKRISNCVADYSVLYNSASFSTFKCYGVSPTKLNDLCFTNVYADSFVIRGDEVRQIAPGQTGKIADYNYKLPDDFTGCVIAWNSNNLDSKVGGNYNYLYRLFRKSNLKPFERDISTEIYQAGSTPCNGVEGFNCYFPLQSYGFQPTNGVGYQPYRVVVLSFELLHAPATVCGPKKSTNLVKNKCVNFNFNGLTGTGVLTESNKKFLPFQQFGRDIADTTDAVRDPQTLEILDITPCSFGGVSVITPGTNTSNQVAVLYQGVNCTEVPVAIHADQLTPTWRVYSTGSNVFQTRAGCLIGAEHVNNSYECDIPIGAGICASYQTQTNSPRRARSVASQSIIAYTMSLGAENSVAYSNNSIACPTNFTISVTTEILPVSMTKTSVDCTMYICGDSTECSNLLLQYGSFCTQLNRALTGIAVEQDKNTQEVFAQVKQIYKTPPIKDFGGFNFSQILPDPSKPSKRSFIEDLLFNKVTLADAGFIKQYGDCLGDIVARDLICAQKFNGLTVLPPLLTDEMIAQYTSALLAGTITSGWTFGAGAALQIPFAMQMAYRFNGIGVTQNVLYENQKLIANQFNSAIGKIQDSLSSTASALGKLQDVVNQNAQALNTLVKQLSSNFGAISSVLNDILSRLDKVEAEVQIDRLITGRLQSLQTYVTQQLIRAAEIRASANLAATKMSECVLGQSKRVDFCGKGYHLMSFPQSAPHGVVFLHVTYVPAQEKNFTTAPAICHDGKAHFPREGVFVSNGTHWFVTQRNFCEPQIITTDNTFVSGNCDVVIGIVNNTVYDPLQPELDSGGGGSDIIKLLNEQVNKEMQSSNLYMSMSSWCYTHSLDGAGLFLFDHAAEEYEHAKKLIIFLNENNVPVQLTSISAPEHKFEGLTQIFQKAYEHEQHISESINNIVDHAIKSKDHATFNFLQWYVAEQHEEEVLFKDILDKIELIGNENHGLYLADQYVKGIAKSRKS

SEQ ID NO: 9095 - protein, 1315 aa, Artificial Sequence
  SARS-CoV-2/USA/WA-UW291/2020__EPI_ISL_418076 spike protein (1-1147)(I714C_Y1110C) Ferritin construct
MFVFLVLLPLVSSQCVNLTTRTQLPPAYTNSFTRGVYYPDKVFRSSVLHSTQDLFLPFFSNVTWFHAIHVSGTNGTKRFDNPVLPFNDGVYFASTEKSNIIRGWIFGTTLDSKTQSLLIVNNATNVVIKVCEFQFCNDPFLGVYYHKNNKSWMESEFRVYSSANNCTFEYVSQPFLMDLEGKQGNFKNLREFVFKNIDGYFKIYSKHTPINLVRDLPQGFSALEPLVDLPIGINITRFQTLLALHRSYLTPGDSSSGWTAGAAAYYVGYLQPRTFLLKYNENGTITDAVDCALDPLSETKCTLKSFTVEKGIYQTSNFRVQPTESIVRFPNITNLCPFGEVFNATRFASVYAWNRKRISNCVADYSVLYNSASFSTFKCYGVSPTKLNDLCFTNVYADSFVIRGDEVRQIAPGQTGKIADYNYKLPDDFTGCVIAWNSNNLDSKVGGNYNYLYRLFRKSNLKPFERDISTEIYQAGSTPCNGVEGFNCYFPLQSYGFQPTNGVGYQPYRVVVLSFELLHAPATVCGPKKSTNLVKNKCVNFNFNGLTGTGVLTESNKKFLPFQQFGRDIADTTDAVRDPQTLEILDITPCSFGGVSVITPGTNTSNQVAVLYQGVNCTEVPVAIHADQLTPTWRVYSTGSNVFQTRAGCLIGAEHVNNSYECDIPIGAGICASYQTQTNSPRRARSVASQSIIAYTMSLGAENSVAYSNNSIACPTNFTISVTTEILPVSMTKTSVDCTMYICGDSTECSNLLLQYGSFCTQLNRALTGIAVEQDKNTQEVFAQVKQIYKTPPIKDFGGFNFSQILPDPSKPSKRSFIEDLLFNKVTLADAGFIKQYGDCLGDIAARDLICAQKFNGLTVLPPLLTDEMIAQYTSALLAGTITSGWTFGAGAALQIPFAMQMAYRFNGIGVTQNVLYENQKLIANQFNSAIGKIQYSLSSTASALGKLQDVVNQNAQALNTLVKQLSSNFGAISSVLNDILSRLDKVEAEVQIDRLITGRLQSLQTYVTQQLIRAAEIRASANLAATKMSECVLGQSKRVDFCGKGYHLMSFPQSAPHGVVFLHVTYVPAQEKNFTTAPAICHDGKAHFPREGVFVSNGTHWFVTQRNFCEPQIITTDNTFVSGNCDVVIGIVNNTVYDPLQPELDSGGGGSDIIKLLNEQVNKEMQSSNLYMSMSSWCYTHSLDGAGLFLFDHAAEEYEHAKKLIIFLNENNVPVQLTSISAPEHKFEGLTQIFQKAYEHEQHISESINNIVDHAIKSKDHATFNFLQWYVAEQHEEEVLFKDILDKIELIGNENHGLYLADQYVKGIAKSRKS

SEQ ID NO: 9096 - protein, 1315 aa, Artificial Sequence; identical to SEQ ID NO: 9059
  SARS-CoV-2/Portugal/PT0034/2020__EPI_ISL_418019 spike protein (1-1147)(I714C_Y1110C) Ferritin construct

SEQ ID NO: 9097 - protein, 1315 aa, Artificial Sequence; identical to SEQ ID NO: 9051
  SARS-CoV-2/Iceland/202/2020__EPI_ISL_417750 spike protein (1-1147)(I714C_Y1110C) Ferritin construct

SEQ ID NO: 9098 - protein, 1315 aa, Artificial Sequence
  SARS-CoV-2/USA/WA-UW261/2020__EPI_ISL_418046 spike protein (1-1147)(I714C_Y1110C) Ferritin construct
MFVFLVLLPLVSSQCVNLTTRTQLPPAYTNSFTRGVYYPDKVFRSSVLHSTQDLFLPFFSNVTWFHAIHVSGTNGTKRFDNPVLPFNDGVYFASTEKSNIIRGWIFGTTLDSKTQSLLIVNNATNVVIKVCEFQFCNDPFLGVYYHKNNKSWMESEFRVYSSANNCTFEYVSQPFLMDLEGKQGNFKNLREFVFKNIDGYFKIYSKHTPINLVRDLPQGFSALEPLVDLPIGINITRFQTLLALHRSYLTPGDSSSGWTAGAAAYYVGYLQPRTFLLKYNENGTITDAVDCALDPLSETKCTLKSFTVEKGIYQTSNFRVQPTESIVRFPNITNLCPFGEVFNATRFTSVYAWNRKRISNCVADYSVLYNSASFSTFKCYGVSPTKLNDLCFTNVYADSFVIRGDEVRQIAPGQTGKIADYNYKLPDDFTGCVIAWNSNNLDSKVGGNYNYLYRLFRKSNLKPFERDISTEIYQAGSTPCNGVEGFNCYFPLQSYGFQPTNGVGYQPYRVVVLSFELLHAPATVCGPKKSTNLVKNKCVNFNFNGLTGTGVLTESNKKFLPFQQFGRDIADTTDAVRDPQTLEILDITPCSFGGVSVITPGTNTSNQVAVLYQDVNCTEVPVAIHADQLTPTWRVYSTGSNVFQTRAGCLIGAEHVNNSYECDIPIGAGICASYQTQTNSPRRARSVASQSIIAYTMSLGAENSVAYSNNSIACPTNFTISVTTEILPVSMTKTSVDCTMYICGDSTECSNLLLQYGSFCTQLNRALTGIAVEQDKNTQEVFAQVKQIYKTPPIKDFGGFNFSQILPDPSKPSKRSFIEDLLFNKVTLADAGFIKQYGDCLGDIAARDLICAQKFNGLTVLPPLLTDEMIAQYTSALLAGTITSGWTFGAGAALQIPFAMQMAYRFNGIGVTQNVLYENQKLIANQFNSAIGKIQDSLSSTASALGKLQDVVNQNAQALNTLVKQLSSNFGAISSVLNDILSRLDKVEAEVQIDRLITGRLQSLQTYVTQQLIRAAEIRASANLAATKMSECVLGQSKRVDFCGKGYHLMSFPQSAPHGVVFLHVTYVPAQEKNFTTAPAICHDGKAHFPREGVFVSNGTHWFVTQRNFCEPQIITTDNTFVSGNCDVVIGIVNNTVYDPLQPELDSGGGGSDIIKLLNEQVNKEMQSSNLYMSMSSWCYTHSLDGAGLFLFDHAAEEYEHAKKLIIFLNENNVPVQLTSISAPEHKFEGLTQIFQKAYEHEQHISESINNIVDHAIKSKDHATFNFLQWYVAEQHEEEVLFKDILDKIELIGNENHGLYLADQYVKGIAKSRKS

SEQ ID NO: 9099 - protein, 1315 aa, Artificial Sequence
  SARS-CoV-2/Portugal/PT0035/2020__EPI_ISL_418020 spike protein (1-1147)(I714C_Y1110C) Ferritin construct
MFVFLVLLPLVSSQCVNLTTRTQLPPAYTNSFTRGVYYPDKVFRSSVLHSTQDLFLPFFSNVTWFHAIHVSGTNGTKRFDNPVLPFNDGVYFASTEKSNIIRGWIFGTTLDSKTQSLLIVNNATNVVIKVCEFQFCNDPFLGVYYHKNNKSWMESEFRVYSSANNCTFEYVSQPFLMDLEGKQGNFKNLREFVFKNIDGYFKIYSKHTPINLVRDLPQGFSALEPLVDLPIGINITRFQTLLALHRSYLTPGDSSSGWTAGAAAYYVGYLQPRTFLLKYNENGTITDAVDCALDPLSETKCTLKSFTVEKGIYQTSNFRVQPTESIVRFPNITNLCPFGEVFNATRFASVYAWNRKRISNCVADYSVLYNSASFSTFKCYGVSPTKLNDLCFTNVYADSFVIRGDEVRQIAPGQTGKIADYNYKLPDDFTGCVIAWNSNNLDSKVGGNYNYLYRLFRKSNLKPFERDISTEIYQAGSTPCNGVEGFNCYFPLQSYGFQPTNGVGYQPYRVVVLSFELLHAPATVCGPKKSTNLVKNKCVNFNFNGLTGTGVLTESNKKFLPFQQFGRDIADTTDAVRDPQTLEILDITPCSFGGVSVITPGTNTSNQVAVLYQDVNCTEVPVAIHADQLTPTWRVYSTGSNVFQTRAGCLIGAEHVNNSYECDIPIGAGICASYQTQTNSPRRARSVASQSIIAYTMSLGAENSVAYSNNSIACPTNFTISVTTEILPVSMTKTSVDCTMYICGDSTECSNLLLQYGSFCTQLNRALTGIAVEQDKNTQEVFAQVKQIYKTPPIKDFGGFNFSQILPDPSKPSKRSFIEDLLFNKVTLADAGFIKQYGDCLGDISARDLICAQKFNGLTVLPPLLTDEMIAQYTSALLAGTITSGWTFGAGAALQIPFAMQMAYRFNGIGVTQNVLYENQKLIANQFNSAIGKIQDSLSSTASALGKLQDVVNQNAQALNTLVKQLSSNFGAISSVLNDILSRLDKVEAEVQIDRLITGRLQSLQTYVTQQLIRAAEIRASANLAATKMSECVLGQSKRVDFCGKGYHLMSFPQSAPHGVVFLHVTYVPAQEKNFTTAPAICHDGKAHFPREGVFVSNGTHWFVTQRNFCEPQIITTDNTFVSGNCDVVIGIVNNTVYDPLQPELDSGGGGSDIIKLLNEQVNKEMQSSNLYMSMSSWCYTHSLDGAGLFLFDHAAEEYEHAKKLIIFLNENNVPVQLTSISAPEHKFEGLTQIFQKAYEHEQHISESINNIVDHAIKSKDHATFNFLQWYVAEQHEEEVLFKDILDKIELIGNENHGLYLADQYVKGIAKSRKS

SEQ ID NO: 9100 - protein, 1315 aa, Artificial Sequence
  SARS-CoV-2/USA/NY-NYUMC7/2020__EPI_ISL_418192 spike protein (1-1147)(I714C_Y1110C) Ferritin construct
MFVFLVLLPLVSSQCVNLTTRTQLPPAYTNSFTRGVYYPDKVFRSSVLHSTQDLFLPFFSNVTWFHAIHVSGTNGTKRFDNPVLPFNDGVYFASTEKSNIIRGWIFGTTLDSKTQSLLIVNNATNVVIKVCEFQFCNDPFLGVYHHKNNKSWMESEFRVYSSANNCTFEYVSQPFLMDLEGKQGNFKNLREFVFKNIDGYFKIYSKHTPINLVRDLPQGFSALEPLVDLPIGINITRFQTLLALHRSYLTPGDSSSGWTAGAAAYYVGYLQPRTFLLKYNENGTITDAVDCALDPLSETKCTLKSFTVEKGIYQTSNFRVQPTESIVRFPNITNLCPFGEVFNATRFASVYAWNRKRISNCVADYSVLYNSASFSTFKCYGVSPTKLNDLCFTNVYADSFVIRGDEVRQIAPGQTGKIADYNYKLPDDFTGCVIAWNSNNLDSKVGGNYNYLYRLFRKSNLKPFERDISTEIYQAGSTPCNGVEGFNCYFPLQSYGFQPTNGVGYQPYRVVVLSFELLHAPATVCGPKKSTNLVKNKCVNFNFNGLTGTGVLTESNKKFLPFQQFGRDIADTTDAVRDPQTLEILDITPCSFGGVSVITPGTNTSNQVAVLYQGVNCTEVPVAIHADQLTPTWRVYSTGSNVFQTRAGCLIGAEHVNNSYECDIPIGAGICASYQTQTNSPRRARSVASQSIIAYTMSLGAENSVAYSNNSIACPTNFTISVTTEILPVSMTKTSVDCTMYICGDSTECSNLLLQYGSFCTQLNRALTGIAVEQDKNTQEVFAQVKQIYKTPPIKDFGGFNFSQILPDPSKPSKRSFIEDLLFNKVTLADAGFIKQYGDCLGDIAARDLICAQKFNGLTVLPPLLTDEMIAQYTSALLAGTITSGWTFGAGAALQIPFAMQMAYRFNGIGVTQNVLYENQKLIANQFNSAIGKIQDSLSSTASALGKLQDVVNQNAQALNTLVKQLSSNFGAISSVLNDILSRLDKVEAEVQIDRLITGRLQSLQTYVTQQLIRAAEIRASANLAATKMSECVLGQSKRVDFCGKGYHLMSFPQSAPHGVVFLHVTYVPAQEKNFTTAPAICHDGKAHFPREGVFVSNGTHWFVTQRNFCEPQIITTDNTFVSGNCDVVIGIVNNTVYDPLQPELDSGGGGSDIIKLLNEQVNKEMQSSNLYMSMSSWCYTHSLDGAGLFLFDHAAEEYEHAKKLIIFLNENNVPVQLTSISAPEHKFEGLTQIFQKAYEHEQHISESINNIVDHAIKSKDHATFNFLQWYVAEQHEEEVLFKDILDKIELIGNENHGLYLADQYVKGIAKSRKS

SEQ ID NO: 9101 - protein, 1315 aa, Artificial Sequence
  SARS-CoV-2/Iceland/189/2020__EPI_ISL_417709 spike protein (1-1147)(I714C_Y1110C) Ferritin construct
MFVFLVLLPLVSSQCVNLTTRTQLPPAYTNSFTRGVYYPDKVFRSSVLHSTQDLFLPFFSNVTWFHAIHVSGTNGTKRFDNPVLPFNDGVYFASTEKSNIIRGWIFGTTLDSKTQSLLIVNNATNVVIKVCEFQFCNDPFLGVYYHKNNKSWMESEFRVYSSANNCTFEYVSQPFLMDLEGKQGNFKNLREFVFKNIDGYFKIYSKHTPINLVRDLPQGFSALEPLVDLPIGINITRFQTLLALHRSYLTPGDSSSGWTAGAAAYYVGYLQPRTFLLKYNENGTITDAVDCALDPLSETKCTLKSFTVEKGIYQTSNFRVQPTESIVRFPNITNLCPFGEVFNATRFASVYAWNRKRISNCVADYSVLYNSASFSTFKCYGVSPTKLNDLCFTNVYADSFVIRGDEVRQIAPGQTGKIADYNYKLPDDFTGCVIAWNSNNLDSKVGGNYNYLYRLFRKSNLKPFERDISTEIYQAGSTPCNGVEGFNCYFPLQSYGFQPTNGVGYQPYRVVVLSFELLHAPATVCGPKKSTNLVKNKCVNFNFNGLTGTGVLTESNKKFLPFQQFGRDIADTTDAVRDPQTLEILDITPCSFGGVSVITPGTNTSNQVAVLYQGVNCTEVPVAIHADQLTPTWRVYSTGSNVFQTRAGCLIGAEHVNNSYECDIPIGAGICASYQTQTNSPRRARSVASQSIIAYTMSLGAENSVAYSNNSIACPTNFTISVTTEILPVSMTKTSVDCTMYICGDSTECSNLLLQYGSFCTQLNRALTGIAVEQDKNTQEVFAQVKQIYKTPPIKDFGGFNFSQILPDPSKPSKRSFIEDLLFNKVTLADAGFTKQYGDCLGDIAARDLICAQKFNGLTVLPPLLTDEMIAQYTSALLAGTITSGWTFGAGAALQIPFAMQMAYRFNGIGVTQNVLYENQKLIANQFNSAIGKIQDSLSSTASALGKLQDVVNQNAQALNTLVKQLSSNFGAISSVLNDILSRLDKVEAEVQIDRLITGRLQSLQTYVTQQLIRAAEIRASANLAATKMSECVLGQSKRVDFCGKGYHLMSFPQSAPHGVVFLHVTYVPAQEKNFTTAPAICHDGKAHFPREGVFVSNGTHWFVTQRNFCEPQIITTDNTFVSGNCDVVIGIVNNTVYDPLQPELDSGGGGSDIIKLLNEQVNKEMQSSNLYMSMSSWCYTHSLDGAGLFLFDHAAEEYEHAKKLIIFLNENNVPVQLTSISAPEHKFEGLTQIFQKAYEHEQHISESINNIVDHAIKSKDHATFNFLQWYVAEQHEEEVLFKDILDKIELIGNENHGLYLADQYVKGIAKSRKS

SEQ ID NO: 9102 - protein, 1315 aa, Artificial Sequence
  SARS-CoV-2/Australia/NSW56/2020__EPI_ISL_417408 spike protein (1-1147)(I714C_Y1110C) Ferritin construct
MFVFLVLLPLVSSQCVNLTTRTQLPPAYTNSFTRGVYYPDKVFRSSVLHSTQDLFLPFFSNVTWFHAIHVSGTNGTKRFDNPVLPFNDGVYFASTEKSNIIRGWIFGTTLDSKTQSLLIVNNATNVVIKVCEFQFCNDPFLGVYYHKNNKSWMESEFRVYSSANNCTFEYVSQPFLMDLEGKQGNFKNLREFVFKNIDGYFKIYSKHTPINLVRDLPQGFSALEPLVDLPIGINITRFQTLLALHRSYLTPGDSSSGWTAGAAAYYVGYLQPRTFLLKYNENGTITDAVDCALDPLSETKCTLKSFTVEKGIYQTSNFRVQPTESIVRFPNITNLCPFGEVFNATRFASVYAWNRKRISNCVADYSVLYNSASFSTFKCYGVSPTKLNDLCFTNVYADSFVIRGDEVRQIAPGQTGKIADYNYKLPDDFTGCVIAWNSNNLDSKVGGNYNYLYRLFRKSNLKPFERDISTEIYQAGSTPCNGVEGFNCYFPLQSYGFQPTNGVGYQPYRVVVLSFELLHAPATVCGPKKSTNLVKNKCVNFNFNGLTGTGVLTESNKKFLPFQQFGRDIADTTDAVRDPQTLEILDITPCSFGGVSVITPGTNTSNQVAVLYQDVNCTEVPVAIHADQLTPTWRVYSTGSNVFQTRAGCLIGAEHVNNSYECDIPIGAGICASYQTQTNSPRRARSVASQSIIAYTMSLGAENSVAYSNNSIACPTNFTISVTTEILPVSMTKTSVDCTMYICGDSTECSNLLLQYGSFCTQLNRALTGIAVEQDKNTQEVFAQVKQIYKTPPIKDFGGFNFSQILPDSSKPSKRSFIEDLLFNKVTLADAGFIKQYGDCLGDIAARDLICAQKFNGLTVLPPLLTDEMIAQYTSALLAGTITSGWTFGAGAALQIPFAMQMAYRFNGIGVTQNVLYENQKLIANQFNSAIGKIQDSLSSTASALGKLQDVVNQNAQALNTLVKQLSSNFGAISSVLNDILSRLDKVEAEVQIDRLITGRLQSLQTYVTQQLIRAAEIRASANLAATKMSECVLGQSKRVDFCGKGYHLMSFPQSAPHGVVFLHVTYVPAQEKNFTTAPAICHDGKAHFPREGVFVSNGTHWFVTQRNFCEPQIITTDNTFVSGNCDVVIGIVNNTVYDPLQPELDSGGGGSDIIKLLNEQVNKEMQSSNLYMSMSSWCYTHSLDGAGLFLFDHAAEEYEHAKKLIIFLNENNVPVQLTSISAPEHKFEGLTQIFQKAYEHEQHISESINNIVDHAIKSKDHATFNFLQWYVAEQHEEEVLFKDILDKIELIGNENHGLYLADQYVKGIAKSRKS

SEQ ID NO: 9103 - protein, 1315 aa, Artificial Sequence
  SARS-CoV-2/Iceland/280/2020__EPI_ISL_417608 spike protein (1-1147)(I714C_Y1110C) Ferritin construct
MFVFLVLLPLVSSQCVNLTTRTQLPPAYTNSFTRGVYYPDKVFRSSVLHSTQDLFLPFFSNVTWFHAIHVSGTNGTKRFDNPVLPFNDGVYFASTEKSNIIRGWIFGTTLDSKTQSLLIVNNATNVVIKVCEFQFCNDPFLGVYYHKNNKSWMESEFRVYSSANNCTFEYVSQPFLMDLEGKQGNFKNLREFVFKNIDGYFKIYSKHTPINLVRDLPQGFSALEPLVDLPIGINITRFQTLLALHRSYLTPGDSSSGWTAGAAAYYVGYLQPRTFLLKYNENGTITDAVDCALDPLSETKCTLKSFTVEKGIYQTSNFRVQPTESIVRFPNITNLCPFGEVFNATRFASVYAWNRKRISNCVADYSVLYNSASFSTFKCYGVSPTKLNDLCFTNVYADSFVIRGDEVRQIAPGQTGKIADYNYKLPDDFTGCVIAWNSNNLDSKVGGNYNYLYRLFRKSNLKPFERDISTEIYQAGSTPCNGVEGFNCYFPLQSYGFQPTNGVGYQPYRVVVLSFELLHAPATVCGPKKSTNLVKNKCVNFNFNGLTGTGVLTESNKKFLPFQQFGRDIADTTDAVRDPQTLEILDITPCSFGGVSVITPGTNTSNQVAVLYQGVNCTEVPVAIHADQLTPTWRVYSTGSNVFQTRAGCLIGAEHVNNSYECDIPIGAGICASYHTQTNSPRRARSVASQSIIAYTMSLGAENSVAYSNNSIACPTNFTISVTTEILPVSMTKTSVDCTMYICGDSTECSNLLLQYGSFCTQLNRALTGIAVEQDKNTQEVFAQVKQIYKTPPIKDFGGFNFSQILPDPSKPSKRSFIEDLLFNKVTLADAGFIKQYGDCLGDIAARDLICAQKFNGLTVLPPLLTDEMIAQYTSALLAGTITSGWTFGAGAALQIPFAMQMAYRFNGIGVTQNVLYENQKLIANQFNSAIGKIQDSLSSTASALGKLQDVVNQNAQALNTLVKQLSSNFGAISSVLNDILSRLDKVEAEVQIDRLITGRLQSLQTYVTQQLIRAAEIRASANLAATKMSECVLGQSKRVDFCGKGYHLMSFPQSAPHGVVFLHVTYVPAQEKNFTTAPAICHDGKAHFPREGVFVSNGTHWFVTQRNFCEPQIITTDNTFVSGNCDVVIGIVNNTVYDPLQPELDSGGGGSDIIKLLNEQVNKEMQSSNLYMSMSSWCYTHSLDGAGLFLFDHAAEEYEHAKKLIIFLNENNVPVQLTSISAPEHKFEGLTQIFQKAYEHEQHISESINNIVDHAIKSKDHATFNFLQWYVAEQHEEEVLFKDILDKIELIGNENHGLYLADQYVKGIAKSRKS

SEQ ID NO: 9104 - protein, 1315 aa, Artificial Sequence; identical to SEQ ID NO: 9059
  SARS-CoV-2/Iceland/247/2020__EPI_ISL_417575 spike protein (1-1147)(I714C_Y1110C) Ferritin construct

SEQ ID NO: 9105 - protein, 1315 aa, Artificial Sequence
  SARS-CoV-2/Iceland/238/2020__EPI_ISL_417566 spike protein (1-1147)(I714C_Y1110C) Ferritin construct
MFVFLVLLPLVSSQCVNLTTRTQLPPAYTNSFTRGVYYPDKVFRSSVLHSTQDLFLPFFSNVTWFHAIHVSGTNGTKRFDNPVLPFNDGVYFASTEKSNIIRGWIFGTTLDSKTQSLLIVNNATNVVIKVCEFQFCNDPFLGVYYHKNNKSWMESEFRVYSSANNCTFEYVSQPFLMDLEGKQGNFKNLREFVFKNIDGYFKIYSKHTPINLVRDLPQGFSALEPLVDLPIGINITRFQTLLALHRSYLTPGDSSSGWTAGAAAYYVGYLQPRTFLLKYNENGTITDAVDCALDPLSETKCTLKSFTVEKGIYQTSNFRVQPTESIVRFPNITNLCPFGEVFNATRFASVYAWNRKRISNCVADYSVLYNSASFSTFKCYGVSPTKLNDLCFTNVYADSFVIRGDEVRQIAPGQTGKIADYNYKLPDDFTGCVIAWNSNNLDSKVGGNYNYLYRLFRKSNLKPFERDISTEIYQAGSTPCNGVEGFNCYFPLQSYGFQPTNGVGYQPYRVVVLSFELLHAPATVCGPKKSTNLVKNKCVNFNFNGLTGTGVLTESNKKFLPFQQFGRDIADTTDAVRDPQTLEILDITPCSFGGVSVITPGTNTSNQVAVLYQGVNCTEVPVAIHADQLTPTWRVYSTGSNVFQTRAGCLIGAEHVNNSYECDIPIGAGICASYQTQTNSPRRARSVASQSIIAYTMSLGAENSVAYSNNSIACPTNFTISVTTEILPVSMTKTSVDCTMYICGDSTECSNLLLQYGSFCTQLNRALTGIAVEQDKNTQEVFAQVKQIYKTPPIKDFGGFNFSQILPDPSKPSKRSFIEDLLFNKVTLADVGFIKQYGDCLGDIAARDLICAQKFNGLTVLPPLLTDEMIAQYTSALLAGTITSGWTFGAGAALQIPFAMQMAYRFNGIGVTQNVLYENQKLIANQFNSAIGKIQDSLSSTASALGKLQDVVNQNAQALNTLVKQLSSNFGAISSVLNDILSRLDKVEAEVQIDRLITGRLQSLQTYVTQQLIRAAEIRASANLAATKMSECVLGQSKRVDFCGKGYHLMSFPQSAPHGVVFLHVTYVPAQEKNFTTAPAICHDGKAHFPREGVFVSNGTHWFVTQRNFCEPQIITTDNTFVSGNCDVVIGIVNNTVYDPLQPELDSGGGGSDIIKLLNEQVNKEMQSSNLYMSMSSWCYTHSLDGAGLFLFDHAAEEYEHAKKLIIFLNENNVPVQLTSISAPEHKFEGLTQIFQKAYEHEQHISESINNIVDHAIKSKDHATFNFLQWYVAEQHEEEVLFKDILDKIELIGNENHGLYLADQYVKGIAKSRKS

SEQ ID NO: 9106 - protein, 1315 aa, Artificial Sequence
  SARS-CoV-2/Greece/16/2020__EPI_ISL_418265 spike protein (1-1147)(I714C_Y1110C) Ferritin construct
MFVFLVLLPLVSSQCVNLTTRTQLPPAYTNSFTRGVYYPDKVFRSSVLHSTQDLFLPFFSNVTWFHAIHVSGTNGTKRFDNPVLPFNDGVYFASTEKSNIIRGWIFGTTLDSKTQSLLIVNNATNVVIKVCEFQFCNDPFLGVYYHKNNKSWMESEFRVYSSANNCTFEYVSQPFLMDLEGKQGNFKNLREFVFKNVDGYFKIYSKHTPINLVRDLPQGFSALEPLVDLPIGINITRFQTLLALHRSYLTPGDSSSGWTAGAAAYYVGYLQPRTFLLKYNENGTITDAVDCALDPLSETKCTLKSFTVEKGIYQTSNFRVQPTESIVRFPNITNLCPFGEVFNATRFASVYAWNRKRISNCVADYSVLYNSASFSTFKCYGVSPTKLNDLCFTNVYADSFVIRGDEVRQIAPGQTGKIADYNYKLPDDFTGCVIAWNSNNLDSKVGGNYNYLYRLFRKSNLKPFERDISTEIYQAGSTPCNGVEGFNCYFPLQSYGFQPTNGVGYQPYRVVVLSFELLHAPATVCGPKKSTNLVKNKCVNFNFNGLTGTGVLTESNKKFLPFQQFGRDIADTTDAVRDPQTLEILDITPCSFGGVSVITPGTNTSNQVAVLYQDVNCTEVPVAIHADQLTPTWRVYSTGSNVFQTRAGCLIGAEHVNNSYECDIPIGAGICASYQTQTNSPRRARSVASQSIIAYTMSLGAENSVAYSNNSIACPTNFTISVTTEILPVSMTKTSVDCTMYICGDSTECSNLLLQYGSFCTQLNRALTGIAVEQDKNTQEVFAQVKQIYKTPPIKDFGGFNFSQILPDPSKPSKRSFIEDLLFNKVTLADAGFIKQYGDCLGDIAARDLICAQKFNGLTVLPPLLTDEMIAQYTSALLAGTITSGWTFGAGAALQIPFAMQMAYRFNGIGVTQNVLYENQKLIANQFNSAIGKIQDSLSSTASALGKLQDVVNQNAQALNTLVKQLSSNFGAISSVLNDILSRLDKVEAEVQIDRLITGRLQSLQTYVTQQLIRAAEIRASANLAATKMSECVLGQSKRVDFCGKGYHLMSFPQSAPHGVVFLHVTYVPAQEKNFTTAPAICHDGKAHFPREGVFVSNGTHWFVTQRNFCEPQIITTDNTFVSGNCDVVIGIVNNTVYDPLQPELDSGGGGSDIIKLLNEQVNKEMQSSNLYMSMSSWCYTHSLDGAGLFLFDHAAEEYEHAKKLIIFLNENNVPVQLTSISAPEHKFEGLTQIFQKAYEHEQHISESINNIVDHAIKSKDHATFNFLQWYVAEQHEEEVLFKDILDKIELIGNENHGLYLADQYVKGIAKSRKS

SEQ ID NO: 9107 - protein, 1315 aa, Artificial Sequence
  SARS-CoV-2/Iceland/319/2020__EPI_ISL_417648 spike protein (1-1147)(I714C_Y1110C) Ferritin construct
MFVFLVLLPLVSSQCVNLTTRTQLPPAYTNSFTRGVYYPDKVFRSSVLHSTQDLFLPFFSNVTWFHAIHVSGTNGTKRFDNPVLPFNDGVYFASTEKSNIIRGWIFGTTLDSKTQSLLIVNNATNVVIKVCEFQFCNDPFLGVYYHKNNKSWMESEFRVYSSANNCTFEYVSQPFLIDLEGKQGNFKNLREFVFKNIDGYFKIYSKHTPINLVRDLPQGFSALEPLVDLPIGINITRFQTLLALHRSYLTPGDSSSGWTAGAAAYYVGYLQPRTFLLKYNENGTITDAVDCALDPLSETKCTLKSFTVEKGIYQTSNFRVQPTESIVRFPNITNLCPFGEVFNATRFASVYAWNRKRISNCVADYSVLYNSASFSTFKCYGVSPTKLNDLCFTNVYADSFVIRGDEVRQIAPGQTGKIADYNYKLPDDFTGCVIAWNSNNLDSKVGGNYNYLYRLFRKSNLKPFERDISTEIYQAGSTPCNGVEGFNCYFPLQSYGFQPTNGVGYQPYRVVVLSFELLHAPATVCGPKKSTNLVKNKCVNFNFNGLTGTGVLTESNKKFLPFQQFGRDIADTTDAVRDPQTLEILDITPCSFGGVSVITPGTNTSNQVAVLYQGVNCTEVPVAIHADQLTPTWRVYSTGSNVFQTRAGCLIGAEHVNNSYECDIPIGAGICASYQTQTNSPRRARSVASQSIIAYTMSLGAENSVAYSNNSIACPTNFTISVTTEILPVSMTKTSVDCTMYICGDSTECSNLLLQYGSFCTQLNRALTGIAVEQDKNTQEVFAQVKQIYKTPPIKDFGGFNFSQILPDPSKPSKRSFIEDLLFNKVTLADAGFIKQYGDCLGDIAARDLICAQKFNGLTVLPPLLTDEMIAQYTSALLAGTITSGWTFGAGAALQIPFAMQMAYRFNGIGVTQNVLYENQKLIANQFNSAIGKIQDSLSSTASALGKLQDVVNQNAQALNTLVKQLSSNFGAISSVLNDILSRLDKVEAEVQIDRLITGRLQSLQTYVTQQLIRAAEIRASANLAATKMSECVLGQSKRVDFCGKGYHLMSFPQSAPHGVVFLHVTYVPAQEKNFTTAPAICHDGKAHFPREGVFVSNGTHWFVTQRNFCEPQIITTDNTFVSGNCDVVIGIVNNTVYDPLQPELDSGGGGSDIIKLLNEQVNKEMQSSNLYMSMSSWCYTHSLDGAGLFLFDHAAEEYEHAKKLIIFLNENNVPVQLTSISAPEHKFEGLTQIFQKAYEHEQHISESINNIVDHAIKSKDHATFNFLQWYVAEQHEEEVLFKDILDKIELIGNENHGLYLADQYVKGIAKSRKS

SEQ ID NO: 9108 - protein, 1315 aa, Artificial Sequence
  SARS-CoV-2/Congo/94/2020__EPI_ISL_417947 spike protein (1-1147)(I714C_Y1110C) Ferritin construct
MFVFLVLLPLVSSQCVNLTTRTQLPPAYTNSFTRGVYYPDKVFRSSVLHSTQDLFLPFFSNVTWFHAIHVSGTNGTKRFDNPVLPFNDGVYFASTEKSNIIRGWIFGTTLDSKTQSLLIVNNATNVVIKVCEFQFCNDPFLGVYYHKNNKSWMESEFRVYSSANNCTFEYVSQPFLMDLEGKQGNFKNLREFVFKNIDGYFKIYSKHTPINLVRDLPQGFSALEPLVDLPIGINITRFQTLLALHRSYLTPGDSSSGWTAGAAAYYVGYLQPRTFLLKYNENGTITDAVDCALDPLSETKCTLKSFTVEKGIYQTSNFRVQPTESIVRFPNITNLCPFGEVFNATRFASVYAWNRKRISNCVADYSVLYNSASFSTFKCYGVSPTKLNDLCFTNVYADSFVIRGDEVRQIAPGQTGKIADYNYKLPDDFTGCVIAWNSNNLDSKVGGNYNYLYRLFRKSNLKPFERDISTEIYQAGSTPCNGVEGFNCYFPLQSYGFQPTNGVGYQPYRVVVLSFELLHAPATVCGPKKSTNLVKNKCVNFNFNGLTGTGVLTESNKKFLPFQQFGRDIADTTDAVRDPQTLEILDITPCSFGGVSVITPGTNTSNQVAVLYQGVNCTEVPVAIHADQLTPTWRVYSTGSNVFQTRAGCLIGAEHVNNSYECDIPIGAGICASYQTQTNSPRRARSVASQSIIAYTMSLGAENSVAYSNNSIACPTNFTISVTTEILPVSMTKTSVDCTMYICGDSTECSNLLLQYGSFCTQLNRALTGIAVEQDKNTQEVFAQVKQIYKTPPIKDFGGFNFSQILPDPSKPSKRSFIEDILFNKVTLADAGFIKQYGDCLGDIAARDLICAQKFNGLTVLPPLLTDEMIAQYTSALLAGTITSGWTFGAGAALQIPFAMQMAYRFNGIGVTQNVLYENQKLIANQFNSAIGKIQDSLSSTASALGKLQDVVNQNAQALNTLVKQLSSNFGAISSVLNDILSRLDKVEAEVQIDRLITGRLQSLQTYVTQQLIRAAEIRASANLAATKMSECVLGQSKRVDFCGKGYHLMSFPQSAPHGVVFLHVTYVPAQEKNFTTAPAICHDGKAHFPREGVFVSNGTHWFVTQRNFCEPQIITTDNTFVSGNCDVVIGIVNNTVYDPLQPELDSGGGGSDIIKLLNEQVNKEMQSSNLYMSMSSWCYTHSLDGAGLFLFDHAAEEYEHAKKLIIFLNENNVPVQLTSISAPEHKFEGLTQIFQKAYEHEQHISESINNIVDHAIKSKDHATFNFLQWYVAEQHEEEVLFKDILDKIELIGNENHGLYLADQYVKGIAKSRKS

SEQ ID NO: 9109 - protein, 1315 aa, Artificial Sequence
  SARS-CoV-2/Congo/158/2020__EPI_ISL_417950 spike protein (1-1147)(I714C_Y1110C) Ferritin construct
MFVFLVLLPLVSSQCVNLTTRTQLPPAYTNSFTRGVYYPDKVFRSSVLHSTQDLFLPFFSNVTWFHAIHVSGTNGTKRFDNPVLPFNDGVYFASTEKSNIIRGWIFGTTLDSKTQSLLIVNNATNVVIKVCEFQFCNDPFLGVYYHKNNKSWMESEFRVYSSANNCTFEYVSQPFLMDLEGKQGNFKNLREFVFKNIDGYFKIYSKHTPINLVRDLPQGFSALEPLVDLPIGINITRFQTLLALHRSYLTPGDSSSGWTAGAAAYYVGYLQPRTFLLKYNENGTITDAVDCALDPLSETKCTLKSFTVEKGIYQTSNFRVQPTESIVRFPNITNLCPFGEVFNATRFASVYAWNRKRISNCVADYSVLYNSASFSTFKCYGVSPTKLNDLCFTNVYADSFVIRGDEVRQIAPGQTGKIADYNYKLPDDFTGCVIAWNSNNLDSKVGGNYNYLYRLFRKSNLKPFERDISTEIYQAGSTPCNGVEGFNCYFPLQSYGFQPTNGVGYQPYRVVVLSFELLHAPATVCGPKKSTNLVKNKCVNFNFNGLTGTGVLTESNKKFLPFQQFGRDIADTTDAVRDPQTLEILDITPCSFGGVSVITPGTNTSNQVAVLYQDVNCTEVPVAIHADQLTPTWRVYSTGSNVFQTRAGCLIGAEHVNNSYECDIPIGAGICASYQTQTNSPRRARSVASQSIIAYTMSLGAENSVAYSNNSIACPTNFTISVTTEILPVSMTKTSVDCTMYICGDSTECSNLLLQYGSFCTQLNRALTGIAVEQDKNTQEVFAQVKQIYKTPPIKDFGGFNFSQILPDPSKPSKRSFIEDLLFNKVTLADAGFIKQYGDCLGDIAARDLICAQKFNGLTVLPPLLTDEMIAQYTSALLAGTITSGWTFGAGAALQIPFAMQMAYRFNGIGVTQNVLYENQKLIANQFNSAIGKIQDSLSSTASALGKLQDVVNQNAQALNTLVKQLSSNFGAISSVLNDILSRLDKVEAEVQIDRLITGRLQSLQTYVTQQLIRAAEIRASANLAATKMSECVLGQSKRVDFCGKGYHLMSFPQSAPHGVVFLHVTYVPAQEKNFTTAPAICHDGKAHFPREGVFVSNGTHWFVTQRNFCEPQIITTDNTFLSGNCDVVIGIVNNTVYDPLQPELDSGGGGSDIIKLLNEQVNKEMQSSNLYMSMSSWCYTHSLDGAGLFLFDHAAEEYEHAKKLIIFLNENNVPVQLTSISAPEHKFEGLTQIFQKAYEHEQHISESINNIVDHAIKSKDHATFNFLQWYVAEQHEEEVLFKDILDKIELIGNENHGLYLADQYVKGIAKSRKS

SEQ ID NO: 9110 - protein, 1315 aa, Artificial Sequence
  SARS-CoV-2/USA/UT-00034/2020__EPI_ISL_417977 spike protein (1-1147)(I714C_Y1110C) Ferritin construct
MFVFLVLLPLVSSQCVNLTTRTQLPPAYTNSFTRGVYYPDKVFRSSVLHSTQDLFLPFFSNVTWFHAIHVSGTNGTKRFDNPVLPFNDGVYFASTEKSNIIRGWIFGTTLDSKTQSLLIVNNATNVVIKVCEFQFCNDPFLGVYYYKNNKSWMESEFRVYSSANNCTFEYVSQPFLMDLEGKQGNFKNLREFVFKNIDGYFKIYSKHTPINLVRDLPQGFSALEPLVDLPIGINITRFQTLLALHRSYLTPGDSSSGWTAGAAAYYVGYLQPRTFLLKYNENGTITDAVDCALDPLSETKCTLKSFTVEKGIYQTSNFRVQPTESIVRFPNITNLCPFGEVFNATRFASVYAWNRKRISNCVADYSVLYNSASFSTFKCYGVSPTKLNDLCFTNVYADSFVIRGDEVRQIAPGQTGKIADYNYKLPDDFTGCVIAWNSNNLDSKVGGNYNYLYRLFRKSNLKPFERDISTEIYQAGSTPCNGVEGFNCYFPLQSYGFQPTNGVGYQPYRVVVLSFELLHAPATVCGPKKSTNLVKNKCVNFNFNGLTGTGVLTESNKKFLPFQQFGRDIADTTDAVRDPQTLEILDITPCSFGGVSVITPGTNTSNQVAVLYQGVNCTEVPVAIHADQLTPTWRVYSTGSNVFQTRAGCLIGAEHVNNSYECDIPIGAGICASYQTQTNSPRRARSVASQSIIAYTMSLGAENSVAYSNNSIACPTNFTISVTTEILPVSMTKTSVDCTMYICGDSTECSNLLLQYGSFCTQLNRALTGIAVEQDKNTQEVFAQVKQIYKTPPIKDFGGFNFSQILPDPSKPSKRSFIEDLLFNKVTLADAGFIKQYGDCLGDIAARDLICAQKFNGLTVLPPLLTDEMIAQYTSALLAGTITSGWTFGAGAALQIPFAMQMAYRFNGIGVTQNVLYENQKLIANQFNSAIGKIQDSLSSTASALGKLQDVVNQNAQALNTLVKQLSSNFGAISSVLNDILSRLDKVEAEVQIDRLITGRLQSLQTYVTQQLIRAAEIRASANLAATKMSECVLGQSKRVDFCGKGYHLMSFPQSAPHGVVFLHVTYVPAQEKNFTTAPAICHDGKAHFPREGVFVSNGTHWFVTQRNFCEPQIITTDNTFVSGNCDVVIGIVNNTVYDPLQPELDSGGGGSDIIKLLNEQVNKEMQSSNLYMSMSSWCYTHSLDGAGLFLFDHAAEEYEHAKKLIIFLNENNVPVQLTSISAPEHKFEGLTQIFQKAYEHEQHISESINNIVDHAIKSKDHATFNFLQWYVAEQHEEEVLFKDILDKIELIGNENHGLYLADQYVKGIAKSRKS

SEQ ID NO: 9111 - protein, 1315 aa, Artificial Sequence
  SARS-CoV-2/USA/UT-00033/2020__EPI_ISL_417976 spike protein (1-1147)(I714C_Y1110C) Ferritin construct
MFVFLVLLPLVSSQCVNLTTRTQLPPAYTNSFTRGVYYPDKVFRSSVLHSTQDLFLPFFSNVTWFHAIHVSGTNGTKRFDNPVLPFNDGVYFASTEKSNIIRGWIFGTTLDSKTQSLLIVNNATNVVIKVCEFQFCNDPFLGVYYHKNNKSWMESEFRVYSSANNCTFEYVSQPFLMDLEGKQGNFKNLREFVFKNIDGYFKIYSKHTPINLVRDLPQGFSALEPLVDLPIGINITRFQTLLALHRSYLTPGDSSSGLTAGAAAYYVGYLQPRTFLLKYNENGTITDAVDCALDPLSETKCTLKSFTVEKGIYQTSNFRVQPTESIVRFPNITNLCPFGEVFNATRFASVYAWNRKRISNCVADYSVLYNSASFSTFKCYGVSPTKLNDLCFTNVYADSFVIRGDEVRQIAPGQTGKIADYNYKLPDDFTGCVIAWNSNNLDSKVGGNYNYLYRLFRKSNLKPFERDISTEIYQAGSTPCNGVEGFNCYFPLQSYGFQPTNGVGYQPYRVVVLSFELLHAPATVCGPKKSTNLVKNKCVNFNFNGLTGTGVLTESNKKFLPFQQFGRDIADTTDAVRDPQTLEILDITPCSFGGVSVITPGTNTSNQVAVLYQGVNCTEVPVAIHADQLTPTWRVYSTGSNVFQTRAGCLIGAEHVNNSYECDIPIGAGICASYQTQTNSPRRARSVASQSIIAYTMSLGAENSVAYSNNSIACPTNFTISVTTEILPVSMTKTSVDCTMYICGDSTECSNLLLQYGSFCTQLNRALTGIAVEQDKNTQEVFAQVKQIYKTPPIKDFGGFNFSQILPDPSKPSKRSFIEDLLFNKVTLADAGFIKQYGDCLGDIAARDLICAQKFNGLTVLPPLLTDEMIAQYTSALLAGTITSGWTFGAGAALQIPFAMQMAYRFNGIGVTQNVLYENQKLIANQFNSAIGKIQDSLSSTASALGKLQDVVNQNAQALNTLVKQLSSNFGAISSVLNDILSRLDKVEAEVQIDRLITGRLQSLQTYVTQQLIRAAEIRASANLAATKMSECVLGQSKRVDFCGKGYHLMSFPQSAPHGVVFLHVTYVPAQEKNFTTAPAICHDGKAHFPREGVFVSNGTHWFVTQRNFCEPQIITTDNTFVSGNCDVVIGIVNNTVYDPLQPELDSGGGGSDIIKLLNEQVNKEMQSSNLYMSMSSWCYTHSLDGAGLFLFDHAAEEYEHAKKLIIFLNENNVPVQLTSISAPEHKFEGLTQIFQKAYEHEQHISESINNIVDHAIKSKDHATFNFLQWYVAEQHEEEVLFKDILDKIELIGNENHGLYLADQYVKGIAKSRKS

SEQ ID NO: 9112 - protein, 1315 aa, Artificial Sequence
  SARS-CoV-2/USA/WI-13/2020__EPI_ISL_417516 spike protein (1-1147)(I714C_Y1110C) Ferritin construct
MFVFLVLLPLVSSQCVNLTTRTQLPPAYTNSFTRGVYYPDKVFRSSVLHSTQDLFLPFFSNVTWFHAIHVSGTNGTKRFDNPVLPFNDGVYFASTEKSNIIRGWIFGTTLDSKTQSLLIVNNATNVVIKVCEFQFCNDPFLGVYYHKNNKSWMESEFRVYSSANNCTFEYVSQPFLMDLEGKQGNFKNLREFVFKNIDGYFKIYSKHTPINLVRDLPQGFSALEPLVDLPIGINITRFQTLLALHRSYLTPGDSSSGWTAGAAAYYVGYLQPRTFLLKYNENGTITDAVDCALDPLSETKCTLKSFTVEKGIYQTSNFRVLPTESIVRFPNITNLCPFGEVFNATRFASVYAWNRKRISNCVADYSVLYNSASFSTFKCYGVSPTKLNDLCFTNVYADSFVIRGDEVRQIAPGQTGKIADYNYKLPDDFTGCVIAWNSNNLDSKVGGNYNYLYRLFRKSNLKPFERDISTEIYQAGSTPCNGVEGFNCYFPLQSYGFQPTNGVGYQPYRVVVLSFELLHAPATVCGPKKSTNLVKNKCVNFNFNGLTGTGVLTESNKKFLPFQQFGRDIADTTDAVRDPQTLEILDITPCSFGGVSVITPGTNTSNQVAVLYQGVNCTEVPVAIHADQLTPTWRVYSTGSNVFQTRAGCLIGAEHVNNSYECDIPIGAGICASYQTQTNSPRRARSVASQSIIAYTMSLGAENSVAYSNNSIACPTNFTISVTTEILPVSMTKTSVDCTMYICGDSTECSNLLLQYGSFCTQLNRALTGIAVEQDKNTQEVFAQVKQIYKTPPIKDFGGFNFSQILPDPSKPSKRSFIEDLLFNKVTLADAGFIKQYGDCLGDIAARDLICAQKFNGLTVLPPLLTDEMIAQYTSALLAGTITSGWTFGAGAALQIPFAMQMAYRFNGIGVTQNVLYENQKLIANQFNSAIGKIQDSLSSTASALGKLQDVVNQNAQALNTLVKQLSSNFGAISSVLNDILSRLDKVEAEVQIDRLITGRLQSLQTYVTQQLIRAAEIRASANLAATKMSECVLGQSKRVDFCGKGYHLMSFPQSAPHGVVFLHVTYVPAQEKNFTTAPAICHDGKAHFPREGVFVSNGTHWFVTQRNFCEPQIITTDNTFVSGNCDVVIGIVNNTVYDPLQPELDSGGGGSDIIKLLNEQVNKEMQSSNLYMSMSSWCYTHSLDGAGLFLFDHAAEEYEHAKKLIIFLNENNVPVQLTSISAPEHKFEGLTQIFQKAYEHEQHISESINNIVDHAIKSKDHATFNFLQWYVAEQHEEEVLFKDILDKIELIGNENHGLYLADQYVKGIAKSRKS

SEQ ID NO: 9113 - protein, 1314 aa, Artificial Sequence
  SARS-CoV-2/India/1-27/2020__EPI_ISL_413522 spike protein (1-1146)(I713C_Y1109C) Ferritin construct
MFVFLVLLPLVSSQCVNLTTRTQLPPAYTNSFTRGVYYPDKVFRSSVLHSTQDLFLPFFSNVTWFHAIHVSGTNGTKRFDNPVLPFNDGVYFASTEKSNIIRGWIFGTTLDSKTQSLLIVNNATNVVIKVCEFQFCNDPFLGVYHKNNKSWMESEFRVYSSANNCTFEYVSQPFLMDLEGKQGNFKNLREFVFKNIDGYFKIYSKHTPINLVRDLPQGFSALEPLVDLPIGINITRFQTLLALHRSYLTPGDSSSGWTAGAAAYYVGYLQPRTFLLKYNENGTITDAVDCALDPLSETKCTLKSFTVEKGIYQTSNFRVQPTESIVRFPNITNLCPFGEVFNATRFASVYAWNRKRISNCVADYSVLYNSASFSTFKCYGVSPTKLNDLCFTNVYADSFVIRGDEVIQIAPGQTGKIADYNYKLPDDFTGCVIAWNSNNLDSKVGGNYNYLYRLFRKSNLKPFERDISTEIYQAGSTPCNGVEGFNCYFPLQSYGFQPTNGVGYQPYRVVVLSFELLHAPATVCGPKKSTNLVKNKCVNFNFNGLTGTGVLTESNKKFLPFQQFGRDIADTTDAVRDPQTLEILDITPCSFGGVSVITPGTNTSNQVAVLYQDVNCTEVPVAIHADQLTPTWRVYSTGSNVFQTRAGCLIGAEHVNNSYECDIPIGAGICASYQTQTNSPRRARSVASQSIIAYTMSLGAENSVAYSNNSIACPTNFTISVTTEILPVSMTKTSVDCTMYICGDSTECSNLLLQYGSFCTQLNRALTGIAVEQDKNTQEVFAQVKQIYKTPPIKDFGGFNFSQILPDPSKPSKRSFIEDLLFNKVTLADAGFIKQYGDCLGDIAARDLICAQKFNGLTVLPPLLTDEMIAQYTSALLAGTITSGWTFGAGAALQIPFAMQMAYRFNGIGVTQNVLYENQKLIANQFNSAIGKIQDSLSSTASALGKLQDVVNQNAQALNTLVKQLSSNFGAISSVLNDILSRLDKVEAEVQIDRLITGRLQSLQTYVTQQLIRAAEIRASANLAATKMSECVLGQSKRVDFCGKGYHLMSFPQSAPHGVVFLHVTYVPAQEKNFTTAPAICHDGKAHFPREGVFVSNGTHWFVTQRNFCEPQIITTDNTFVSGNCDVVIGIVNNTVYDPLQPELDSGGGGSDIIKLLNEQVNKEMQSSNLYMSMSSWCYTHSLDGAGLFLFDHAAEEYEHAKKLIIFLNENNVPVQLTSISAPEHKFEGLTQIFQKAYEHEQHISESINNIVDHAIKSKDHATFNFLQWYVAEQHEEEVLFKDILDKIELIGNENHGLYLADQYVKGIAKSRKS

SEQ ID NO: 9114 - protein, 1309 aa, Artificial Sequence
  SARS-CoV-2/pangolin/Guangxi/P4L/2017__EPI_ISL_410538 spike protein (1-1141)(I708C_Y1104C) Ferritin construct
MFVFLFVLPLVSSQCVNLTTRTGIPPGYTNSSTRGVYYPDKVFRSSILHLTQDLFLPFFSNVTWFNTINYQGGFKKFDNPVLPFNDGVYFASTEKSNIIRGWIFGTTLDARTQSLLIVNNATNVVIKVCEFQFCTDPFLGVYYHNNNKTWVENEFRVYSSANNCTFEYISQPFLMDLEGKQGNFKNLREFVFKNVDGYFKIYSKHTPIDLVRDLPRGFAALEPLVDLPIGINITRFQTLLALHRSYLTPGNLESGWTTGAAAYYVGYLQQRTFLLSYNQNGTITDAVDCSLDPLSETKCTLKSLTVEKGIYQTSNFRVQPTISIVRFPNITNLCPFGEVFNASKFASVYAWNRKRISNCVADYSVLYNSTSFSTFKCYGVSPTKLNDLCFTNVYADSFVVKGDEVRQIAPGQTGVIADYNYKLPDDFTGCVIAWNSVKQDALTGGNYGYLYRLFRKSKLKPFERDISTEIYQAGSTPCNGQVGLNCYYPLERYGFHPTTGVNYQPFRVVVLSFELLNGPATVCGPKLSTTLVKDKCVNFNFNGLTGTGVLTTSKKQFLPFQQFGRDISDTTDAVRDPQTLEILDITPCSFGGVSVITPGTNTSNQVAVLYQDVNCTEVPMAIHAEQLTPAWRVYSAGANVFQTRAGCLVGAEHVNNSYECDIPVGAGICASYHSMSSLRSVNQRSIIAYTMSLGAENSVAYSNNSIACPTNFTISVTTEILPVSMTKTSVDCTMYICGDSIECSNLLLQYGSFCTQLNRALTGIAVEQDKNTQEVFAQVKQIYKTPPIKDFGGFNFSQILPDPSKPSKRSFIEDLLFNKVTLADAGFIKQYGDCLGDIAARDLICAQKFNGLTVLPPLLTDEMIAQYTSALLAGTITSGWTFGAGAALQIPFAMQMAYRFNGIGVTQNVLYENQKLIANQFNSAIGKIQDSLSSTASALGKLQDVVNQNAQALNTLVKQLSSNFGAISSVLNDILSRLDKVEAEVQIDRLITGRLQSLQTYVTQQLIRAAEIRASANLAATKMSECVLGQSKRVDFCGKGYHLMSFPQSAPHGVVFLHVTYVPAQEKNFTTAPAICHEGKAHFPREGVFVSNGTHWFITQRNFCEPQIITTDNTFVSGSCDVVIGIVNNTVYDPLQPELDSGGGGSDIIKLLNEQVNKEMQSSNLYMSMSSWCYTHSLDGAGLFLFDHAAEEYEHAKKLIIFLNENNVPVQLTSISAPEHKFEGLTQIFQKAYEHEQHISESINNIVDHAIKSKDHATFNFLQWYVAEQHEEEVLFKDILDKIELIGNENHGLYLADQYVKGIAKSRKS

SEQ ID NO: 9115 - protein, 1309 aa, Artificial Sequence
  SARS-CoV-2/pangolin/Guangxi/P5L/2017__EPI_ISL_410540 spike protein (1-1141)(I708C_Y1104C) Ferritin construct
MFVFLFVLPLVSSQCVNLTTRTGIPPGYTNSSTRGVYYPDKVFRSSILHLTQDLFLPFFSNVTWFNTINYQGGFKKFDNPVLPFNDGVYFASTEKSNIIRGWIFGTTLDARTQSLLIVNNATNVVIKVCEFQFCTDPFLGVYYHNNNKTWVENEFRVYSSANNCTFEYISQPFLMDLEGKQGNFKNLREFVFKNVDGYFKIYSKHTPIDLVRDLPRGFAALEPLVDLPIGINITRFQTLLALHRSYLTPGKLESGWTTGAAAYYVGYLQQRTFLLSYNQNGTITDAVDCSLDPLSETKCTLKSLTVEKGIYQTSNFRVQPTISIVRFPNITNLCPFGEVFNASKFASVYAWNRKRISNCVADYSVLYNSTSFSTFKCYGVSPTKLNDLCFTNVYADSFVVKGDEVRQIAPGQTGVIADYNYKLPDDFTGCVIAWNSVKQDALTGGNYGYLYRLFRKSKLKPFERDISTEIYQAGSTPCNGQVGLNCYYPLERYGFHPTTGVNYQPFRVVVLSFELLNGPATVCGPKLSTTLVKDKCVNFNFNGLTGTGVLTTSKKQFLPFQQFGRDISDTTDAVRDPQTLEILDITPCSFGGVSVITPGTNTSNQVAVLYQDVNCTEVPMAIHAEQLTPAWRVYSAGANVFQTRAGCLVGAEHVNNSYECDIPVGAGICASYHSMSSFRSVNQRSIIAYTMSLGAENSVAYSNNSIACPTNFTISVTTEILPVSMTKTSVDCTMYICGDSIECSNLLLQYGSFCTQLNRALTGIAVEQDKNTQEVFAQVKQIYKTPPIKDFGGFNFSQILPDPSKPSKRSFIEDLLFNKVTLADAGFIKQYGDCLGDIAARDLICAQKFNGLTVLPPLLTDEMIAQYTSALLAGTITSGWTFGAGAALQIPFAMQMAYRFNGIGVTQNVLYENQKLIANQFNSAIGKIQDSLSSTASALGKLQDVVNQNAQALNTLVKQLSSNFGAISSVLNDILSRLDKVEAEVQIDRLITGRLQSLQTYVTQQLIRAAEIRASANLAATKMSECVLGQSKRVDFCGKGYHLMSFPQSAPHGVVFLHVTYVPAQEKNFTTAPAICHEGKAHFPREGVFVSNGTHWFITQRNFCEPQIITTDNTFVSGSCDVVIGIVNNTVYDPLQPELDSGGGGSDIIKLLNEQVNKEMQSSNLYMSMSSWCYTHSLDGAGLFLFDHAAEEYEHAKKLIIFLNENNVPVQLTSISAPEHKFEGLTQIFQKAYEHEQHISESINNIVDHAIKSKDHATFNFLQWYVAEQHEEEVLFKDILDKIELIGNENHGLYLADQYVKGIAKSRKS

SEQ ID NO: 9116 - protein, 1309 aa, Artificial Sequence
  SARS-CoV-2/pangolin/Guangxi/P5E/2017__EPI_ISL_410541 spike protein (1-1141)(I708C_Y1104C) Ferritin construct
MFVFLFVLPLVSSQCVNLTTRTGIPPGYTNSSTRGVYYPDKVFRSSILHLTQDLFLPFFSNVTWFNTITYQGGSKKFDNPVLPFNDGVYFASTEKSNIIRGWIFGTTLDARTQSLLIVNNATNVVIKVCEFQFCTDPFLGVYYHNNNKTWVENEFRVYSSANNCTFEYISQPFLMDLEGKQGNFKNLREFVFKNVDGYFKIYSKHTPIDLVRDLPRGFAALEPLVDLPIGINITRFQTLLALHRSYLTPGKLESGWTTGAAAYYVGYLQQRTFLLSYNQNGTITDAVDCSLDPLSETKCTLKSLTVEKGIYQTSNFRVQPTISIVRFPNITNLCPFGEVFNASKFASVYAWNRKRISNCVADYSVLYNSTSFSTFKCYGVSPTKLNDLCFTNVYADSFVVKGDEVRQIAPGQTGVIADYNYKLPDDFTGCVIAWNSVKQDALTGDNYGYLYRLFRKSKLKPFERDISTEIYQAGSTPCNGQVGLNCYYPLERYGFHPTTGVNYQPFRVVVLSFELLNGPATVCGPKLSTTLVKDKCVNFNFNGLTGTGVLTTSKKQFLPFQQFGRDISDTTDAVRDPQTLEILDITPCSFGGVSVITPGTNTSNQVAVLYQDVNCTEVPMAIHAEQLTPAWRVYSAGANVFQTRAGCLVGAEHVNNSYECDIPVGAGICASYHSMSSFRSVNQRSIIAYTMSLGAENSVAYSNNSIACPTNFTISVTTEILPVSMTKTSVDCTMYICGDSIECSNLLLQYGSFCTQLNRALTGIAVEQDKNTQEVFAQVKQIYKTPPIKDFGGFNFSQILPDPSKPSKRSFIEDLLFNKVTLADAGFIKQYGDCLGDIAARDLICAQKFNGLTVLPPLLTDEMIAQYTSALLAGTITSGWTFGAGAALQIPFAMQMAYRFNGIGVTQNVLYENQKLIANQFNSAIGKIQDSLSSTASALGKLQDVVNQNAQALNTLVKQLSSNFGAISSVLNDILSRLDKVEAEVQIDRLITGRLQSLQTYVTQQLIRAAEIRASANLAATKMSECVLGQSKRVDFCGKGYHLMSFPQSAPHGVVFLHVTYVPAQEKNFTTAPAICHEGKAHFPREGVFVSNGTHWFITQRNFCEPQIITTDNTFVSGSCDVVIGIVNNTVYDPLQPELDSGGGGSDIIKLLNEQVNKEMQSSNLYMSMSSWCYTHSLDGAGLFLFDHAAEEYEHAKKLIIFLNENNVPVQLTSISAPEHKFEGLTQIFQKAYEHEQHISESINNIVDHAIKSKDHATFNFLQWYVAEQHEEEVLFKDILDKIELIGNENHGLYLADQYVKGIAKSRKS

SEQ ID NO: 9117 - protein, 1307 aa, Artificial Sequence
  SARS-CoV-2/pangolin/Guangxi/P1E/2017__EPI_ISL_410539 spike protein (1-1139)(I706C_Y1102C) Ferritin construct
MFVFLFVLPLVSSQCVNLTTRTGIQPGYTNSSTRGVYYPDKVFRSSILHLTQDLFLPFFSNVTWFNTINYQGGFKKFDNPVLPFNDGVYFASTEKSNIIRGWIFGTTLDARTQSLLIVNNATNVVIKVCEFQFCTDPFLGVYYHNNNKTWVENEFRVYSSANNCTFEYISQPFLMDLEGKQGNFKNLREFVFKNVDGYFKIYSKHTPIDLVRDLPRGFAALEPLVDLPIGINITRFQTLLALHRSYLTPGKLESGWTTGAAAYYVGYLQQRTFLLSYNQNGTITDAVDCSLDPLSETKCTLKSLTVEKGIYQTSNFRVQPTISIVRFPNITNLCPFGEVFNASKFASVYAWNRKRISNCVADYSVLYNSTSFSTFKCYGVSPTKLNDLCFTNVYADSFVVKGDEVRQIAPGQTGVIADYNYKLPDDFTGCVIAWNSVKQDALTGGNYLYRLFRKSKLKPFERDISTEIYQAGSTPCNGQVGLNCYYPLERYGFHPTTGVNYQPFRVVVLSFELLNGPATVCGPKLSTTLVKDKCVNFNFNGLTGTGVLTTSKKQFLPFQQFGRDISDTTDAVRDPQTLEILDITPCSFGGVSVITPGTNTSNQVAVLYQDVNCTEVPMAIHAEQLTPAWRVYSAGANVFQTRAGCLVGAEHVNNSYECDIPVGAGICASYHSMSSLRSVNQRSIIAYTMSLGAENSVAYSNNSIACPTNFTISVTTEILPVSMTKTSVDCTMYICGDSIECSNLLLQYGSFCTQLNRALTGIAVEQDKNTQEVFAQVKQIYKTPPIKDFGGFNFSQILPDPSKPSKRSFIEDLLFNKVTLADAGFIKQYGDCLGDIAARDLICAQKFNGLTVLPPLLTDEMIAQYTSALLAGTITSGWTFGAGAALQIPFAMQMAYRFNGIGVTQNVLYENQKLIANQFNSAIGKIQDSLSSTASALGKLQDVVNQNAQALNTLVKQLSSNFGAISSVLNDILSRLDKVEAEVQIDRLITGRLQSLQTYVTQQLIRAAEIRASANLAATKMSECVLGQSKRVDFCGKGYHLMSFPQSAPHGVVFLHVTYVPAQEKNFTTAPAICHEGKAHFPREGVFVSNGTHWFITQRNFCEPQIITTDNTFVSGSCDVVIGIVNNTVYDPLQPELDSGGGGSDIIKLLNEQVNKEMQSSNLYMSMSSWCYTHSLDGAGLFLFDHAAEEYEHAKKLIIFLNENNVPVQLTSISAPEHKFEGLTQIFQKAYEHEQHISESINNIVDHAIKSKDHATFNFLQWYVAEQHEEEVLFKDILDKIELIGNENHGLYLADQYVKGIAKSRKS

SEQ ID NO: 9118 - protein, 1315 aa, Artificial Sequence
  SARS-CoV-2/Wuhan/WIV05/2019__EPI_ISL_402128 spike protein (1-1147)(P715C_P1069C) Ferritin construct
MFVFLVLLPLVSSQCVNLTTRTQLPPAYTNSFTRGVYYPDKVFRSSVLHSTQDLFLPFFSNVTWFHAIHVSGTNGTKRFDNPVLPFNDGVYFASTEKSNIIRGWIFGTTLDSKTQSLLIVNNATNVVIKVCEFQFCNDPFLGVYYHKNNKSWMESEFRVYSSANNCTFEYVSQPFLMDLEGKQGNFKNLREFVFKNIDGYFKIYSKHTPINLVRDLPQGFSALEPLVDLPIGINITRFQTLLALHRSYLTPGDSSSGWTAGAAAYYVGYLQPRTFLLKYNENGTITDAVDCALDPLSETKCTLKSFTVEKGIYQTSNFRVQPTESIVRFPNITNLCPFGEVFNATRFASVYAWNRKRISNCVADYSVLYNSASFSTFKCYGVSPTKLNDLCFTNVYADSFVIRGDEVRQIAPGQTGKIADYNYKLPDDFTGCVIAWNSNNLDSKVGGNYNYLYRLFRKSNLKPFERDISTEIYQAGSTPCNGVEGFNCYFPLQSYGFQPTNGVGYQPYRVVVLSFELLHAPATVCGPKKSTNLVKNKCVNFNFNGLTGTGVLTESNKKFLPFQQFGRDIADTTDAVRDPQTLEILDITPCSFGGVSVITPGTNTSNQVAVLYQDVNCTEVPVAIHADQLTPTWRVYSTGSNVFQTRAGCLIGAEHVNNSYECDIPIGAGICASYQTQTNSPRRARSVASQSIIAYTMSLGAENSVAYSNNSIAICTNFTISVTTEILPVSMTKTSVDCTMYICGDSTECSNLLLQYGSFCTQLNRALTGIAVEQDKNTQEVFAQVKQIYKTPPIKDFGGFNFSQILPDPSKPSKRSFIEDLLFNKVTLADAGFIKQYGDCLGDIAARDLICAQKFNGLTVLPPLLTDEMIAQYTSALLAGTITSGWTFGAGAALQIPFAMQMAYRFNGIGVTQNVLYENQKLIANQFNSAIGKIQDSLSSTASALGKLQDVVNQNAQALNTLVKQLSSNFGAISSVLNDILSRLDKVEAEVQIDRLITGRLQSLQTYVTQQLIRAAEIRASANLAATKMSECVLGQSKRVDFCGKGYHLMSFPQSAPHGVVFLHVTYVCAQEKNFTTAPAICHDGKAHFPREGVFVSNGTHWFVTQRNFYEPQIITTDNTFVSGNCDVVIGIVNNTVYDPLQPELDSGGGGSDIIKLLNEQVNKEMQSSNLYMSMSSWCYTHSLDGAGLFLFDHAAEEYEHAKKLIIFLNENNVPVQLTSISAPEHKFEGLTQIFQKAYEHEQHISESINNIVDHAIKSKDHATFNFLQWYVAEQHEEEVLFKDILDKIELIGNENHGLYLADQYVKGIAKSRKS

SEQ ID NO: 9119 - protein, 1311 aa, Artificial Sequence
  SARS-CoV-2/bat/Yunnan/RaTG13/2013__EPI_ISL_402131 spike protein (1-1143)(P711C_P1065C) Ferritin construct
MFVFLVLLPLVSSQCVNLTTRTQLPPAYTNSSTRGVYYPDKVFRSSVLHLTQDLFLPFFSNVTWFHAIHVSGTNGIKRFDNPVLPFNDGVYFASTEKSNIIRGWIFGTTLDSKTQSLLIVNNATNVVIKVCEFQFCNDPFLGVYYHKNNKSWMESEFRVYSSANNCTFEYVSQPFLMDLEGKQGNFKNLREFVFKNIDGYFKIYSKHTPINLVRDLPPGFSALEPLVDLPIGINITRFQTLLALHRSYLTPGDSSSGWTAGAAAYYVGYLQPRTFLLKYNENGTITDAVDCALDPLSETKCTLKSFTVEKGIYQTSNFRVQPTDSIVRFPNITNLCPFGEVFNATTFASVYAWNRKRISNCVADYSVLYNSTSFSTFKCYGVSPTKLNDLCFTNVYADSFVITGDEVRQIAPGQTGKIADYNYKLPDDFTGCVIAWNSKHIDAKEGGNFNYLYRLFRKANLKPFERDISTEIYQAGSKPCNGQTGLNCYYPLYRYGFYPTDGVGHQPYRVVVLSFELLNAPATVCGPKKSTNLVKNKCVNFNFNGLTGTGVLTESNKKFLPFQQFGRDIADTTDAVRDPQTLEILDITPCSFGGVSVITPGTNASNQVAVLYQDVNCTEVPVAIHADQLTPTWRVYSTGSNVFQTRAGCLIGAEHVNNSYECDIPIGAGICASYQTQTNSRSVASQSIIAYTMSLGAENSVAYSNNSIAICTNFTISVTTEILPVSMTKTSVDCTMYICGDSTECSNLLLQYGSFCTQLNRALTGIAVEQDKNTQEVFAQVKQIYKTPPIKDFGGFNFSQILPDPSKPSKRSFIEDLLFNKVTLADAGFIKQYGDCLGDIAARDLICAQKFNGLTVLPPLLTDEMIAQYTSALLAGTITSGWTFGAGAALQIPFAMQMAYRFNGIGVTQNVLYENQKLIANQFNSAIGKIQDSLSSTASALGKLQDVVNQNAQALNTLVKQLSSNFGAISSVLNDILSRLDKVEAEVQIDRLITGRLQSLQTYVTQQLIRAAEIRASANLAATKMSECVLGQSKRVDFCGKGYHLMSFPQSAPHGVVFLHVTYVCAQEKNFTTAPAICHDGKAHFPREGVFVSNGTHWFVTQRNFYEPQIITTDNTFVSGSCDVVIGIVNNTVYDPLQPELDSGGGGSDIIKLLNEQVNKEMQSSNLYMSMSSWCYTHSLDGAGLFLFDHAAEEYEHAKKLIIFLNENNVPVQLTSISAPEHKFEGLTQIFQKAYEHEQHISESINNIVDHAIKSKDHATFNFLQWYVAEQHEEEVLFKDILDKIELIGNENHGLYLADQYVKGIAKSRKS

SEQ ID NO: 9120 - protein, 1315 aa, Artificial Sequence
  SARS-CoV-2/Wuhan/HBCDC-HB-01/2019__EPI_ISL_402132 spike protein (1-1147)(P715C_P1069C) Ferritin construct
MFVFLVLLPLVSSQCVNLTTRTQLPPAYTNSITRGVYYPDKVFRSSVLHSTQDLFLPFFSNVTWFHAIHVSGTNGTKRFDNPVLPFNDGVYFASTEKSNIIRGWIFGTTLDSKTQSLLIVNNATNVVIKVCEFQFCNDPFLGVYYHKNNKSWMESEFRVYSSANNCTFEYVSQPFLMDLEGKQGNFKNLREFVFKNIDGYFKIYSKHTPINLVRDLPQGFSALEPLVDLPIGINITRFQTLLALHRSYLTPGDSSSGWTAGAAAYYVGYLQPRTFLLKYNENGTITDAVDCALDPLSETKCTLKSFTVEKGIYQTSNFRVQPTESIVRFPNITNLCPFGEVFNATRFASVYAWNRKRISNCVADYSVLYNSASFSTFKCYGVSPTKLNDLCFTNVYADSFVIRGDEVRQIAPGQTGKIADYNYKLPDDFTGCVIAWNSNNLDSKVGGNYNYLYRLFRKSNLKPFERDISTEIYQAGSTPCNGVEGFNCYFPLQSYGFQPTNGVGYQPYRVVVLSFELLHAPATVCGPKKSTNLVKNKCVNFNFNGLTGTGVLTESNKKFLPFQQFGRDIADTTDAVRDPQTLEILDITPCSFGGVSVITPGTNTSNQVAVLYQDVNCTEVPVAIHADQLTPTWRVYSTGSNVFQTRAGCLIGAEHVNNSYECDIPIGAGICASYQTQTNSPRRARSVASQSIIAYTMSLGAENSVAYSNNSIAICTNFTISVTTEILPVSMTKTSVDCTMYICGDSTECSNLLLQYGSFCTQLNRALTGIAVEQDKNTQEVFAQVKQIYKTPPIKDFGGFNFSQILPDPSKPSKRSFIEDLLFNKVTLADAGFIKQYGDCLGDIAARDLICAQKFNGLTVLPPLLTDEMIAQYTSALLAGTITSGWTFGAGAALQIPFAMQMAYRFNGIGVTQNVLYENQKLIANQFNSAIGKIQDSLSSTASALGKLQDVVNQNAQALNTLVKQLSSNFGAISSVLNDILSRLDKVEAEVQIDRLITGRLQSLQTYVTQQLIRAAEIRASANLAATKMSECVLGQSKRVDFCGKGYHLMSFPQSAPHGVVFLHVTYVCAQEKNFTTAPAICHDGKAHFPREGVFVSNGTHWFVTQRNFYEPQIITTDNTFVSGNCDVVIGIVNNTVYDPLQPELDSGGGGSDIIKLLNEQVNKEMQSSNLYMSMSSWCYTHSLDGAGLFLFDHAAEEYEHAKKLIIFLNENNVPVQLTSISAPEHKFEGLTQIFQKAYEHEQHISESINNIVDHAIKSKDHATFNFLQWYVAEQHEEEVLFKDILDKIELIGNENHGLYLADQYVKGIAKSRKS

SEQ ID NO: 9121 - protein, 1315 aa, Artificial Sequence
  SARS-CoV-2/Guangdong/20SF028/2020__EPI_ISL_403936 spike protein (1-1147)(P715C_P1069C) Ferritin construct
MFVFLVLLPLVSSQCVNLTTRTQLPPAYTNSFTRGVYYPDKVFRSSVLYSTQDLFLPFFSNVTWFHAIHVSGTNGTKRFDNPVLPFNDGVYFASTEKSNIIRGWIFGTTLDSKTQSLLIVNNATNVVIKVCEFQFCNDPFLGVYYHKNNKSWMESEFRVYSSANNCTFEYVSQPFLMDLEGKQGNFKNLREFVFKNIDGYFKIYSKHTPINLVRDLPQGFSALEPLVDLPIGINITRFQTLLALHRSYLTPGDSSSGWTAGAAAYYVGYLQPRTFLLKYNENGTITDAVDCALDPLSETKCTLKSFTVEKGIYQTSNFRVQPTESIVRFPNITNLCPFGEVFNATRFASVYAWNRKRISNCVADYSVLYNSASFSTFKCYGVSPTKLNDLCFTNVYADSFVIRGDEVRQIAPGQTGKIADYNYKLPDDFTGCVIAWNSNNLDSKVGGNYNYLYRLFRKSNLKPFERDISTEIYQAGSTPCNGVEGFNCYFPLQSYGFQPTNGVGYQPYRVVVLSFELLHAPATVCGPKKSTNLVKNKCVNFNFNGLTGTGVLTESNKKFLPFQQFGRDIADTTDAVRDPQTLEILDITPCSFGGVSVITPGTNTSNQVAVLYQDVNCTEVPVAIHADQLTPTWRVYSTGSNVFQTRAGCLIGAEHVNNSYECDIPIGAGICASYQTQTNSPRRARSVASQSIIAYTMSLGAENSVAYSNNSIAICTNFTISVTTEILPVSMTKTSVDCTMYICGDSTECSNLLLQYGSFCTQLNRALTGIAVEQDKNTQEVFAQVKQIYKTPPIKDFGGFNFSQILPDPSKPSKRSFIEDLLFNKVTLADAGFIKQYGDCLGDIAARDLICAQKFNGLTVLPPLLTDEMIAQYTSALLAGTITSGWTFGAGAALQIPFAMQMAYRFNGIGVTQNVLYENQKLIANQFNSAIGKIQDSLSSTASALGKLQDVVNQNAQALNTLVKQLSSNFGAISSVLNDILSRLDKVEAEVQIDRLITGRLQSLQTYVTQQLIRAAEIRASANLAATKMSECVLGQSKRVDFCGKGYHLMSFPQSAPHGVVFLHVTYVCAQEKNFTTAPAICHDGKAHFPREGVFVSNGTHWFVTQRNFYEPQIITTDNTFVSGNCDVVIGIVNNTVYDPLQPELDSGGGGSDIIKLLNEQVNKEMQSSNLYMSMSSWCYTHSLDGAGLFLFDHAAEEYEHAKKLIIFLNENNVPVQLTSISAPEHKFEGLTQIFQKAYEHEQHISESINNIVDHAIKSKDHATFNFLQWYVAEQHEEEVLFKDILDKIELIGNENHGLYLADQYVKGIAKSRKS

SEQ ID NO: 9122 - protein, 1315 aa, Artificial Sequence
  SARS-CoV-2/Shenzhen/SZTH-001/2020__EPI_ISL_406592 spike protein (1-1147)(P715C_P1069C) Ferritin construct
MFVFLVLLPLVSSQCVNLTTRTQLPPAYTNSFTRGVYYPDKVFRSSVLHSTQDLFLPFFSNVTWFHAIHVSGTNGTKRFDNPVLPFNDGVYFASTEKSNIIRGWIFGTTLDSKTQSLLIVNNATNVVIKVCEFQFCNDPFLGVYYHKNNKSWMESEFRVYSSANNCTFEYVSQPFLMDLEGKQGNFKNLREFVFKNIDGYFKIYSKHTPINLVRDLPQGFSALEPLVDLPIGINITRFQTLLALHRSYLTPGDSSSGWTAGAAAYYVGYLQPRTFLLKYNENGTITDAVDCALDPLSETKCTLKSFTVEKGIYQTSNFRVQPTESIVRFPNITNLCPFGEVFNATRFASVYAWNRKRISNCVADYSVLYNSASFSTFKCYGVSPTKLNDLCFTNVYADSFVIRGDEVRQIAPGQTGKIADYNYKLPDDFTGCVIAWNSNNLDSKVGGNYNYLYRLFRKSNLKPFERDISTEIYQAGSTPCNGVEGFNCYFPLQSYGFQPTNGVGYQPYRVVVLSFELLHAPATVCGPKKSTNLVKNKCVNFNFNGLTGTGVLTESNKKFLPFQQFGRDIADTTDAVRDPQTLEILDITPCSFGGVSVITPGTNTSNQVAVLYQDVNCTEVPVAIHADQLTPTWRVYSTGSNVFQTRAGCLIGAEHVNNSYECDIPIGAGICASYQTQTNSPRRARSVASQSIIAYTMSLGAENSVAYSNNSIAICTNFTISVTTEILPVSMTKTSVDCTMYICGDSTECSNLLLQYGSFCTQLNRALTGIAVEQDKNTQEVFAQVKQIYKTPPIKDFGGFNFSQILPDPSKPSKRSFIEDLLFNKVTLADAGFIKQYGDCLGDIAARDLICAQKFNGLTVLPPLLTDEMIAQYTSALLAGTITSGWTFGAGAALQIPFAMQMAYRFNGIGVTQNVLYENQKLIANQFNSAIGKIQDSLSSTASALGKLQDVVNQNAQALNTLVKQLSSNFGAISSVLNDILSRLDKVEAEVQIDRLITGRLQSLQTYVTQQLIRAAEIRASANLAATKMSECVLGQSKRVDFCGKGYHLMSFPQSAPHGVVFLHVTYVCAQEKNFTTAPAICHDGKAHFPREGVFVSNGTHWFVTQRNFYEPQIITTDNTFVSGNCDVLIGIVNNTVYDPLQPELDSGGGGSDIIKLLNEQVNKEMQSSNLYMSMSSWCYTHSLDGAGLFLFDHAAEEYEHAKKLIIFLNENNVPVQLTSISAPEHKFEGLTQIFQKAYEHEQHISESINNIVDHAIKSKDHATFNFLQWYVAEQHEEEVLFKDILDKIELIGNENHGLYLADQYVKGIAKSRKS

SEQ ID NO: 9123 - protein, 1315 aa, Artificial Sequence
  SARS-CoV-2/Shenzhen/SZTH-004/2020__EPI_ISL_406595 spike protein (1-1147)(P715C_P1069C) Ferritin construct
MFVFLVLLPLVSSQCVNLTTRTQLPPAYTNSFTRGVYYPDKVFRSSVLHSTQDLFLPFFSNVTWFHAIHVSGTNGTKRFDNPVLPFNDGVYFASTEKSNIIRGWIFGTTLDSKTQSLLIVNNATNVVIKVCEFQFCNDPFLGVYYHKNNKSWMESEFRVYSSANNCTFEYVSQPFLMDLEGKQGNFKNLREFVFKNIDGYFKIYSKHTPINLVRDLPQGFSALEPLVDLPIGINITRFQTLLALHRSYLTPGDSSSGWTAGAAAYYVGYLQPRTFLLKYNENGTITDAVDCALDPLSETKCTLKSFTVEKGIYQTSNFRVQPTESIVRFPNITNLCPFGEVFNATRFASVYAWDRKRISNCVAYYSVLYNSASFSTFKCYGVSPTKLNDLCFTNVYADSFVIRGDEVRQIAPGQTGKIADYNYKLPDDFTGCVIAWNSNNLDSKVGGNYNYLYRLFRKSNLKPFERDISTEIYQAGSTPCNGVEGFNCYFPLQSYGFQPTNGVGYQPYRVVVLSFELLHAPATVCGPKKSTNLVKNKCVNFNFNGLTGTGVLTESNKKFLPFQQFGRDIADTTDAVRDPQTLEILDITPCSFGGVSVITPGTNTSNQVAVLYQDVNCTEVPVAIHADQLTPTWRVYSTGSNVFQTRAGCLIGAEHVNNSYECDIPIGAGICASYQTQTNSPRRARSVASQSIIAYTMSLGAENSVAYSNNSIAICTNFTISVTTEILPVSMTKTSVDCTMYICGDSTECSNLLLQYGSFCTQLNRALTGIAVEQDKNTQEVFAQVKQIYKTPPIKDFGGFNFSQILPDPSKPSKRSFIEDLLFNKVTLADAGFIKQYGDCLGDIAARDLICAQKFNGLTVLPPLLTDEMIAQYTSALLAGTITSGWTFGAGAALQIPFAMQMAYRFNGIGVTQNVLYENQKLIANQFNSAIGKIQDSLSSTASALGKLQDVVNQNAQALNTLVKQLSSNFGAISSVLNDILSRLDKVEAEVQIDRLITGRLQSLQTYVTQQLIRAAEIRASANLAATKMSECVLGQSKRVDFCGKGYHLMSFPQSAPHGVVFLHVTYVCAQEKNFTTAPAICHDGKAHFPREGVFVSNGTHWFVTQRNFYEPQIITTDNTFVSGNCDVVIGIVNNTVYDPLQPELDSGGGGSDIIKLLNEQVNKEMQSSNLYMSMSSWCYTHSLDGAGLFLFDHAAEEYEHAKKLIIFLNENNVPVQLTSISAPEHKFEGLTQIFQKAYEHEQHISESINNIVDHAIKSKDHATFNFLQWYVAEQHEEEVLFKDILDKIELIGNENHGLYLADQYVKGIAKSRKS

SEQ ID NO: 9124 - protein, 1315 aa, Artificial Sequence
  SARS-CoV-2/France/IDF0372/2020__EPI_ISL_406596 spike protein (1-1147)(P715C_P1069C) Ferritin construct
MFVFLVLLPLVSSQCVNLTTRTQLPPAYTNSFTRGVYYPDKVFRSSVLHSTQDLFLPFFSNVTWFHAIHVSGTNGTKRFDNPVLPFNDGVYFASTEKSNIIRGWIFGTTLDSKTQSLLIVNNATNVVIKVCEFQFCNDPFLGVYYHKNNKSWMESEFRVYSSANNCTFEYVSQPFLMDLEGKQGNFKNLREFVFKNIDGYFKIYSKHTPINLVRDLPQGFSALEPLVDLPIGINITRFQTLLALHRSYLTPGDSSSGWTAGAAAYYVGYLQPRTFLLKYNENGTITDAVDCALDPLSETKCTLKSFTVEKGIYQTSNFRVQPTESIVRFPNITNLCPFGEVFNATRFASVYAWNRKRISNCVADYSFLYNSASFSTFKCYGVSPTKLNDLCFTNVYADSFVIRGDEVRQIAPGQTGKIADYNYKLPDDFTGCVIAWNSNNLDSKVGGNYNYLYRLFRKSNLKPFERDISTEIYQAGSTPCNGVEGFNCYFPLQSYGFQPTNGVGYQPYRVVVLSFELLHAPATVCGPKKSTNLVKNKCVNFNFNGLTGTGVLTESNKKFLPFQQFGRDIADTTDAVRDPQTLEILDITPCSFGGVSVITPGTNTSNQVAVLYQDVNCTEVPVAIHADQLTPTWRVYSTGSNVFQTRAGCLIGAEHVNNSYECDIPIGAGICASYQTQTNSPRRARSVASQSIIAYTMSLGAENSVAYSNNSIAICTNFTISVTTEILPVSMTKTSVDCTMYICGDSTECSNLLLQYGSFCTQLNRALTGIAVEQDKNTQEVFAQVKQIYKTPPIKDFGGFNFSQILPDPSKPSKRSFIEDLLFNKVTLADAGFIKQYGDCLGDIAARDLICAQKFNGLTVLPPLLTDEMIAQYTSALLAGTITSGWTFGAGAALQIPFAMQMAYRFNGIGVTQNVLYENQKLIANQFNSAIGKIQDSLSSTASALGKLQDVVNQNAQALNTLVKQLSSNFGAISSVLNDILSRLDKVEAEVQIDRLITGRLQSLQTYVTQQLIRAAEIRASANLAATKMSECVLGQSKRVDFCGKGYHLMSFPQSAPHGVVFLHVTYVCAQEKNFTTAPAICHDGKAHFPREGVFVSNGTHWFVTQRNFYEPQIITTDNTFVSGNCDVVIGIVNNTVYDPLQPELDSGGGGSDIIKLLNEQVNKEMQSSNLYMSMSSWCYTHSLDGAGLFLFDHAAEEYEHAKKLIIFLNENNVPVQLTSISAPEHKFEGLTQIFQKAYEHEQHISESINNIVDHAIKSKDHATFNFLQWYVAEQHEEEVLFKDILDKIELIGNENHGLYLADQYVKGIAKSRKS

SEQ ID NO: 9125 - protein, 1315 aa, Artificial Sequence
  SARS-CoV-2/Australia/VIC01/2020__EPI_ISL_406844 spike protein (1-1147)(P715C_P1069C) Ferritin construct
MFVFLVLLPLVSSQCVNLTTRTQLPPAYTNSFTRGVYYPDKVFRSSVLHSTQDLFLPFFSNVTWFHAIHVSGTNGTKRFDNPVLPFNDGVYFASTEKSNIIRGWIFGTTLDSKTQSLLIVNNATNVVIKVCEFQFCNDPFLGVYYHKNNKSWMESEFRVYSSANNCTFEYVSQPFLMDLEGKQGNFKNLREFVFKNIDGYFKIYSKHTPINLVRDLPQGFSALEPLVDLPIGINITRFQTLLALHRRYLTPGDSSSGWTAGAAAYYVGYLQPRTFLLKYNENGTITDAVDCALDPLSETKCTLKSFTVEKGIYQTSNFRVQPTESIVRFPNITNLCPFGEVFNATRFASVYAWNRKRISNCVADYSVLYNSASFSTFKCYGVSPTKLNDLCFTNVYADSFVIRGDEVRQIAPGQTGKIADYNYKLPDDFTGCVIAWNSNNLDSKVGGNYNYLYRLFRKSNLKPFERDISTEIYQAGSTPCNGVEGFNCYFPLQSYGFQPTNGVGYQPYRVVVLSFELLHAPATVCGPKKSTNLVKNKCVNFNFNGLTGTGVLTESNKKFLPFQQFGRDIADTTDAVRDPQTLEILDITPCSFGGVSVITPGTNTSNQVAVLYQDVNCTEVPVAIHADQLTPTWRVYSTGSNVFQTRAGCLIGAEHVNNSYECDIPIGAGICASYQTQTNSPRRARSVASQSIIAYTMSLGAENSVAYSNNSIAICTNFTISVTTEILPVSMTKTSVDCTMYICGDSTECSNLLLQYGSFCTQLNRALTGIAVEQDKNTQEVFAQVKQIYKTPPIKDFGGFNFSQILPDPSKPSKRSFIEDLLFNKVTLADAGFIKQYGDCLGDIAARDLICAQKFNGLTVLPPLLTDEMIAQYTSALLAGTITSGWTFGAGAALQIPFAMQMAYRFNGIGVTQNVLYENQKLIANQFNSAIGKIQDSLSSTASALGKLQDVVNQNAQALNTLVKQLSSNFGAISSVLNDILSRLDKVEAEVQIDRLITGRLQSLQTYVTQQLIRAAEIRASANLAATKMSECVLGQSKRVDFCGKGYHLMSFPQSAPHGVVFLHVTYVCAQEKNFTTAPAICHDGKAHFPREGVFVSNGTHWFVTQRNFYEPQIITTDNTFVSGNCDVVIGIVNNTVYDPLQPELDSGGGGSDIIKLLNEQVNKEMQSSNLYMSMSSWCYTHSLDGAGLFLFDHAAEEYEHAKKLIIFLNENNVPVQLTSISAPEHKFEGLTQIFQKAYEHEQHISESINNIVDHAIKSKDHATFNFLQWYVAEQHEEEVLFKDILDKIELIGNENHGLYLADQYVKGIAKSRKS

SEQ ID NO: 9126 - protein, 1315 aa, Artificial Sequence
  SARS-CoV-2/Germany/BavPat1/2020__EPI_ISL_406862 spike protein (1-1147)(P715C_P1069C) Ferritin construct
MFVFLVLLPLVSSQCVNLTTRTQLPPAYTNSFTRGVYYPDKVFRSSVLHSTQDLFLPFFSNVTWFHAIHVSGTNGTKRFDNPVLPFNDGVYFASTEKSNIIRGWIFGTTLDSKTQSLLIVNNATNVVIKVCEFQFCNDPFLGVYYHKNNKSWMESEFRVYSSANNCTFEYVSQPFLMDLEGKQGNFKNLREFVFKNIDGYFKIYSKHTPINLVRDLPQGFSALEPLVDLPIGINITRFQTLLALHRSYLTPGDSSSGWTAGAAAYYVGYLQPRTFLLKYNENGTITDAVDCALDPLSETKCTLKSFTVEKGIYQTSNFRVQPTESIVRFPNITNLCPFGEVFNATRFASVYAWNRKRISNCVADYSVLYNSASFSTFKCYGVSPTKLNDLCFTNVYADSFVIRGDEVRQIAPGQTGKIADYNYKLPDDFTGCVIAWNSNNLDSKVGGNYNYLYRLFRKSNLKPFERDISTEIYQAGSTPCNGVEGFNCYFPLQSYGFQPTNGVGYQPYRVVVLSFELLHAPATVCGPKKSTNLVKNKCVNFNFNGLTGTGVLTESNKKFLPFQQFGRDIADTTDAVRDPQTLEILDITPCSFGGVSVITPGTNTSNQVAVLYQGVNCTEVPVAIHADQLTPTWRVYSTGSNVFQTRAGCLIGAEHVNNSYECDIPIGAGICASYQTQTNSPRRARSVASQSIIAYTMSLGAENSVAYSNNSIAICTNFTISVTTEILPVSMTKTSVDCTMYICGDSTECSNLLLQYGSFCTQLNRALTGIAVEQDKNTQEVFAQVKQIYKTPPIKDFGGFNFSQILPDPSKPSKRSFIEDLLFNKVTLADAGFIKQYGDCLGDIAARDLICAQKFNGLTVLPPLLTDEMIAQYTSALLAGTITSGWTFGAGAALQIPFAMQMAYRFNGIGVTQNVLYENQKLIANQFNSAIGKIQDSLSSTASALGKLQDVVNQNAQALNTLVKQLSSNFGAISSVLNDILSRLDKVEAEVQIDRLITGRLQSLQTYVTQQLIRAAEIRASANLAATKMSECVLGQSKRVDFCGKGYHLMSFPQSAPHGVVFLHVTYVCAQEKNFTTAPAICHDGKAHFPREGVFVSNGTHWFVTQRNFYEPQIITTDNTFVSGNCDVVIGIVNNTVYDPLQPELDSGGGGSDIIKLLNEQVNKEMQSSNLYMSMSSWCYTHSLDGAGLFLFDHAAEEYEHAKKLIIFLNENNVPVQLTSISAPEHKFEGLTQIFQKAYEHEQHISESINNIVDHAIKSKDHATFNFLQWYVAEQHEEEVLFKDILDKIELIGNENHGLYLADQYVKGIAKSRKS

SEQ ID NO: 9127 - protein, 1315 aa, Artificial Sequence
  SARS-CoV-2/Wuhan/HBCDC-HB-02/2020__EPI_ISL_412978 spike protein (1-1147)(P715C_P1069C) Ferritin construct
MFVFLVLLPLVSSQCVNLTTRTQLPPAYTNSFTRGVYYPDKVFRSSVLHSTQDLFLPFFSNVTWFHAIHVSGTNGTKRFDNPVLPFNDGVYFASTEKSNIIRGWIFGTTLDSKTQSLLIVNNATNVVIKVCEFQFCNDPFLGVYYHKNNKSWMESEFRVYSSANNCTFEYVSQPFLMDLEGKQGNFKNLREFVFKNIDGYFKIYSKHTPINLVRDLPQGFSALEPLVDLPIGINITRFQTLLALHRSYLTPGDSSSGWTAGAAAYYVGYLQPRTFLLKYNENGTITDAVDCALDPLSETKCTLKSFTVEKGIYQTSNFRVQPTESIVRFPNITNLCPFGEVFNATRFASVYAWNRKRISNCVADYSVLYNSASFSTFKCYGVSPTKLNDLCFTNVYADSFVIRGDEVRQIAPGQTGKIADYNYKLPDDFTGCVIAWNSNNLDSKVGGNYNYLYRLFRKSNLKPFERDISTEIYQAGSTPCNGVEGFNCYFPLQSYGFQPTNGVGYQPYRVVVLSFELLHAPATVCGPKKSTNLVKNKCVNFNFNGLTGTGVLTESNKKFLPFQQFGRDIADTTDAVRDPQTLEILDITPCSFGGVSVITPGTNTSNQVAVLYQDVNCTEVPVAIHADQLTPTWRVYSTGSNVFQTRAGCLIGAEHVNNSYECDIPIGAGICASYQTQTNSPRRARSVASQSIIAYTMSLGAENSVAYSNNSIAICTNFTISVTTEILPVSMTKTSVDCTMYICGDSTECSNFLLQYGSFCTQLNRALTGIAVEQDKNTQEVFAQVKQIYKTPPIKDFGGFNFSQILPDPSKPSKRSFIEDLLFNKVTLADAGFIKQYGDCLGDIAARDLICAQKFNGLTVLPPLLTDEMIAQYTSALLAGTITSGWTFGAGAALQIPFAMQMAYRFNGIGVTQNVLYENQKLIANQFNSAIGKIQDSLSSTASALGKLQDVVNQNAQALNTLVKQLSSNFGAISSVLNDILSRLDKVEAEVQIDRLITGRLQSLQTYVTQQLIRAAEIRASANLAATKMSECVLGQSKRVDFCGKGYHLMSFPQSAPHGVVFLHVTYVCAQEKNFTTAPAICHDGKAHFPREGVFVSNGTHWFVTQRNFYEPQIITTDNTFVSGNCDVVIGIVNNTVYDPLQPELDSGGGGSDIIKLLNEQVNKEMQSSNLYMSMSSWCYTHSLDGAGLFLFDHAAEEYEHAKKLIIFLNENNVPVQLTSISAPEHKFEGLTQIFQKAYEHEQHISESINNIVDHAIKSKDHATFNFLQWYVAEQHEEEVLFKDILDKIELIGNENHGLYLADQYVKGIAKSRKS

SEQ ID NO: 9128 - protein, 1315 aa, Artificial Sequence
  SARS-CoV-2/Australia/QLD02/2020__EPI_ISL_407896 spike protein (1-1147)(P715C_P1069C) Ferritin construct
MFVFLVLLPLVSSQCVNLTTRTQLPPAYTNSFTRGVYYPDKVFRSSVLHSTQDLFLPFFSNVTWFHAIHVSGTNGTKRFDNPVLPFNDGVYFASTEKSNIIRGWIFGTTLDSKTQSLLIVNNATNVVIKVCEFQFCNDPFLGVYYHKNNKSWMESEFRVYSSANNCTFEYVSQPFLMDLEGKQGNFKNLREFVFKNIDGYFKIYSKHTPINLVRDLPQGFSALEPLVDLPIGINITRFQTLLALHRSYLTPGDSSSGWTAGAAAYYVGYLQPRTFLLKYNENGTITDAVDCALDPLSETKCTLKSFTVEKGIYQTSNFRVQPTESIVRFPNITNLCPFGEVFNATRFASVYAWNRKRISNCVADYSVLYNSASFSTFKCYGVSPTKLNDLCFTNVYADSFVIRGDEVRQIAPGQTGKIADYNYKLPDDFTGCVIAWNSNNLDSKVGGNYNYLYRLFRKSNLKPFERDISTEIYQAGSTPCNGVEGFNCYFPLQSYGFQPTNGVGYQPYRVVVLSFELLHAPATVCGPKKSTNLVKNKCVNFNFNGLTGTGVLTESNKKFLPFQQFGRDIADTTDAVRDPQTLEILDITPCSFGGVSVITPGTNTSNQVAVLYQDVNCTEVPVAIHADQLTPTWRVYSTGSNVFQTRAGCLIGAEHVNNSYECDIPIGAGICASYQTQTNSPRRARSVASQSIIAYTMSLGAENSVAYSNNSIAICTNFTISVTTEILPVSMTKTSVDCTMYICGDSTECSNLLLQYGSFCTQLNRALTGIAVEQDKNTQEVFAQVKQIYKTPPIKDFGGFNFSQILPDPSKPSKRSFIEDLLFNKVTLADAGFIKQYGDCLGDIAARDLICAQKFNGLTVLPPLLTDEMIAQYTSALLAGTITSGWTFGAGAALQIPFAMQMAYRFNGIGVTQNVLYENQKLIANQFNSAIGKIQDSLSSTASALGKLQDVVNQNAQALNTLVKQLSSNFGAISSVLNDILSRLDKVEAEVQIDRLITGRLQSLQTYVTQQLIRAAEIRASANLAATKMSECVLGQSKRVDFCGKGYHLMSFPQSAPHGVVFLHVTYVCAQEKNFTTAPAICHDGKAHFPREGVFVSNGTHWFVTQRNFYEPQIITTDNTFVSGNCDVVIGIVNNTVYDPLQLELDSGGGGSDIIKLLNEQVNKEMQSSNLYMSMSSWCYTHSLDGAGLFLFDHAAEEYEHAKKLIIFLNENNVPVQLTSISAPEHKFEGLTQIFQKAYEHEQHISESINNIVDHAIKSKDHATFNFLQWYVAEQHEEEVLFKDILDKIELIGNENHGLYLADQYVKGIAKSRKS

SEQ ID NO: 9129 - protein, 1315 aa, Artificial Sequence
  SARS-CoV-2/India/1-31/2020__EPI_ISL_413523 spike protein (1-1147)(P715C_P1069C) Ferritin construct
MFVFLVLLPLVSSQCVNLTTRTQLPPAYTNSFTRGVYYPDKVFRSSVLHSTQDLFLPFFSNVTWFHAIHVSGTNGTKRFDNPVLPFNDGVYFASTEKSNIIRGWIFGTTLDSKTQSLLIVNNATNVVIKVCEFQFCNDPFLGVYYHKNNKSWMESEFRVYSSANNCTFEYVSQPFLMDLEGKQGNFKNLREFVFKNIDGYFKIYSKHTPINLVRDLPQGFSALEPLVDLPIGINITRFQTLLALHRSYLTPGDSSSGWTAGAAAYYVGYLQPRTFLLKYNENGTITDAVDCALDPLSETKCTLKSFTVEKGIYQTSNFRVQPTESIVRFPNITNLCPFGEVFNATRFASVYAWNRKRISNCVADYSVLYNSASFSTFKCYGVSPTKLNDLCFTNVYADSFVIRGDEVRQIAPGQTGKIADYNYKLPDDFTGCVIAWNSNNLDSKVGGNYNYLYRLFRKSNLKPFERDISTEIYQAGSTPCNGVEGFNCYFPLQSYGFQPTNGVGYQPYRVVVLSFELLHAPATVCGPKKSTNLVKNKCVNFNFNGLTGTGVLTESNKKFLPFQQFGRDIADTTDAVRDPQTLEILDITPCSFGGVSVITPGTNTSNQVAVLYQDVNCTEVPVAIHADQLTPTWRVYSTGSNVFQTRAGCLIGAEHVNNSYECDIPIGAGICASYQTQTNSPRRARSVASQSIIAYTMSLGAENSVAYSNNSIAICTNFTISVTTEILPVSMTKTSVDCTMYICGDSTECSNLLLQYGSFCTQLNRALTGIAVEQDKNTQEVFAQVKQIYKTPPIKDFGGFNFSQILPDPSKPSKRSFIEDLLFNKVTLADAGFIKQYGDCLGDIAARDLICAQKFNGLTVLPPLLTDEMIAQYTSALLAGTITSGWTFGAGAALQIPFAMQMAYRFNGIGVTQNVLYENQKLIANQFNSVIGKIQDSLSSTASALGKLQDVVNQNAQALNTLVKQLSSNFGAISSVLNDILSRLDKVEAEVQIDRLITGRLQSLQTYVTQQLIRAAEIRASANLAATKMSECVLGQSKRVDFCGKGYHLMSFPQSAPHGVVFLHVTYVCAQEKNFTTAPAICHDGKAHFPREGVFVSNGTHWFVTQRNFYEPQIITTDNTFVSGNCDVVIGIVNNTVYDPLQPELDSGGGGSDIIKLLNEQVNKEMQSSNLYMSMSSWCYTHSLDGAGLFLFDHAAEEYEHAKKLIIFLNENNVPVQLTSISAPEHKFEGLTQIFQKAYEHEQHISESINNIVDHAIKSKDHATFNFLQWYVAEQHEEEVLFKDILDKIELIGNENHGLYLADQYVKGIAKSRKS

SEQ ID NO: 9130 - protein, 1315 aa, Artificial Sequence
  SARS-CoV-2/Guangdong/GD2020087-P0008/2020__EPI_ISL_413863 spike protein (1-1147)(P715C_P1069C) Ferritin construct
MFVFLVLLPLVSSQCVNLTTRTQLPPAYTNSFTRGVYYPDKVFRSSVLHSTQDLFLPFFSNVTWFHAIHVSGTNGTKRFDNPVLPFNDGVYFASTEKSNIIRGWIFGTTLDSKTQSLLIVNNATNVVIKVCEFQFCNDPFLGVYYHKNNKSWMESEFRVYSSANNCTFEYVSQPFLMDLEGKQGNFKNLREFVFKNIDGYFKIYSKHTPINLVRDLPQGFSALEPLVDLPIGINITRFQTLLALHRSYLTPGDSSSGWTAGAAAYYVGYLQPRTFLLKYNENGTITDAVDCALDPLSETKCTLKSFTVEKGIYQTSNFRVQPTESIVRFPNITNLCPFGEVFNATRFASVYAWNRKRISNCVADYSVLYNSASFSTFKCYGVSPTKLNDLCFTNVYADSFVIRGDEVREIAPGQTGKIADYNYKLPDDFTGCVIAWNSNNLDSKVGGNYNYLYRLFRKSNLKPFERDISTEIYQAGSTPCNGVEGFNCYFPLQSYGFQPTNGVGYQPYRVVVLSFELLHAPATVCGPKKSTNLVKNKCVNFNFNGLTGTGVLTESNKKFLPFQQFGRDIADTTDAVRDPQTLEILDITPCSFGGVSVITPGTNTSNQVAVLYQDVNCTEVPVAIHADQLTPTWRVYSTGSNVFQTRAGCLIGAEHVNNSYECDIPIGAGICASYQTQTNSPRRARSVASQSIIAYTMSLGAENSVAYSNNSIAICTNFTISVTTEILPVSMTKTSVDCTMYICGDSTECSNLLLQYGSFCTQLNRALTGIAVEQDKNTQEVFAQVKQIYKTPPIKDFGGFNFSQILPDPSKPSKRSFIEDLLFNKVTLADAGFIKQYGDCLGDIAARDLICAQKFNGLTVLPPLLTDEMIAQYTSALLAGTITSGWTFGAGAALQIPFAMQMAYRFNGIGVTQNVLYENQKLIANQFNSAIGKIQDSLSSTASALGKLQDVVNQNAQALNTLVKQLSSNFGAISSVLNDILSRLDKVEAEVQIDRLITGRLQSLQTYVTQQLIRAAEIRASANLAATKMSECVLGQSKRVDFCGKGYHLMSFPQSAPHGVVFLHVTYVCAQEKNFTTAPAICHDGKAHFPREGVFVSNGTHWFVTQRNFYEPQIITTDNTFVSGNCDVVIGIVNNTVYDPLQPELDSGGGGSDIIKLLNEQVNKEMQSSNLYMSMSSWCYTHSLDGAGLFLFDHAAEEYEHAKKLIIFLNENNVPVQLTSISAPEHKFEGLTQIFQKAYEHEQHISESINNIVDHAIKSKDHATFNFLQWYVAEQHEEEVLFKDILDKIELIGNENHGLYLADQYVKGIAKSRKS

SEQ ID NO: 9131 - protein, 1315 aa, Artificial Sequence
  SARS-CoV-2/Sweden/01/2020__EPI_ISL_411951 spike protein (1-1147)(P715C_P1069C) Ferritin construct
MFVFLVLLPLVSSQCVNLTTRTQLPPAYTNSFTRGVYYPDKVFRSSVLHSTQDLFLPFFSNVTWFHAIHVSGTNGTKRFDNPVLPFNDGVYFASTEKSNIIRGWIFGTTLDSKTQSLLIVNNATNVVIKVCEFQFCNDPFLGVYYHKNNKSWMESEFRVYSSANNCTFEYVSQPFLMDLEGKQGNFKNLREFVFKNIDGYFKIYSKHTPINLVRDLPQGFSALEPLVDLPIGINITRFQTLLALHRSYLTPGDSSSGWTAGAAAYYVGYLQPRTFLLKYNENGTITDAVDCALDPLSETKCTLKSFTVEKGIYQTSNFRVQPTESIVRFPNITNLCPFGEVFNATRFASVYAWNRKRISNCVADYSVLYNSASFSTFKCYGVSPTKLNDLCFTNVYADSFVIRGDEVRQIAPGQTGKIADYNYKLPDDFTGCVIAWNSNNLDSKVGGNYNYLYRLFRKSNLKPFERDISTEIYQAGSTPCNGVEGFNCYFPLQSYGFQPTNGVGYQPYRVVVLSFELLHAPATVCGPKKSTNLVKNKCVNFNFNGLTGTGVLTESNKKFLPFQQFGRDIADTTDAVRDPQTLEILDITPCSFGGVSVITPGTNTSNQVAVLYQDVNCTEVPVAIHADQLTPTWRVYSTGSNVFQTRAGCLIGAEHVNNSYECDIPIGAGICASYQTQTNSPRRARSVASQSIIAYTMSLGAENSVAYSNNSIAICTNFTISVTTEILPVSMTKTSVDCTMYICGDSTECSNLLLQYGSFCTQLNRALTGIAVEQDKNTQEVFAQVKQIYKTPPIKDCGGFNFSQILPDPSKPSKRSFIEDLLFNKVTLADAGFIKQYGDCLGDIAARDLICAQKFNGLTVLPPLLTDEMIAQYTSALLAGTITSGWTFGAGAALQIPFAMQMAYRFNGIGVTQNVLYENQKLIANQFNSAIGKIQDSLSSTASALGKLQDVVNQNAQALNTLVKQLSSNFGAISSVLNDILSRLDKVEAEVQIDRLITGRLQSLQTYVTQQLIRAAEIRASANLAATKMSECVLGQSKRVDFCGKGYHLMSFPQSAPHGVVFLHVTYVCAQEKNFTTAPAICHDGKAHFPREGVFVSNGTHWFVTQRNFYEPQIITTDNTFVSGNCDVVIGIVNNTVYDPLQPELDSGGGGSDIIKLLNEQVNKEMQSSNLYMSMSSWCYTHSLDGAGLFLFDHAAEEYEHAKKLIIFLNENNVPVQLTSISAPEHKFEGLTQIFQKAYEHEQHISESINNIVDHAIKSKDHATFNFLQWYVAEQHEEEVLFKDILDKIELIGNENHGLYLADQYVKGIAKSRKS

SEQ ID NO: 9132 - protein, 1315 aa, Artificial Sequence
  SARS-CoV-2/Tianmen/HBCDC-HB-07/2020__EPI_ISL_412983 spike protein (1-1147)(P715C_P1069C) Ferritin construct
MFVFLVLLPLVSSQCVNLTTRTQLPPAYTNSFTRGVYYPDKVFRSSVLHSTQDLFLPFFSNVTWFHAIHVSGTNGTKRFDNPVLPFNDGVYFASTEKSNIIRGWIFGTTLDSKTQSLLIVNNATNVVIKVCEFQFCNDPFLGVYYHKNNKSWMESEFRVYSSANNCTFEYVSQPFLMDLEGKQGNFKNLREFVFKNIDGYFKIYSKHTPINLVRDLPQGFSALEPLVDLPIGINITRFQTLLALHRSYLTPGDSSSGWTAGAAAYYVGYLQPRTFLLKYNENGTITDAVDCALDPLSETKCTLKSFTVEKGIYQTSNFRVQPTESIVRFPNITNLCPFGEVFNATRFASVYAWNRKRISNCVADYSVLYNSASFSTFKCYGVSPTKLNDLCFTNVYADSFVIRGDEVRQIAPGQTGKIADYNYKLPDDFTGCVIAWNSNNLDSKVGGNYNYLYRLFRKSNLKPFERDISTEIYQAGSTPCNGVEGFNCYFPLQSYGFQPTNGVGYQPYRVVVLSFELLHAPATVCGPKKSTNLVKNKCVNFNFNGLTGTGVLTESNKKFLPFQQFGRDIADTTDAVRDPQTLEILDITPCSFGGVSVITPGTNTSNQVAVLYQDLNCTEVPVAIHADQLTPTWRVYSTGSNVFQTRAGCLIGAEHVNNSYECDIPIGAGICASYQTQTNSPRRARSVASQSIIAYTMSLGAENSVAYSNNSIAICTNFTISVTTEILPVSMTKTSVDCTMYICGDSTECSNLLLQYGSFCTQLNRALTGIAVEQDKNTQEVFAQVKQIYKTPPIKDFGGFNFSQILPDPSKPSKRSFIEDLLFNKVTLADAGFIKQYGDCLGDIAARDLICAQKFNGLTVLPPLLTDEMIAQYTSALLAGTITSGWTFGAGAALQIPFAMQMAYRFNGIGVTQNVLYENQKLIANQFNSAIGKIQDSLSSTASALGKLQDVVNQNAQALNTLVKQLSSNFGAISSVLNDILSRLDKVEAEVQIDRLITGRLQSLQTYVTQQLIRAAEIRASANLAATKMSECVLGQSKRVDFCGKGYHLMSFPQSAPHGVVFLHVTYVCAQEKNFTTAPAICHDGKAHFPREGVFVSNGTHWFVTQRNFYEPQIITTDNTFVSGNCDVVIGIVNNTVYDPLQPELDSGGGGSDIIKLLNEQVNKEMQSSNLYMSMSSWCYTHSLDGAGLFLFDHAAEEYEHAKKLIIFLNENNVPVQLTSISAPEHKFEGLTQIFQKAYEHEQHISESINNIVDHAIKSKDHATFNFLQWYVAEQHEEEVLFKDILDKIELIGNENHGLYLADQYVKGIAKSRKS

SEQ ID NO: 9133 - protein, 1315 aa, Artificial Sequence
  SARS-CoV-2/Hong Kong/case42_VM20002493/2020__EPI_ISL_414527 spike protein (1-1147)(P715C_P1069C) Ferritin construct
MFVFLVLLPLVSSQCVNLTTRTQLPPAYTNSFTRGVYYPDKVFRSSVLHSTQDLFLPFFSNVTWFHAIHVSGTNGTKRFDNPVLPFNDGVYFASTEKSNIIRGWIFGTTLDSKTQSLLIVNNATNVVIKVCEFQFCNDPFLGVYYHKNNKSWMESEFRVYSSANNCTFEYVSQPFLMDLEGKQGNFKNLREFVFKNIDGYFKIYSKHTPINLVRDLPQGFSALEPLVDLPIGINITRFQTLLALHRSYLTPGDSSSGWTAGAAAYYVGYLQPRTFLLKYNENGTITDAVDCALDPLSETKCTLKSFTVEKGIYQTSNFRVQPTESIVRFPNITNLCPFGEVFNATRFASVYAWNRKRISNCVADYSVLYNSASFSTFKCYGVSPTKLNDLCFTNVYADSFVIRGDEVRQIAPGQTGKIADYNYKLPDDFTGCVIAWNSNNLDSKVGGNYNYLYRLFRKSNLKPFERDISTEIYQAGSTPCNGVEGFNCYFPLQSYGFQPTNGVGYQPYRVVVLSFELLHAPATVCGPKKSTNLVKNKCVNFNFNGLTGTGVLTESNKKFLPFQQFGRDIADTTDAVRDPQTLEILDITPCSFGGVSVITPGTNTSNQVAVLYQDVNCTEVPVAIHADQLTPTWRVYSTGSNVFQTRAGCLIGAEHVNNSYECDIPIGAGICASYQTQTNSPRRARSVASQSIIAYTMSLGAENSVAYSNNSIAICTNFAISVTTEILPVSMTKTSVDCTMYICGDSTECSNLLLQYGSFCTQLNRALTGIAVEQDKNTQEVFAQVKQIYKTPPIKDFGGFNFSQILPDPSKPSKRSFIEDLLFNKVTLADAGFIKQYGDCLGDIAARDLICAQKFNGLTVLPPLLTDEMIAQYTSALLAGTITSGWTFGAGAALQIPFAMQMAYRFNGIGVTQNVLYENQKLIANQFNSAIGKIQDSLSSTASALGKLQDVVNQNAQALNTLVKQLSSNFGAISSVLNDILSRLDKVEAEVQIDRLITGRLQSLQTYVTQQLIRAAEIRASANLAATKMSECVLGQSKRVDFCGKGYHLMSFPQSAPHGVVFLHVTYVCAQEKNFTTAPAICHDGKAHFPREGVFVSNGTHWFVTQRNFYEPQIITTDNTFVSGNCDVVIGIVNNTVYDPLQPELDSGGGGSDIIKLLNEQVNKEMQSSNLYMSMSSWCYTHSLDGAGLFLFDHAAEEYEHAKKLIIFLNENNVPVQLTSISAPEHKFEGLTQIFQKAYEHEQHISESINNIVDHAIKSKDHATFNFLQWYVAEQHEEEVLFKDILDKIELIGNENHGLYLADQYVKGIAKSRKS

SEQ ID NO: 9134 - protein, 1315 aa, Artificial Sequence
  SARS-CoV-2/USA/CruiseA-23/2020__EPI_ISL_414482 spike protein (1-1147)(P715C_P1069C) Ferritin construct
MFVFLVLLPLVSSQCVNLTTRTQLPPAYTNSFTRGVYYPDKVFRSSVLHSTQDLFLPFFSNVTWFHAIHVSGTNGTKRFDNPVLPFNDGVYFASTEKSNIIRGWIFGTTLDSKTQSLLIVNNATNVVIKVCEFQFCNDPFLGVYYHKNNKSWMESEFRVYSSANNCTFEYVSQPFLMDLEVKQGNFKNLREFVFKNIDGYFKIYSKHTPINLVRDLPQGFSALEPLVDLPIGINITRFQTLLALHRSYLTPGDSSSGWTAGAAAYYVGYLQPRTFLLKYNENGTITDAVDCALDPLSETKCTLKSFTVEKGIYQTSNFRVQPTESIVRFPNITNLCPFGEVFNATRFASVYAWNRKRISNCVADYSVLYNSASFSTFKCYGVSPTKLNDLCFTNVYADSFVIRGDEVRQIAPGQTGKIADYNYKLPDDFTGCVIAWNSNNLDSKVGGNYNYLYRLFRKSNLKPFERDISTEIYQAGSTPCNGVEGFNCYFPLQSYGFQPTNGVGYQPYRVVVLSFELLHAPATVCGPKKSTNLVKNKCVNFNFNGLTGTGVLTESNKKFLPFQQFGRDIADTTDAVRDPQTLEILDITPCSFGGVSVITPGTNTSNQVAVLYQDVNCTEVPVAIHADQLTPTWRVYSTGSNVFQTRAGCLIGAEHVNNSYECDIPIGAGICASYQTQTNSPRRARSVASQSIIAYTMSLGAENSVAYSNNSIAICTNFTISVTTEILPVSMTKTSVDCTMYICGDSTECSNLLLQYGSFCTQLNRALTGIAVEQDKNTQEVFAQVKQIYKTPPIKDFGGFNFSQILPDPSKPSKRSFIEDLLFNKVTLADAGFIKQYGDCLGDIAARDLICAQKFNGLTVLPPLLTDEMIAQYTSALLAGTITSGWTFGAGAALQIPFAMQMAYRFNGIGVTQNVLYENQKLIANQFNSAIGKIQDSLSSTASALGKLQDVVNQNAQALNTLVKQLSSNFGAISSVLNDILSRLDKVEAEVQIDRLITGRLQSLQTYVTQQLIRAAEIRASANLAATKMSECVLGQSKRVDFCGKGYHLMSFPQSAPHGVVFLHVTYVCAQEKNFTTAPAICHDGKAHFPREGVFVSNGTHWFVTQRNFYEPQIITTDNTFVSGNCDVVIGIVNNTVYDPLQPELDSGGGGSDIIKLLNEQVNKEMQSSNLYMSMSSWCYTHSLDGAGLFLFDHAAEEYEHAKKLIIFLNENNVPVQLTSISAPEHKFEGLTQIFQKAYEHEQHISESINNIVDHAIKSKDHATFNFLQWYVAEQHEEEVLFKDILDKIELIGNENHGLYLADQYVKGIAKSRKS

SEQ ID NO: 9135 - protein, 1315 aa, Artificial Sequence
  SARS-CoV-2/Hong Kong/case85_VM20002868/2020__EPI_ISL_414519 spike protein (1-1147)(P715C_P1069C) Ferritin construct
MFVFLVLVPLVSSQCVNLTTRTQLPPAYTNSFTRGVYYPDKVFRSSVLHSTQDLFLPFFSNVTWFHAIHVSGTNGTKRFDNPVLPFNDGVYFASTEKSNIIRGWIFGTTLDSKTQSLLIVNNATNVVIKVCEFQFCNDPFLGVYYHKNNKSWMESEFRVYSSANNCTFEYVSQPFLMDLEGKQGNFKNLREFVFKNIDGYFKIYSKHTPINLVRDLPQGFSALEPLVDLPIGINITRFQTLLALHRSYLTPGDSSSGWTAGAAAYYVGYLQPRTFLLKYNENGTITDAVDCALDPLSETKCTLKSFTVEKGIYQTSNFRVQPTESIVRFPNITNLCPFGEVFNATRFASVYAWNRKRISNCVADYSVLYNSASFSTFKCYGVSPTKLNDLCFTNVYADSFVIRGDEVRQIAPGQTGKIADYNYKLPDDFTGCVIAWNSNNLDSKVGGNYNYLYRLFRKSNLKPFERDISTEIYQAGSTPCNGVEGFNCYFPLQSYGFQPTNGVGYQPYRVVVLSFELLHAPATVCGPKKSTNLVKNKCVNFNFNGLTGTGVLTESNKKFLPFQQFGRDIADTTDAVRDPQTLEILDITPCSFGGVSVITPGTNTSNQVAVLYQDVNCTEVPVAIHADQLTPTWRVYSTGSNVFQTRAGCLIGAEHVNNSYECDIPIGAGICASYQTQTNSPRRARSVASQSIIAYTMSLGAENSVAYSNNSIAICTNFTISVTTEILPVSMTKTSVDCTMYICGDSTECSNLLLQYGSFCTQLNRALTGIAVEQDKNTQEVFAQVKQIYKTPPIKDFGGFNFSQILPDPSKPSKRSFIEDLLFNKVTLADAGFIKQYGDCLGDIAARDLICAQKFNGLTVLPPLLTDEMIAQYTSALLAGTITSGWTFGAGAALQIPFAMQMAYRFNGIGVTQNVLYENQKLIANQFNSAIGKIQDSLSSTASALGKLQDVVNQNAQALNTLVKQLSSNFGAISSVLNDILSRLDKVEAEVQIDRLITGRLQSLQTYVTQQLIRAAEIRASANLAATKMSECVLGQSKRVDFCGKGYHLMSFPQSAPHGVVFLHVTYVCAQEKNFTTAPAICHDGKAHFPREGVFVSNGTHWFVTQRNFYEPQIITTDNTFVSGNCDVVIGIVNNTVYDPLQPELDSGGGGSDIIKLLNEQVNKEMQSSNLYMSMSSWCYTHSLDGAGLFLFDHAAEEYEHAKKLIIFLNENNVPVQLTSISAPEHKFEGLTQIFQKAYEHEQHISESINNIVDHAIKSKDHATFNFLQWYVAEQHEEEVLFKDILDKIELIGNENHGLYLADQYVKGIAKSRKS

SEQ ID NO: 9136 - protein, 1315 aa, Artificial Sequence; identical to SEQ ID NO: 9126
  SARS-CoV-2/England/200990660/2020__EPI_ISL_414523 spike protein (1-1147)(P715C_P1069C) Ferritin construct

SEQ ID NO: 9137 - protein, 1315 aa, Artificial Sequence
  SARS-CoV-2/Australia/NSW09/2020__EPI_ISL_413595 spike protein (1-1147)(P715C_P1069C) Ferritin construct
MFVFLVLLPLVSSQCVNLTTRTQLPPAYTNSFTRGVYYPDKVFRSSVLHSTQDLFLPFFSNVTWFHAIHVSGTNGTKRFDNPVLPFNDGVYFASTEKSNIIRGWIFGTTLDSKTQSLLIVNNATNVVIKVCEFQFCNDPFLGVYYHKNNKSWMESEFRVYSSANNCTFEYVSQPFLMDLEGKQGNFKNLREFVFKNIDGYFKIYSKHTPINLVRDLPQGFSALEPLVDLPIGINITRFQTLLALHRSYLTPGDSSSGWTAGAAAYYVGYLQPRTFLLKYNENGTITDAVDCALDPLSETKCTLKSFTVEKGIYQTSNFRVQPTESIVRFPNITNLCPFGEVFNATRFASVYAWNRKRISNCVADYSVLYNSASFSTFKCYGVSPTKLNDLCFTNVYADSFVIRGDEVRQIAPGQTGKIADYNYKLPDDFTGCVIAWNSNNLDSKVGGNYNYLYRLFRKSNLKPFERDISTEIYQAGSTPCNGVEGFNCYFPLQSYGFQPTNGVGYQPYRVVVLSFELLHAPATVCGPKKSTNLVKNKCVNFNFNGLTGTGVLTESNKKFLPFQQFGRDIADTTDAVRDPQTLEILDITPCSFGGVSVITPGTNTSNQVAVLYQDVNCTEVPVAIHADQLTPTWRVYSTGSNVFQTRAGCLIGAEHVNNSYECDIPIGAGICASYQTQTNSPRRARSVASQSIIAYTMSLGAENSVAYSNNSIAICTNFTISVTTEILPVSMTKTSVDCTMYICGDSTECSNLLLQYGSFCTQLNRALTGIAVEQDKNTQEVFAQVKQIYKTPPIKDFGGFNFSQILPDPSKPSKRSFIEDLLFNKVTLADAGFIKQYGDCLGDIAARDLICAQKFNGLTVLPPLLTDEMIAQYTSALLAGTITSGWTFGAGAALQIPFAMQMAYRFNGIGVTQNVLYENQKLIANQFNSAIGKIQDSLSFTASALGKLQDVVNQNAQALNTLVKQLSSNFGAISSVLNDILSRLDKVEAEVQIDRLITGRLQSLQTYVTQQLIRAAEIRASANLAATKMSECVLGQSKRVDFCGKGYHLMSFPQSAPHGVVFLHVTYVCAQEKNFTTAPAICHDGKAHFPREGVFVSNGTHWFVTQRNFYEPQIITTDNTFVSGNCDVVIGIVNNTVYDPLQPELDSGGGGSDIIKLLNEQVNKEMQSSNLYMSMSSWCYTHSLDGAGLFLFDHAAEEYEHAKKLIIFLNENNVPVQLTSISAPEHKFEGLTQIFQKAYEHEQHISESINNIVDHAIKSKDHATFNFLQWYVAEQHEEEVLFKDILDKIELIGNENHGLYLADQYVKGIAKSRKS

SEQ ID NO: 9138 - protein, 1315 aa, Artificial Sequence; identical to SEQ ID NO: 9118
  SARS-CoV-2/Australia/NSW10/2020__EPI_ISL_413596 spike protein (1-1147)(P715C_P1069C) Ferritin construct

SEQ ID NO: 9139 - protein, 1315 aa, Artificial Sequence
  SARS-CoV-2/Switzerland/1000477797/2020__EPI_ISL_413023 spike protein (1-1147)(P715C_P1069C) Ferritin construct
MFVFLVLLPLVSSQCVNLTTRTQLPPAYTNSFTRGVYYPDKVFRSSVLHSTQDLFLPFFSNVTWFHAIHVSGTNGTKRFDNPVLPFNDGVYFASTEKSNIIRGWIFGTTLDSKTQSLLIVNNATNVVIKVCEFQFCNDPFLGVYYHKNNKSWMESEFRVYSSANNCTFEYVSQPFLMDLEGKQGNFKNLREFVFKNIDGYFNIYSKHTPINLVRDLPQGFSALEPLVDLPIGINITRFQTLLALHRSYLTPGDSSSGWTAGAAAYYVGYLQPRTFLLKYNENGTITDAVDCALDPLSETKCTLKSFTVEKGIYQTSNFRVQPTESIVRFPNITNLCPFGEVFNATRFASVYAWNRKRISNCVADYSVLYNSASFSTFKCYGVSPTKLNDLCFTNVYADSFVIRGDEVRQIAPGQTGKIADYNYKLPDDFTGCVIAWNSNNLDSKVGGNYNYLYRLFRKSNLKPFERDISTEIYQAGSTPCNGVEGFNCYFPLQSYGFQPTNGVGYQPYRVVVLSFELLHAPATVCGPKKSTNLVKNKCVNFNFNGLTGTGVLTESNKKFLPFQQFGRDIADTTDAVRDPQTLEILDITPCSFGGVSVITPGTNTSNQVAVLYQGVNCTEVPVAIHADQLTPTWRVYSTGSNVFQTRAGCLIGAEHVNNSYECDIPIGAGICASYQTQTNSPRRARSVASQSIIAYTMSLGAENSVAYSNNSIAICTNFTISVTTEILPVSMTKTSVDCTMYICGDSTECSNLLLQYGSFCTQLNRALTGIAVEQDKNTQEVFAQVKQIYKTPPIKDFGGFNFSQILPDPSKPSKRSFIEDLLFNKVTLADAGFIKQYGDCLGDIAARDLICAQKFNGLTVLPPLLTDEMIAQYTSALLAGTITSGWTFGAGAALQIPFAMQMAYRFNGIGVTQNVLYENQKLIANQFNSAIGKIQDSLSSTASALGKLQDVVNQNAQALNTLVKQLSSNFGAISSVLNDILSRLDKVEAEVQIDRLITGRLQSLQTYVTQQLIRAAEIRASANLAATKMSECVLGQSKRVDFCGKGYHLMSFPQSAPHGVVFLHVTYVCAQEKNFTTAPAICHDGKAHFPREGVFVSNGTHWFVTQRNFYEPQIITTDNTFVSGNCDVVIGIVNNTVYDPLQPELDSGGGGSDIIKLLNEQVNKEMQSSNLYMSMSSWCYTHSLDGAGLFLFDHAAEEYEHAKKLIIFLNENNVPVQLTSISAPEHKFEGLTQIFQKAYEHEQHISESINNIVDHAIKSKDHATFNFLQWYVAEQHEEEVLFKDILDKIELIGNENHGLYLADQYVKGIAKSRKS

SEQ ID NO: 9140 - protein, 1315 aa, Artificial Sequence
  SARS-CoV-2/Belgium/BA-02291/2020__EPI_ISL_415159 spike protein (1-1147)(P715C_P1069C) Ferritin construct
MFVFLVLLPLVSSQCVNLTTRTQLPPAYTNSFTRGVYYPDKVFRSSVLHSTQDLFLPFFSNVTWFHAIHVSGTNGTKRFDNPVLPFNDGVYFASTEKSNIIRGWIFGTTLDSKTQSLLIVNNATNVVIKVCEFQFCNDPFLGVYYHKNNKSWMESEFRVYSSANNCTFEYVSQPFLMDLEGKQGNFKNLREFVFKNIDGYFKIYSKHTPINLVRDLPQGFSALEPLVDLPIGINITRFQTLLALHRSYLTPGDSSSGWTAGAAAYYVGYLQPRTFLLKYNENGTITDAVDCALDPLSETKCTLKSFTVEKGIYQTSNFRVQPTESIVRFPNITNLCPFGEVFNATRFASVYAWNRKRISNCVADYSVLYNSASFSTFKCYGVSPTKLNDLCFTNVYADSFVIRGDEVRQIAPGQTGKIADYNYKLPDDFTGCVIAWNSNNLDSKVGGNYNYLYRLFRRSNLKPFERDISTEIYQAGSTPCNGVEGFNCYFPLQSYGFQPTNGVGYQPYRVVVLSFELLPAPATVCGPKKSTNLVKNKCVNFNFNGLTGTGVLTESNKKFLPFQQFGRDIADTTDAVRDPQTLEILDITPCSFGGVSVITPGTNTSNQVAVLYQGVNCTEVPVAIHADQLTPTWRVYSTGSNVFQTRAGCLIGAEHVNNSYECDIPIGAGICASYQTQTNSPRRARSVASQSIIAYTMSLGAENSVAYSNNSIAICTNFTISVTTEILPVSMTKTSVDCTMYICGDSTECSNLLLQYGSFCTQLNRALTGIAVEQDKNTQEVFAQVKQIYKTPPIKDFGGFNFSQILPDPSKPSKRSFIEDLLFNKVTLADAGFIKQYGDCLGDIAARDLICAQKFNGLTVLPPLLTDEMIAQYTSALLAGTITSGWTFGAGAALQIPFAMQMAYRFNGIGVTQNVLYENQKLIANQFNSAIGKIQDSLSSAAPALGKLQDVVNQNAQALNTLVKQLSSNFGAISSVLNDILSRLDKVEAEVQIDRLITGRLQSLQTYVTQQLIRAAEIRASANLAATKMSECVLGQSKRVDFCGKGYHLMSFPQSAPHGVVFLHVTYVCAQEKNFTTAPAICHDGKAHFPREGVFVSNGTHWFVTQRNFYEPQIITTDNTFVSGNCDVVIGIVNNTVYDPLQPELDSGGGGSDIIKLLNEQVNKEMQSSNLYMSMSSWCYTHSLDGAGLFLFDHAAEEYEHAKKLIIFLNENNVPVQLTSISAPEHKFEGLTQIFQKAYEHEQHISESINNIVDHAIKSKDHATFNFLQWYVAEQHEEEVLFKDILDKIELIGNENHGLYLADQYVKGIAKSRKS

SEQ ID NO: 9141 - protein, 1315 aa, Artificial Sequence
  SARS-CoV-2/USA/WA8-UW5/2020__EPI_ISL_413486 spike protein (1-1147)(P715C_P1069C) Ferritin construct
MFVFLVLLPLVSSQCVNLTTRTQLPPAYTNSFTRGVYYPDKVFRSSVLHSTQDLFLPFFSNVTWFHAIHVSGTNGTKRFDNPVLPFNDGVYFASTEKSNIIRGWIFGTTLDSKTQSLLIVNNATNVVIKVCEFQFCNDPFLGVYYHKNNKSWMESEFRVYSSANNCTFEYVSQPFLMDLEGKQGNFKNLREFVFKNIDGYFKIYSKHTPINLVRDLPQGFSALEPLVDLPIGINITRFQTLLALHRSYLTPGDSSSGWTAGAAAYYVGYLQPRTFLLKYNENGTITDAVDCALDPLSETKCTLKSFTVEKGIYQTSNFRVQPTESIVRFPNITNLCPFGEVFNATRFASVYAWNRKRISNCVADYSVLYNSASFSTFKCYGVSPTKLNDLCFTNVYADSFVIRGDEVRQIAPGQTGKIADYNYKLPDDFTGCVIAWNSNNLDSKVGGNYNYLYRLFRKSNLKPFERDISTEIYQAGSTPCNGVEGFNCYFPLQSYGFQPTNGVGYQPYRVVVLSFELLHAPATVCGPKKSTNLVKNKCVNFNFNGLTGTGVLTESNKKFLPFQQFGRDIADTTDAVRDPQTLEILDITPCSFGGVSVITPGTNTSNQVAVLYQDVNCTEVPVAIHADQLTPTWRVYSTGSNVFQTRAGCLIGAEYVNNSYECDIPIGAGICASYQTQTNSPRRARSVASQSIIAYTMSLGAENSVAYSNNSIAICTNFTISVTTEILPVSMTKTSVDCTMYICGDSTECSNLLLQYGSFCTQLNRALTGIAVEQDKNTQEVFAQVKQIYKTPPIKDFGGFNFSQILPDPSKPSKRSFIEDLLFNKVTLADAGFIKQYGDCLGDIAARDLICAQKFNGLTVLPPLLTDEMIAQYTSALLAGTITSGWTFGAGAALQIPFAMQMAYRFNGIGVTQNVLYENQKLIANQFNSAIGKIQDSLSSTASALGKLQDVVNQNAQALNTLVKQLSSNFGAISSVLNDILSRLDKVEAEVQIDRLITGRLQSLQTYVTQQLIRAAEIRASANLAATKMSECVLGQSKRVDFCGKGYHLMSFPQSAPHGVVFLHVTYVCAQEKNFTTAPAICHDGKAHFPREGVFVSNGTHWFVTQRNFYEPQIITTDNTFVSGNCDVVIGIVNNTVYDPLQPELDSGGGGSDIIKLLNEQVNKEMQSSNLYMSMSSWCYTHSLDGAGLFLFDHAAEEYEHAKKLIIFLNENNVPVQLTSISAPEHKFEGLTQIFQKAYEHEQHISESINNIVDHAIKSKDHATFNFLQWYVAEQHEEEVLFKDILDKIELIGNENHGLYLADQYVKGIAKSRKS

SEQ ID NO: 9142 - protein, 1315 aa, Artificial Sequence
  SARS-CoV-2/England/20102000506/2020__EPI_ISL_415147 spike protein (1-1147)(P715C_P1069C) Ferritin construct
MFVFLVLLPLVSSQCVNLTTRTQLPPAYTNSFTRGVYYPDKVFRSSVLHSTQDLFLPFFSNVTWFHAIHVSGTNGTKRFDNPVLPFNDGVYFASTEKSNIIRGWIFGTTLDSKTQSLLIVNNATNVVIKVCEFQFCNDPFLGVYYHKNNKSWMESEFRVYSSANNCTFEYVSQPFLMDLEGKQGNFKNLREFVFKNIDGYFKIYSKHTPINLVRDLPQGFSALEPLVDLPIGINITRFQTLLALHRSYLTPGDSSSGWTAGAAAYYVGYLQPRTFLLKYNENGTITDAVDCALDPLSETKCTLKSFTVEKGIYQTSNFRVQPTESIVRFPNITNLCPFGEVFNATRFASVYAWNRKRISNCVADYSVLYNSASFSTFKCYGVSPTKLNDLCFTNVYADSFVIRGDEVRQIAPGQTGKIADYNYKLPDDFTGCVIAWNSNNLDSKVGGNYNYLYRLFRKSNLKPFERDISTEIYQAGSTPCNGVEGFNCYFPLQSYGFQPTNGVGYQPYRVVVLSFELLHAPATVCGPKKSTNLVKNKCVNFNFNGLTGTGVLTESNKKFLPFQQFGRDIADTTDAVRDPQTLEILDITPCSFGGVSVITPGTNTSNQVAVLYQGVNCTEVPVAIHADQLTPTWRVYSTGSNVFQTRAGCLIGAEHVNNSYECDIPIGAGICASYQTQTNSPRRARSVASQSIIAYTMSLGAENSVAYSNNSIAICTNFTISVTTEILPVSMTKTSVDCTMYICGDSTECSNLLLQYGSFCTQLNRALTGIAVEQDKNTQEVFAQVKQIYKTPPIKDFGGFNFSQILPDPSKPSKRSFIEDLLFNKVTLADAGFIKQYGYCLGDIAARDLICAQKFNGLTVLPPLLTDEMIAQYTSALLAGTITSGWTFGAGAALQIPFAMQMAYRFNGIGVTQNVLYENQKLIANQFNSAIGKIQDSLSSTASALGKLQDVVNQNAQALNTLVKQLSSNFGAISSVLNDILSRLDKVEAEVQIDRLITGRLQSLQTYVTQQLIRAAEIRASANLAATKMSECVLGQSKRVDFCGKGYHLMSFPQSAPHGVVFLHVTYVCAQEKNFTTAPAICHDGKAHFPREGVFVSNGTHWFVTQRNFYEPQIITTDNTFVSGNCDVVIGIVNNTVYDPLQPELDSGGGGSDIIKLLNEQVNKEMQSSNLYMSMSSWCYTHSLDGAGLFLFDHAAEEYEHAKKLIIFLNENNVPVQLTSISAPEHKFEGLTQIFQKAYEHEQHISESINNIVDHAIKSKDHATFNFLQWYVAEQHEEEVLFKDILDKIELIGNENHGLYLADQYVKGIAKSRKS

SEQ ID NO: 9143 - protein, 1315 aa, Artificial Sequence
  SARS-CoV-2/Belgium/VAG-03013/2020__EPI_ISL_415155 spike protein (1-1147)(P715C_P1069C) Ferritin construct
MFVFLVLLPLVSSQCVNLTTRTQLPPAYTNSFTRGVYYPDKVFRSSVLHSTQDLFLPFFSNVTWFHAIHVSGTNGTKRFDNPVLPFNDGVYFASTEKSNIIRGWIFGTTLDSKTQSLLIVNNATNVVIKVCEFQFCNDPFLGVYYHKNNKSWMESEFRVYSSANNCTFEYVSQPFLMDLEGKQGNFKNLREFVFKNIDGYFKIYSKHTPINLVRDLPQGFSALEPLVDLPIGINITRFQTLLALHRSYLTPGDSSSGWTAGAAAYYVGYLQPRTFLLKYNENGTITDAVDCALDPLSETKCTLKSFTVEKGIYQTSNFRVQPTESIVRFPNITNLCPFGEVFNATRFASVYAWNRKRISNCVADYSVLYNSASFSTFKCYGVSPTKLNDLCFTNVYADSFVIRGDEVRQIAPGQTGKIADYNYKLPDDFTGCVIAWNSNNLDSKVGGNYNYLYRLFRKSNLKPFERDISTEIYQAGSTPCNGVEGFNCYFPLQSYGFQPTNGVGYQPYRVVVLSFELLHAPATVCGPKKSTNLVKNKCVNFNFNGLTGTGVLTESNKKFLPFQQFGRDIADTTDAVRDPQTLEILDITPCSFGGVSVITPGTNTSNQVAVLYQGVNCTEVPVAIHADQLTPTWRVYSTGSNVFQTRAGCLIGAEHVNNSYECDIPIGAGICASYQTQTNSPRRARSVASQSIIAYTMSLGAENSVAYSNNSIAICTNFTISVTTEILPVSMTKTSVDCTMYICGDSTECSNLLLQYGSFCTQLNRALTGIAVEQDKNTQEVFAQVKQIYKTPPIKDFGGFNFSQILPDPSKPSKRSFIEDLLFNKVTLADAGFIKQYGDCLGDIAARDLICAQKFNGLTVLPPLLTDEMIAQYTSALLAGTITSGWTFGAGAALQIPFAMQMAYRFNGIGVTQNVLYENQKLIANQFNSAIGKIQDSLSSTATALGKLQDVVNQNAQALNTLVKQLSSNFGAISSVLNDILSRLDKVEAEVQIDRLITGRLQSLQTYVTQQLIRAAEIRASANLAATKMSECVLGQSKRVDFCGKGYHLMSFPQSAPHGVVFLHVTYVCAQEKNFTTAPAICHDGKAHFPREGVFVSNGTHWFVTQRNFYEPQIITTDNTFVSGNCDVVIGIVNNTVYDPLQPELDSGGGGSDIIKLLNEQVNKEMQSSNLYMSMSSWCYTHSLDGAGLFLFDHAAEEYEHAKKLIIFLNENNVPVQLTSISAPEHKFEGLTQIFQKAYEHEQHISESINNIVDHAIKSKDHATFNFLQWYVAEQHEEEVLFKDILDKIELIGNENHGLYLADQYVKGIAKSRKS

SEQ ID NO: 9144 - protein, 1315 aa, Artificial Sequence
  SARS-CoV-2/Belgium/BC-03016/2020__EPI_ISL_415157 spike protein (1-1147)(P715C_P1069C) Ferritin construct
MFVFLVLLPLVSSQCVNLTTRTQLPPAYTNSFTRGVYYPDKVFRSSVLHSTQDLFLPFFSNVTWFHAIHVSGTNGTKRFDNPVLPFNDGVYFASTEKSNIIRGWIFGTTLDSKTQSLLIVNNATNVVIKVCEFQFCNDPFLGVYYHKNNKSWMESEFRVYSSANNCTFEYVSQPFLMDLEGKQGNFKNLREFVFKNIDGYFKIYSKHTPINLVRDLPQGFSALEPLVDLPIGINITRFQTLLALHRSYLTPGDSSSGWTAGAAAYYVGYLQPRTFLLKYNENGTITDAVDCALDPLSETKCTLKSFTVEKGIYQTSNFRVQPTESIVRFPNITNLCPFGEVFNATRFASVYAWNRKRISNCVADYSVLYNSASFSTFKCYGVSPTKLNDLCFTNVYADSFVIRGDEVRQIAPGQTGKIADYNYKLPDDFTGCVIAWNSNNLDSKVGGNYNYLYRLFRKSNLKPFERDISTEIYQAGSTPCNGVEGFNCYFPLQSYGFQPTNGVGYQPYRVVVLSFELLHAPATVCGPKKSTNLVKNKCVNFNFNGLTGTGVLTESNKKFLPFQQFGRDIADTTDAVRDPQTLEILDITPCSFGGVSVITPGTNTSNQVAVLYQGVNCTEVPVAIHADQLTPTWRVYSTGSNVFQTRAGCLIGAEHVNNSYECDIPIGAGICASYQTQTNSPRRARSVASQSIIAYTMSLGAENSVAYSNNSIAICTNFTISVTTEILPVSMTKTSVDCTMYICGDSTECSNLLLQYGSFCTQLNRALTGIAVEQDKNTQEVFAQVKQIYKTPPIKDFGGFNFSQILPDPSKPSKRSFIEDLLFNKVTLADAGFIKQYGDCLGDIAARDLICAQKFNGLTVLPPLLTDEMIAQYTSALLAGTITSGWTFGAGAALQIPFAMQMAYRFNGIGVTQNVLYENQKLIANQFNSAIGKIQDSLSSTAPALGKLQDVVNQNAQALNTLVKQLSSNFGAISSVLNDILSRLDKVEAEVQIDRLITGRLQSLQTYVTQQLIRAAEIRASANLAATKMSECVLGQSKRVDFCGKGYHLMSFPQSAPHGVVFLHVTYVCAQEKNFTTAPAICHDGKAHFPREGVFVSNGTHWFVTQRNFYEPQIITTDNTFVSGNCDVVIGIVNNTVYDPLQPELDSGGGGSDIIKLLNEQVNKEMQSSNLYMSMSSWCYTHSLDGAGLFLFDHAAEEYEHAKKLIIFLNENNVPVQLTSISAPEHKFEGLTQIFQKAYEHEQHISESINNIVDHAIKSKDHATFNFLQWYVAEQHEEEVLFKDILDKIELIGNENHGLYLADQYVKGIAKSRKS

SEQ ID NO: 9145 - protein, 1315 aa, Artificial Sequence
  SARS-CoV-2/Germany/BavPat3/2020__EPI_ISL_414521 spike protein (1-1147)(P715C_P1069C) Ferritin construct
MFVFLVLLPLVSSQCVNLTTRTQLPPAYTNSFTRGVYYPDKVFRSSVLHSTQDLFLPFFSNVTWFHAIHVSGTNGTKRFDNPVLPFNDGVYFASTEKSNIIRGWIFGTTLDSKTQSLLIVNNATNVVIKVCEFQFCNDPFLGVYYHKNNKSWMESEFRVYSSANNCTFEYVSQPFLMDLEGKQGNFKNLREFVFKNIDGYFKIYSKHTPINLVRDLPQGFSALEPLVDLPIGINITRFQTLLALHRSYLTPGDSSSGWTAGAAAYYVGYLQPRTFLLKYNENGTITDAVDCALDPLSETKCTLKSFTVEKGIYQTSNFRVQPTESIVRFPNITNLCPFGEVFNATRFASVYAWNRKRISNCVADYSVLYNSASFSTFKCYGVSPTKLNDLCFTNVYADSFVIRGDEVRQIAPGQTGKIADYNYKLPDDFTGCVIAWNSNNLDSKVGGNYNYLYRLFRKSNLKPFERDISTEIYQAGSTPCNGVEGFNCYFPLQSYGFQPTNGVGYQPYRVVVLSFELLHAPATVCGPKKSTNLVKNKCVNFNFNGLTGTGVLTESNKKFLPFQQFGRDIADTTDAVRDPQTLEILDITPCSFGGVSVITPGTNTSNQVAVLYQDVNCTEVPVAIHADQLTPTWRVYSTGSNVFQTRAGCLIGAEHVNNSYECDIPIGAGICASYQTQTNSPRRARSVASQSIIAYTMSLGAENSVAYSNNSIAICTNFTISVTTEILPVSMTKTSVDCTMYICGDSTECSNLLLQYGSFCTQLNRALTGIAVEQDKNTQQVFAQVKQIYKTPPIKDFGGFNFSQILPDPSKPSKRSFIEDLLFNKVTLADAGFIKQYGDCLGDIAARDLICAQKFNGLTVLPPLLTDEMIAQYTSALLAGTITSGWTFGAGAALQIPFAMQMAYRFNGIGVTQNVLYENQKLIANQFNSAIGKIQDSLSSTASALGKLQDVVNQNAQALNTLVKQLSSNFGAISSVLNDILSRLDKVEAEVQIDRLITGRLQSLQTYVTQQLIRAAEIRASANLAATKMSECVLGQSKRVDFCGKGYHLMSFPQSAPHGVVFLHVTYVCAQEKNFTTAPAICHDGKAHFPREGVFVSNGTHWFVTQRNFYEPQIITTDNTFVSGNCDVVIGIVNNTVYDPLQPELDSGGGGSDIIKLLNEQVNKEMQSSNLYMSMSSWCYTHSLDGAGLFLFDHAAEEYEHAKKLIIFLNENNVPVQLTSISAPEHKFEGLTQIFQKAYEHEQHISESINNIVDHAIKSKDHATFNFLQWYVAEQHEEEVLFKDILDKIELIGNENHGLYLADQYVKGIAKSRKS

SEQ ID NO: 9146 - protein, 1315 aa, Artificial Sequence
  SARS-CoV-2/France/HF1805/2020__EPI_ISL_414628 spike protein (1-1147)(P715C_P1069C) Ferritin construct
MFVFLVLLPLVSSQCVNLTTRTQLPPAYTNSFTRGVYYPDKVFRSSVLHSTQDLFLPFFSNVTWFHAIHVSGTNGTKRFDNPVLPFNDGVYFASTEKSNIIRGWIFGTTLDSKTQSLLIVNNATNVVIKVCEFQFCNDPFLGVYYHKNNKSWMESEFRVYSSANNCTFEYVSQPFLMDLEGKQGNFKNLREFVFKNIDGYFKIYSKHTPINLVRDLPQGFSALEPLVDLPIGINITRFQTLLALHRSYLTPGDSSSGWTAGAAAYYVGYLQPRTFLLKYNENGTITDAVDCALDPLSETKCTLKSFTVEKGIYQTSNFRVQPTESIVRFPNITNLCPFGEVFNATRFASVYAWNRKRISNCVADYSVLYNSASFSTFKCYGVSPTKLNDLCFTNVYADSFVIRGDEVRQIAPGQTGKIADYNYKLPDDFTGCVIAWNSNNLDSKVGGNYNYLYRLFRKSNLKPFERDISTEIYQAGSTPCNGVEGFNCYFPLQSYGFQPTNGVGYQPYRVVVLSFELLHAPATVCGPKKSTNLVKNKCVNFNFNGLTGTGVLTESNKKFLPFQQFGRDIADTTDAVRDPQTLEILDITPCSFGGVSVITPGTNTSNQVAVLYQGVNCTEVPVAIHADQLTPTWRVYSTGSNVFQTRAGCLIGAEHVNNSYECDIPIGAGICASYQTQTNSPRRARSVASQSIIAYTMSLGAENSVAYSNNSIAICTNFTISVTTEILPVSMTKTSVDCTMYICGDSTECSNLLLQYGSFCTQLNRALTGIAVEQDKNTQEVFAQVKQIYKTPPIKDFGGFNFSQILPDPSKPSKRSFIEDLLFNKVTLADAGFIKQYGDCLGDIAARDLICAQKFNGLTVLPPLLTDEMIAQYTSALLAGTITSGWTFGAGAALQIPFAMQMAYRFNGIGVTQNVLYENQKLIANQFNSAIGKIQDSLSSTASALGKLQDVVNQNAQALNTLVKQLSSNFGAISSVLNDILSRLDKVEAEVQIDRLITGRLQSLQTYVTQQLIRAAEIRASANLAATKMSECVLGQSKRVDFCGKGYHLMSFPQSAPHGVVFLHVTYVCAQEKNFTTAPAICHDGKAHFPREGVFVSNGTHWFVTQRNFYEPQIITTDNTFVSGNCDVVIGVVNNTVYDPLQPELDSGGGGSDIIKLLNEQVNKEMQSSNLYMSMSSWCYTHSLDGAGLFLFDHAAEEYEHAKKLIIFLNENNVPVQLTSISAPEHKFEGLTQIFQKAYEHEQHISESINNIVDHAIKSKDHATFNFLQWYVAEQHEEEVLFKDILDKIELIGNENHGLYLADQYVKGIAKSRKS

SEQ ID NO: 9147 - protein, 1315 aa, Artificial Sequence
  SARS-CoV-2/Netherlands/ZuidHolland_9/2020__EPI_ISL_414445 spike protein (1-1147)(P715C_P1069C) Ferritin construct
MFVFLVLLPLVSSQCVNLTTRTQLPPAYTNSFTRGVYYPDKVFRSSVLHSTQDLFLPFFSNVTWFHAIHVSGTNGTKRFDNPVLPFNDGVYFASTEKSNIIRGWIFGTTLDSKTQSLLIVNNATNVVIKVCEFQFCNDPFLGVYYHKNNKSWMESEFRVYSSANNCTFEYVSQPFLMDLEGKQGNFKNLREFVFKNIDGYFKIYSKHTPINLVRDLPQGFSALEPLVDLPIGINITRFQTLLALHRSYLTPGDSSSGWTAGAAAYYVGYLQPRTFLLKYNENGTITDAVDCALDPLSETKCTLKSFTVEKGIYQTSNFRVQPTESIVRFPNITNLCPFGEVFNATRFASVYAWNRKRISNCVADYSVLYNSASFSTFKCYGVSPTKLNDLCFTNVYADSFVIRGDEVRQIAPGQTGKIADYNYKLPDDFTGCVIAWNSNNLDSKVGGNYNYLYRLFRKSNLKPFERDISTEIYQAGSTPCNGVEGFNCYFPLQSYGFQPTNGVGYQPYRVVVLSFELLHAPATVCGPKKSTNLVKNKCVNFNFNGLTGTGVLTESNKKFLPFQQFGRDIADTTDAVRDPQTLEILDITPCSFGGVSVITPGTNTSNQVAVLYQGVNCTEVPVAIHADQLTPTWRVYSTGSNVFQTRAGCLIGAEHVNNSYECDIPIGAGICASYQTQTNSPRRARSVASQSIIAYTMSLGAENSVAYSNNSIAICTNFTISVTTEILPVSMTKTSVDCTMYICGDSTECSNLLLQYGSFCTQLNRALTGIAVEQDKNTQEVFAQVKQIYKTPPIKDFGGFNFSQILPDPSKPSKRSFIEDLLFNKVTLADAGFIKQYGDCLGDIAARDLICVQKFNGLTVLPPLLTDEMIAQYTSALLAGTITSGWTFGAGAALQIPFAMQMAYRFNGIGVTQNVLYENQKLIANQFNSAIGKIQDSLSSTASALGKLQDVVNQNAQALNTLVKQLSSNFGAISSVLNDILSRLDKVEAEVQIDRLITGRLQSLQTYVTQQLIRAAEIRASANLAATKMSECVLGQSKRVDFCGKGYHLMSFPQSAPHGVVFLHVTYVCAQEKNFTTAPAICHDGKAHFPREGVFVSNGTHWFVTQRNFYEPQIITTDNTFVSGNCDVVIGIVNNTVYDPLQPELDSGGGGSDIIKLLNEQVNKEMQSSNLYMSMSSWCYTHSLDGAGLFLFDHAAEEYEHAKKLIIFLNENNVPVQLTSISAPEHKFEGLTQIFQKAYEHEQHISESINNIVDHAIKSKDHATFNFLQWYVAEQHEEEVLFKDILDKIELIGNENHGLYLADQYVKGIAKSRKS

SEQ ID NO: 9148 - protein, 1315 aa, Artificial Sequence
  SARS-CoV-2/Finland/FIN03032020A/2020__EPI_ISL_413602 spike protein (1-1147)(P715C_P1069C) Ferritin construct
MFVFLVLLPLVSSQCVNLTTRTQLPPAYTNSFTRGVYYPDKVFRSSVLHSTQDLFLPFFSNVTWFHAIHVSGTNGTKRFDNPVLPFNDGVYFASTEKSNIIRGWIFGTTLDSKTQSLLIVNNATNVVIKVCEFQFCNDPFLGVYYHKNNKSWMESEFRVYSSANNCTFEYVSQPFLMDLEGKQGNFKNLREFVFKNIDGYFKIYSKHTPINLVRDLPQGFSALEPLVDLPIGINITRFQTLLALHRSYLTPGDSSSGWTAGAAAYYVGYLQPRTFLLKYNENGTITDAVDCALDPLSETKCTLKSFTVEKGIYQTSNFRVQPTESIVRFPNITNLCPFGEVFNATRFASVYAWNRKRISNCVADYSVLYNSASFSTFKCYGVSPTKLNDLCFTNVYADSFVIRGDEVRQIAPGQTGKIADYNYKLPDDFTGCVISWNSNNLDSKVGGNYNYLYRLFRKSNLKPFERDISTEIYQAGSTPCNGVEGFNCYFPLQSYGFQPTNGVGYQPYRVVVLSFELLHAPATVCGPKKSTNLVKNKCVNFNFNGLTGTGVLTESNKKFLPFQQFGRDIADTTDAVRDPQTLEILDITPCSFGGVSVITPGTNTSNQVAVLYQGVNCTEVPVAIHADQLTPTWRVYSTGSNVFQTRAGCLIGAEHVNNSYECDIPIGAGICASYQTQTNSPRRARSVASQSIIAYTMSLGAENSVAYSNNSIAICTNFTISVTTEILPVSMTKTSVDCTMYICGDSTECSNLLLQYGSFCTQLNRALTGIAVEQDKNTQEVFAQVKQIYKTPPIKDFGGFNFSQILPDPSKPSKRSFIEDLLFNKVTLADAGFIKQYGDCLGDIAARDLICAQKFNGLTVLPPLLTDEMIAQYTSALLAGTITSGWTFGAGAALQIPFAMQMAYRFNGIGVTQNVLYENQKLIANQFNSAIGKIQDSLSSTASALGKLQDVVNQNAQALNTLVKQLSSNFGAISSVLNDILSRLDKVEAEVQIDRLITGRLQSLQTYVTQQLIRAAEIRASANLAATKMSECVLGQSKRVDFCGKGYHLMSFPQSAPHGVVFLHVTYVCAQEKNFTTAPAICHDGKAHFPREGVFVSNGTHWFVTQRNFYEPQIITTDNTFVSGNCDVVIGIVNNTVYDPLQPELDSGGGGSDIIKLLNEQVNKEMQSSNLYMSMSSWCYTHSLDGAGLFLFDHAAEEYEHAKKLIIFLNENNVPVQLTSISAPEHKFEGLTQIFQKAYEHEQHISESINNIVDHAIKSKDHATFNFLQWYVAEQHEEEVLFKDILDKIELIGNENHGLYLADQYVKGIAKSRKS

SEQ ID NO: 9149 - protein, 1315 aa, Artificial Sequence
  SARS-CoV-2/France/GE1977/2020__EPI_ISL_414632 spike protein (1-1147)(P715C_P1069C) Ferritin construct
MFVFLVLLPLVSSQCVNLTTRTQLPPAYTNSFTRGVYYPDKVFRSSVLHSTQDLFLPFFSNVTWFHAIHVSGTNGTKRFDNPVLPFNDGVYFASTEKSNIIRGWIFGTTLDSKTQSLLIVNNATNVVIKVCEFQFCNDPFLGVYYHKNNKSWMESEFRVYSSANNCTFEYVSQPFLMDLEGKQGNFKNLREFVFKNIDGYFKIYSKHTPINLVRDLPQGFSALEPLVDLPIGINITRFQTLLALHRSYLTPGDSSSGWTAGAAAYYVGYLQPRTFLLKYNENGTITDAVDCALDPLSETKCTLKSFTVEKGIYQTSNFRVQPTESIVRFPNITNLCPFGEVFNATRFASVYAWNRKRISNCVADYSVLYNSASFSTFKCYGVSPTKLNDLCFTNVYADSFVIRGDEVRQIAPGQTGKIADYNYKLPDDFTGCVIAWNSNNLDSKVGGNYNYLYRLFRKSNLKPFERDISTEIYQAGSTPCNGVEGFNCYFPLQSYGFQPTNGVGYQPYRVVVLSFELLHAPATVCGPKKSTNLVKNKCVNFNFNGLTGTGVLTESNKKFLPFQQFGRDIADTTDAVRDPQTLEILDITPCSFGGVSVITPGTNTSNQVAVLYQGVNCTEVPVAIHADQLTPTWRVYSTGSNVFQTRAGCLIGAEHVNNSYECDIPIGAGICASYQTQTNSPRRARSVASQSIIAYTMSLGAENSVAYSNNSIAICTNFTISVTTEILPVSMTKTSVDCTMYICGDSTECSNLLLQYGSFCTQLNRALTGIAVEQDKNTQEVFAQVKQIYKTPPIKDFGGFNFSQILPDPSKPSKRSFIEDLLFNKVTLADAGFIKQYGDCLGDIAARDLICAQKFNGLTVLPPLLTDEMIAQYTSALLAGTITSGWTFGAGAALQIPFAMQMAYRFNGIGVTQNVLYENQKLIANQFNSAIGKIQDSLFSTASALGKLQDVVNQNAQALNTLVKQLSSNFGAISSVLNDILSRLDKVEAEVQIDRLITGRLQSLQTYVTQQLIRAAEIRASANLAATKMSECVLGQSKRVDFCGKGYHLMSFPQSAPHGVVFLHVTYVCAQEKNFTTAPAICHDGKAHFPREGVFVSNGTHWFVTQRNFYEPQIITTDNTFVSGNCDVVIGIVNNTVYDPLQPELDSGGGGSDIIKLLNEQVNKEMQSSNLYMSMSSWCYTHSLDGAGLFLFDHAAEEYEHAKKLIIFLNENNVPVQLTSISAPEHKFEGLTQIFQKAYEHEQHISESINNIVDHAIKSKDHATFNFLQWYVAEQHEEEVLFKDILDKIELIGNENHGLYLADQYVKGIAKSRKS

SEQ ID NO: 9150 - protein, 1315 aa, Artificial Sequence
  SARS-CoV-2/Finland/FIN-313/2020__EPI_ISL_414641 spike protein (1-1147)(P715C_P1069C) Ferritin construct
MFVFLVLLPLVSSQCVNLTTRTQLPPAYTNSFTRGVYYPDKVFRSSVLHSTQDLFLPFFSNVTWFHAIHVSGTNGTKRFDNPVLPFNDGVYFASTEKSNIIRGWIFGTTLDSKTQSLLIVNNATNVVIKVCEFQFCNDPFLGVYYHKNNKSWMESEFRVYSSANNCTFEYVSQPFLMDLEGKQGNFKNLREFVFKNIDGYFKIYSKHTPINLVRDLPQGFSALEPLVDLPIGINITRFKTLLALHRSYLTPGDSSSGWTAGAAAYYVGYLQPRTFLLKYNENGTITDAVDCALDPLSETKCTLKSFTVEKGIYQTSNFRVQPTESIVRFPNITNLCPFGEVFNATRFASVYAWNRKRISNCVADYSVLYNSASFSTFKCYGVSPTKLNDLCFTNVYADSFVIRGDEVRQIAPGQTGKIADYNYKLPDDFTGCVIAWNSNNLDSKVGGNYNYLYRLFRKSNLKPFERDISTEIYQAGSTPCNGVEGFNCYFPLQSYGFQPTNGVGYQPYRVVVLSFELLHAPATVCGPKKSTNLVKNKCVNFNFNGLTGTGVLTESNKKFLPFQQFGRDIADTTDAVRDPQTLEILDITPCSFGGVSVITPGTNTSNQVAVLYQGVNCTEVPVAIHADQLTPTWRVYSTGSNVFQTRAGCLIGAEHVNNSYECDIPIGAGICASYQTQTNSPRRARSVASQSIIAYTMSLGAENSVAYSNNSIAICTNFTISVTTEILPVSMTKTSVDCTMYICGDSTECSNLLLQYGSFCTQLNRALTGIAVEQDKNTQEVFAQVKQIYKTPPIKDFGGFNFSQILPDPSKPSKRSFIEDLLFNKVTLADAGFIKQYGDCLGDIAARDLICAQKFNGLTVLPPLLTDEMIAQYTSALLAGTITSGWTFGAGAALQIPFAMQMAYRFNGIGVTQNVLYENQKLIANQFNSAIGKIQDSLSSTASALGKLQDVVNQNAQALNTLVKQLSSNFGAISSVLNDILSRLDKVEAEVQIDRLITGRLQSLQTYVTQQLIRAAEIRASANLAATKMSECVLGQSKRVDFCGKGYHLMSFPQSAPHGVVFLHVTYVCAQEKNFTTAPAICHDGKAHFPREGVFVSNGTHWFVTQRNFYEPQIITTDNTFVSGNCDVVIGIVNNTVYDPLQPELDSGGGGSDIIKLLNEQVNKEMQSSNLYMSMSSWCYTHSLDGAGLFLFDHAAEEYEHAKKLIIFLNENNVPVQLTSISAPEHKFEGLTQIFQKAYEHEQHISESINNIVDHAIKSKDHATFNFLQWYVAEQHEEEVLFKDILDKIELIGNENHGLYLADQYVKGIAKSRKS

SEQ ID NO: 9151 - protein, 1315 aa, Artificial Sequence
  SARS-CoV-2/Netherlands/ZuidHolland_2/2020__EPI_ISL_414556 spike protein (1-1147)(P715C_P1069C) Ferritin construct
MFVFLVLLPLVSSQCVNLTTRTQLPPAYTNSFTRGVYYPDKVFRSSVLHSTQDLFLPFFSNVTWFHAIHVSGTNGTKRFDNPVLPFNDGVYFASTEKSNIIRGWIFGTTLDSKTQSLLIVNNATNVVIKVCEFQFCNDPFLGVYYHKNNKSWMESEFRVYSSANNCTFEYVSQPFLMDLEGKQGNFKNLREFVFKNIDGYFKIYSKHTPINLVRDLPQGFSALEPLVDLPIGINITRFQTLLALHRSYLTPGDSSSGWTAGAAAYYVGYLQPRTFLLKYNENGTITDAVDCALDPLSETKCTLKSFTVEKGIYQTSNFRVQPTESIVRFPNITNLCPFGEVFNATRFASVYAWNRKRISNCVADYSVLYNSASFSTFKCYGVSPTKLNDLCFTNVYADSFVIRGDEVRQIAPGQTGKIADYNYKLPDDFTGCVIAWNSNNLDSKVGGNYNYLYRLFRKSNLKPFERDISTEIYQAGSTPCNGVEGFNCYFPLQSYGFQPTNGVGYQPYRVVVLSFELLHAPATVCGPKKSTNLVKNKCVNFNFNGLTGTGVLTESNKKFLPFQQFGRDIADTTDAVRDPQTLEILDITPCSFGGVSVITPGTNTSNQVAVLYQGVNCTEVPVAIHADQLTPTWRVYSTGSNVFQTRAGCLIGAEHVNNSYECDIPIGAGICASYQTQTNSPRRARSVASQSIIAYTMSLGAENSVAYSNNSIAICTNFTISVTTEILPVSMTKTSVDCTMYICGDSTECSNLLLQYGSFCTQLNRALTGIALEQDKNTQEVFAQVKQIYKTPPIKDFGGFNFSQILPDPSKPSKRSFIEDLLFNKVTLADAGFIKQYGDCLGDIAARDLICAQKFNGLTVLPPLLTDEMIAQYTSALLAGTITSGWTFGAGAALQIPFAMQMAYRFNGIGVTQNVLYENQKLIANQFNSAIGKIQDSLSSTASALGKLQDVVNQNAQALNTLVKQLSSNFGAISSVLNDILSRLDKVEAEVQIDRLITGRLQSLQTYVTQQLIRAAEIRASANLAATKMSECVLGQSKRVDFCGKGYHLMSFPQSAPHGVVFLHVTYVCAQEKNFTTAPAICHDGKAHFPREGVFVSNGTHWFVTQRNFYEPQIITTDNTFVSGNCDVVIGIVNNTVYDPLQPELDSGGGGSDIIKLLNEQVNKEMQSSNLYMSMSSWCYTHSLDGAGLFLFDHAAEEYEHAKKLIIFLNENNVPVQLTSISAPEHKFEGLTQIFQKAYEHEQHISESINNIVDHAIKSKDHATFNFLQWYVAEQHEEEVLFKDILDKIELIGNENHGLYLADQYVKGIAKSRKS

SEQ ID NO: 9152 - protein, 1315 aa, Artificial Sequence
  SARS-CoV-2/USA/WA-UW31/2020__EPI_ISL_414618 spike protein (1-1147)(P715C_P1069C) Ferritin construct
MFVFLVLLPLVSSQCVNLTTRTQLPPAYTNSFTRGVYYPDKVFRSSVLHSTQDLFLPFFSNVTWFHAIHVSGTNGTKRFDNPVLPFNDGVYFASTEKSNIIRGWIFGTTLDSKTQSLLIVNNATNVVIKVCEFQFCNDPFLGVYYHKNNKSWMESEFRVYSSANNCTFEYVSQPFLMDLEGKQGNFKNLREFVFKNIDGYFKIYSKHTPINLVRDLPQGFSALEPLVDLPIGINITRFQTLLALHRSYLTPGDSSSGWTAGAAAYYVGYLQPRTFLLKYNENGTITDAVDCALDPLSETKCTLKSFTVEKGIYQTSNFRVQPTESIVRFPNITNLCPFGEVFNATRFASVYAWNRKRISNCVADYSVLYNSASFSTFKCYGVSPTKLNDLCFTNVYADSFVIRGDEVRQIAPGQTGKIADYNYKLPDDFTGCVIAWNSNNLDSKVGGNYNYLYRLFRKSNLKPFERDISTEIYQAGSTPCNGAEGFNCYFPLQSYGFQPTNGVGYQPYRVVVLSFELLHAPATVCGPKKSTNLVKNKCVNFNFNGLTGTGVLTESNKKFLPFQQFGRDIADTTDAVRDPQTLEILDITPCSFGGVSVITPGTNTSNQVAVLYQDVNCTEVPVAIHADQLTPTWRVYSTGSNVFQTRAGCLIGAEHVNNSYECDIPIGAGICASYQTQTNSPRRARSVASQSIIAYTMSLGAENSVAYSNNSIAICTNFTISVTTEILPVSMTKTSVDCTMYICGDSTECSNLLLQYGSFCTQLNRALTGIAVEQDKNTQEVFAQVKQIYKTPPIKDFGGFNFSQILPDPSKPSKRSFIEDLLFNKVTLADAGFIKQYGDCLGDIAARDLICAQKFNGLTVLPPLLTDEMIAQYTSALLAGTITSGWTFGAGAALQIPFAMQMAYRFNGIGVTQNVLYENQKLIANQFNSAIGKIQDSLSSTASALGKLQDVVNQNAQALNTLVKQLSSNFGAISSVLNDILSRLDKVEAEVQIDRLITGRLQSLQTYVTQQLIRAAEIRASANLAATKMSECVLGQSKRVDFCGKGYHLMSFPQSAPHGVVFLHVTYVCAQEKNFTTAPAICHDGKAHFPREGVFVSNGTHWFVTQRNFYEPQIITTDNTFVSGNCDVVIGIVNNTVYDPLQPELDSGGGGSDIIKLLNEQVNKEMQSSNLYMSMSSWCYTHSLDGAGLFLFDHAAEEYEHAKKLIIFLNENNVPVQLTSISAPEHKFEGLTQIFQKAYEHEQHISESINNIVDHAIKSKDHATFNFLQWYVAEQHEEEVLFKDILDKIELIGNENHGLYLADQYVKGIAKSRKS

SEQ ID NO: 9153 - protein, 1315 aa, Artificial Sequence
  SARS-CoV-2/South Korea/SNU01/2020__EPI_ISL_411929 spike protein (1-1147)(P715C_P1069C) Ferritin construct
MFVFLVLLPLVSSQCVNLTTRTQLPPAYTNSFTRGVYYPDKVFRSSVLHSTQDLFLPFFSNVTWFHAIHVSGTNGTKRFDNPVLPFNDGVYFASTEKSNIIRGWIFGTTLDSKTQSLLIVNNATNVVIKVCEFQFCNDPFLGVYYHKNNKSWMESEFRVYSSANNCTFEYVSQPFLMDLEGKQGNFKNLREFVFKNIDGYFKIYSKHTPINLVRDLPQGFWALEPLVDLPIGINITRFQTLLALHRSYLTPGDSSSGWTAGAAAYYVGYLQPRTFLLKYNENGTITDAVDCALDPLSETKCTLKSFTVEKGIYQTSNFRVQPTESIVRFPNITNLCPFGEVFNATRFASVYAWNRKRISNCVADYSVLYNSASFSTFKCYGVSPTKLNDLCFTNVYADSFVIRGDEVRQIAPGQTGKIADYNYKLPDDFTGCVIAWNSNNLDSKVGGNYNYLYRLFRKSNLKPFERDISTEIYQAGSTPCNGVEGFNCYFPLQSYGFQPTNGVGYQPYRVVVLSFELLHAPATVCGPKKSTNLVKNKCVNFNFNGLTGTGVLTESNKKFLPFQQFGRDIADTTDAVRDPQTLEILDITPCSFGGVSVITPGTNTSNQVAVLYQDVNCTEVPVAIHADQLTPTWRVYSTGSNVFQTRAGCLIGAEHVNNSYECDIPIGAGICASYQTQTNSPRRARSVASQSIIAYTMSLGAENSVAYSNNSIAICTNFTISVTTEILPVSMTKTSVDCTMYICGDSTECSNLLLQYGSFCTQLNRALTGIAVEQDKNTQEVFAQVKQIYKTPPIKDFGGFNFSQILPDPSKPSKRSFIEDLLFNKVTLADAGFIKQYGDCLGDIAARDLICAQKFNGLTVLPPLLTDEMIAQYTSALLAGTITSGWTFGAGAALQIPFAMQMAYRFNGIGVTQNVLYENQKLIANQFNSAIGKIQDSLSSTASALGKLQDVVNQNAQALNTLVKQLSSNFGAISSVLNDILSRLDKVEAEVQIDRLITGRLQSLQTYVTQQLIRAAEIRASANLAATKMSECVLGQSKRVDFCGKGYHLMSFPQSAPHGVVFLHVTYVCAQEKNFTTAPAICHDGKAHFPREGVFVSNGTHWFVTQRNFYEPQIITTDNTFVSGNCDVVIGIVNNTVYDPLQPELDSGGGGSDIIKLLNEQVNKEMQSSNLYMSMSSWCYTHSLDGAGLFLFDHAAEEYEHAKKLIIFLNENNVPVQLTSISAPEHKFEGLTQIFQKAYEHEQHISESINNIVDHAIKSKDHATFNFLQWYVAEQHEEEVLFKDILDKIELIGNENHGLYLADQYVKGIAKSRKS

SEQ ID NO: 9154 - protein, 1315 aa, Artificial Sequence
  SARS-CoV-2/China/WF0004/2020__EPI_ISL_413694 spike protein (1-1147)(P715C_P1069C) Ferritin construct
MFVFLVLLPLVSSQCVNLTTRTQLPPAYTNSFTRGVYYPDKVFRSSVLHSTQDLFLPFFSNVTWFHAIHVSGTNGTKRFDNPVLPFNDGVYFASTEKSNIIRGWIFGTTLDSKTQSLLIVNNATNVVIKVCEFQFCNDPFLGVYYHKNNKSWTESEFRVYSSANNCTFEYVSQPFLMDLEGKQGNFKNLREFVFKNIDGYFKIYSKHTPINLVRDLPQGFSALEPLVDLPIGINITRFQTLLALHRSYLTPGDSSSGWTAGAAAYYVGYLQPRTFLLKYNENGTITDAVDCALDPLSETKCTLKSFTVEKGIYQTSNFRVQPTESIVRFPNITNLCPFGEVFNATRFASVYAWNRKRISNCVADYSVLYNSASFSTFKCYGVSPTKLNDLCFTNVYADSFVIRGDEVRQIAPGQTGKIADYNYKLPDDFTGCVIAWNSNNLDSKVGGNYNYLYRLFRKSNLKPFERDISTEIYQAGSTPCNGVEGFNCYFPLQSYGFQPTNGVGYQPYRVVVLSFELLHAPATVCGPKKSTNLVKNKCVNFNFNGLTGTGVLTESNKKFLPFQQFGRDIADTTDAVRDPQTLEILDITPCSFGGVSVITPGTNTSNQVAVLYQDVNCTEVPVAIHADQLTPTWRVYSTGSNVFQTRAGCLIGAEHVNNSYECDIPIGAGICASYQTQTNSPRRARSVASQSIIAYTMSLGAENSVAYSNNSIAICTNFTISVTTEILPVSMTKTSVDCTMYICGDSTECSNLLLQYGSFCTQLNRALTGIAVEQDKNTQEVFAQVKQIYKTPPIKDFGGFNFSQILPDPSKPSKRSFIEDLLFNKVTLADAGFIKQYGDCLGDIAARDLICAQKFNGLTVLPPLLTDEMIAQYTSALLAGTITSGWTFGAGAALQIPFAMQMAYRFNGIGVTQNVLYENQKLIANQFNSAIGKIQDSLSSTASALGKLQDVVNQNAQALNTLVKQLSSNFGAISSVLNDILSRLDKVEAEVQIDRLITGRLQSLQTYVTQQLIRAAEIRASANLAATKMSECVLGQSKRFDFCGKGYHLMSFPQSAPHGVVFLHVTYVCAQEKNFTTAPAICHDGKAHFPREGVFVSNGTHWFVTQRNFYEPQIITTDNTFVSGNCDVVIGIVNNTVYDPLQPELDSGGGGSDIIKLLNEQVNKEMQSSNLYMSMSSWCYTHSLDGAGLFLFDHAAEEYEHAKKLIIFLNENNVPVQLTSISAPEHKFEGLTQIFQKAYEHEQHISESINNIVDHAIKSKDHATFNFLQWYVAEQHEEEVLFKDILDKIELIGNENHGLYLADQYVKGIAKSRKS

SEQ ID NO: 9155 - protein, 1315 aa, Artificial Sequence
  SARS-CoV-2/China/WF0028/2020__EPI_ISL_413791 spike protein (1-1147)(P715C_P1069C) Ferritin construct
MFVFLVLLPLVSSQCVNLTTRTQLPPAYTNSFTRGVYYPDKVFRSSVLHSTQDLFLPFFSNVTWFHAIHVSGTNGTKRFDNPVLPFNDGVYFASTEKSNIIRGWIFGTTLDSKTQSLLIVNNATNVVIKVCEFQFCNDPFLGVYYHKNNKSWMESEFRVYSSANNCTFEYVSQPFLMDLEGKQGNFKNLREFVFKNIDGYFKIYSKHTPINLVRDLPQGFSALEPLVDLPIGINITRFQTLLALHRSYLTPGDSSSGWTAGAAAYYVGYLQPRTFLLKYNENGTITDAVDCALDPLSETKCTLKSFTVEKGIYQTSNFRVQPTESIVRFPNITNLCPFGEVFNATRFASVYAWNRKRISNCVADYSVLYNSASFSTFKCYGVSPTKLNDLCFTNVYADSFVIRGDEVRQIAPGQTGKIADYNYKLPDDFTGCVIAWNSNNLDSKVGGNYNYLYRLFRKSNLKPFERDISTEIYQAGSTPCNGVEGFNCYFPLQSYGFQPTNGVGYQPYRVVVLSFELLHAPATVCGPKKSTNLVKNKCVNFNFNGLTGTGVLTESNKKFLPFQQFGRDIADTTDAVRDPQTLEILDITPCSFGGVSVITPGTNTSNQVAVLYQDVNCTEVPVAIHADQLTPTWRVYSTGSNVFQTRAGCLIGAEHVNNSYECDIPIGAGICASYQTQTNSPRRARSVASQSIIAYTMSLGAENSVAYSNNSIAICTNFTISVTTEILPVSMTKTSVDCTMYICGDSTECSNLLLQYGSFCTQLNRALTGIAVEQDKNTQEVFAQVKQIYKTPPIKDFGGFNFSQILPDPSKPSKRSFIEDLLFNKVTLADAGFIKQYGDCLGDIAARDLICAQKFNGLTVLPPLLTDEMIAQYTSALLAGTITSGWTFGAGAALQIPFAMQMAYRFNGIGVTQNVLYENQKLIANQFNSAIGKIQDSLSSTASALGKLQDVVNQNAQALNTLVKQLSSNFGAISSVLNDILSRLDKVEAEVQIDRLITGRLQSLQTYVTQQLIRAAEIRASANLAATKMSECVLGQSKRVDFCGKGYHLMSFPQSAPHGVVFLHVTYVCAQEKNFTTAPAICHDGKAHFPREGVFVSNGTHWFVTQRNFYEPQIITTDNTFVSGNCDVVIGIVNNTVYDPLQPELESGGGGSDIIKLLNEQVNKEMQSSNLYMSMSSWCYTHSLDGAGLFLFDHAAEEYEHAKKLIIFLNENNVPVQLTSISAPEHKFEGLTQIFQKAYEHEQHISESINNIVDHAIKSKDHATFNFLQWYVAEQHEEEVLFKDILDKIELIGNENHGLYLADQYVKGIAKSRKS

SEQ ID NO: 9156 - protein, 1315 aa, Artificial Sequence
  SARS-CoV-2/2019-nCoV/USA-CruiseA-18/2020__MT159716.1 spike protein (1-1147)(P715C_P1069C) Ferritin construct
MFVFLVLLPLVSSQCVNLTTRTQLPPAYTNSFTRGVYYPDKVFRSSVLHSTQDLFLPFFSNVTWFHAIHVSGTNGTKRFDNPVLPFNDGVYFASTEKSNIIRGWIFGTTLDSKTQSLLIVNNATNVVIKVCEFQFCNDPFLGVYYHKNNKSWMESELRVYSSANNCTFEYVSQPFLMDLEGKQGNFKNLREFVFKNIDGYFKIYSKHTPINLVRDLPQGFSALEPLVDLPIGINITRFQTLLALHRSYLTPGDSSSGWTAGAAAYYVGYLQPRTFLLKYNENGTITDAVDCALDPLSETKCTLKSFTVEKGIYQTSNFRVQPTESIVRFPNITNLCPFGEVFNATRFASVYAWNRKRISNCVADYSVLYNSASFSTFKCYGVSPTKLNDLCFTNVYADSFVIRGDEVRQIAPGQTGKIADYNYKLPDDFTGCVIAWNSNNLDSKVGGNYNYLYRLFRKSNLKPFERDISTEIYQAGSTPCNGVEGFNCYFPLQSYGFQPTNGVGYQPYRVVVLSFELLHAPATVCGPKKSTNLVKNKCVNFNFNGLTGTGVLTESNKKFLPFQQFGRDIADTTDAVRDPQTLEILDITPCSFGGVSVITPGTNTSNQVAVLYQDVNCTEVPVAIHADQLTPTWRVYSTGSNVFQTRAGCLIGAEHVNNSYECDIPIGAGICASYQTQTNSPRRARSVASQSIIAYTMSLGAENSVAYSNNSIAICTNFTISVTTEILPVSMTKTSVDCTMYICGDSTECSNLLLQYGSFCTQLNRALTGIAVEQDKNTQEVFAQVKQIYKTPPIKDFGGFNFSQILPDPSKPSKRSFIEDLLFNKVTLADAGFIKQYGDCLGDIAARDLICAQKFNGLTVLPPLLTDEMIAQYTSALLAGTITSGWTFGAGAALQIPFAMQMAYRFNGIGVTQNVLYENQKLIANQFNSAIGKIQDSLSSTASALGKLQDVVNQNAQALNTLVKQLSSNFGAISSVLNDILSRLDKVEAEVQIDRLITGRLQSLQTYVTQQLIRAAEIRASANLAATKMSECVLGQSKRVDFCGKGYHLMSFPQSAPHGVVFLHVTYVCAQEKNFTTAPAICHDGKAHFPREGVFVSNGTHWFVTQRNFYEPQIITTDNTFVSGNCDVVIGIVNNTVYDPLQPELDSGGGGSDIIKLLNEQVNKEMQSSNLYMSMSSWCYTHSLDGAGLFLFDHAAEEYEHAKKLIIFLNENNVPVQLTSISAPEHKFEGLTQIFQKAYEHEQHISESINNIVDHAIKSKDHATFNFLQWYVAEQHEEEVLFKDILDKIELIGNENHGLYLADQYVKGIAKSRKS

SEQ ID NO: 9157 - protein, 1315 aa, Artificial Sequence
  SARS-CoV-2/SARS-CoV-2/Yunnan-01/human/2020/CHN__MT049951.1 spike protein (1-1147)(P715C_P1069C) Ferritin construct
MFVFLVLLPLVSSQCVNLTTRTQLPPANTNSFTRGVYYPDKVFRSSVLHSTQDLFLPFFSNVTWFHAIHVSGTNGTKRFDNPVLPFNDGVYFASTEKSNIIRGWIFGTTLDSKTQSLLIVNNATNVVIKVCEFQFCNDPFLGVYYHKNNKSWMESEFRVYSSANNCTFEYVSQPFLMDLEGKQGNFKNLREFVFKNIDGYFKIYSKHTPINLVRDLPQGFSALEPLVDLPIGINITRFQTLLALHRSYLTPGDSSSGWTAGAAAYYVGYLQPRTFLLKYNENGTITDAVDCALDPLSETKCTLKSFTVEKGIYQTSNFRVQPTESIVRFPNITNLCPFGEVFNATRFASVYAWNRKRISNCVADYSVLYNSASFSTFKCYGVSPTKLNDLCFTNVYADSFVIRGDEVRQIAPGQTGKIADYNYKLPDDFTGCVIAWNSNNLDSKVGGNYNYLYRLFRKSNLKPFERDISTEIYQAGSTPCNGVEGFNCYFPLQSYGFQPTNGVGYQPYRVVVLSFELLHAPATVCGPKKSTNLVKNKCVNFNFNGLTGTGVLTESNKKFLPFQQFGRDIADTTDAVRDPQTLEILDITPCSFGGVSVITPGTNTSNQVAVLYQDVNCTEVPVAIHADQLTPTWRVYSTGSNVFQTRAGCLIGAEHVNNSYECDIPIGAGICASYQTQTNSPRRARSVASQSIIAYTMSLGAENSVAYSNNSIAICTNFTISVTTEILPVSMTKTSVDCTMYICGDSTECSNLLLQYGSFCTQLNRALTGIAVEQDKNTQEVFAQVKQIYKTPPIKDFGGFNFSQILPDPSKPSKRSFIEDLLFNKVTLADAGFIKQYGDCLGDIAARDLICAQKFNGLTVLPPLLTDEMIAQYTSALLAGTITSGWTFGAGAALQIPFAMQMAYRFNGIGVTQNVLYENQKLIANQFNSAIGKIQDSLSSTASALGKLQDVVNQNAQALNTLVKQLSSNFGAISSVLNDILSRLDKVEAEVQIDRLITGRLQSLQTYVTQQLIRAAEIRASANLAATKMSECVLGQSKRVDFCGKGYHLMSFPQSAPHGVVFLHVTYVCAQEKNFTTAPAICHDGKAHFPREGVFVSNGTHWFVTQRNFYEPQIITTDNTFVSGNCDVVIGIVNNTVYDPLQPELDSGGGGSDIIKLLNEQVNKEMQSSNLYMSMSSWCYTHSLDGAGLFLFDHAAEEYEHAKKLIIFLNENNVPVQLTSISAPEHKFEGLTQIFQKAYEHEQHISESINNIVDHAIKSKDHATFNFLQWYVAEQHEEEVLFKDILDKIELIGNENHGLYLADQYVKGIAKSRKS

SEQ ID NO: 9158 - protein, 1315 aa, Artificial Sequence
  SARS-CoV-2/USA/WA-UW292/2020__EPI_ISL_418077 spike protein (1-1147)(P715C_P1069C) Ferritin construct
MFVFLVLLPLVSSQCVNLTTRTQLPPAYTNSFTRGVYYPDKVFRSSVLHSTQDLFLPFFSNVTWFHAIHVSGTNGTKRFDNPVLPFNDGVYFASTEKSNIIRGWIFGTTLDSKTQSLLIVNNATNVVIKVCEFQFCNDPFLGVYYHKNNKSWMESEFRVYSSANNCTFEYVSQPFLMDLEGKQGNFKNLREFVFKNIDGYFKIYSKHTPINLVRDLPQGFSALEPLVDLPIGINITRFQTLLALHRSYLTPGDSSSGWTAGAAAYYVGYLQPRTFLLKYNENGTITDAVDCALDPLSETKCTLKSFTVEKGIYQTSNFRVQPTESIVRFPNITNLCPFGEVFNATRFASVYAWNRKRISNCVADYSVLYNSASFSTFKCYGVSPTKLNDLCFTNVYADSFVIRGDEVRQIAPGQTGKIADYNYKLPDDFTGCVIAWNSNNLDSKVGGNYNYLYRLFRKSNLKPFERDISTEIYQASSTPCNGVEGFNCYFPLQSYGFQPTNGVGYQPYRVVVLSFELLHAPATVCGPKKSTNLVKNKCVNFNFNGLTGTGVLTESNKKFLPFQQFGRDIADTTDAVRDPQTLEILDITPCSFGGVSVITPGTNTSNQVAVLYQDVNCTEVPVAIHADQLTPTWRVYSTGSNVFQTRAGCLIGAEHVNNSYECDIPIGAGICASYQTQTNSPRRARSVASQSIIAYTMSLGAENSVAYSNNSIAICTNFTISVTTEILPVSMTKTSVDCTMYICGDSTECSNLLLQYGSFCTQLNRALTGIAVEQDKNTQEVFAQVKQIYKTPPIKDFGGFNFSQILPDPSKPSKRSFIEDLLFNKVTLADAGFIKQYGDCLGDIAARDLICAQKFNGLTVLPPLLTDEMIAQYTSALLAGTITSGWTFGAGAALQIPFAMQMAYRFNGIGVTQNVLYENQKLIANQFNSAIGKIQDSLSSTASALGKLQDVVNQNAQALNTLVKQLSSNFGAISSVLNDILSRLDKVEAEVQIDRLITGRLQSLQTYVTQQLIRAAEIRASANLAATKMSECVLGQSKRVDFCGKGYHLMSFPQSAPHGVVFLHVTYVCAQEKNFTTAPAICHDGKAHFPREGVFVSNGTHWFVTQRNFYEPQIITTDNTFVSGNCDVVIGIVNNTVYDPLQPELDSGGGGSDIIKLLNEQVNKEMQSSNLYMSMSSWCYTHSLDGAGLFLFDHAAEEYEHAKKLIIFLNENNVPVQLTSISAPEHKFEGLTQIFQKAYEHEQHISESINNIVDHAIKSKDHATFNFLQWYVAEQHEEEVLFKDILDKIELIGNENHGLYLADQYVKGIAKSRKS

SEQ ID NO: 9159 - protein, 1315 aa, Artificial Sequence
  SARS-CoV-2/Iceland/192/2020__EPI_ISL_417819 spike protein (1-1147)(P715C_P1069C) Ferritin construct
MFVFFVLLPLVSSQCVNLTTRTQLPPAYTNSFTRGVYYPDKVFRSSVLHSTQDLFLPFFSNVTWFHAIHVSGTNGTKRFDNPVLPFNDGVYFASTEKSNIIRGWIFGTTLDSKTQSLLIVNNATNVVIKVCEFQFCNDPFLGVYYHKNNKSWMESEFRVYSSANNCTFEYVSQPFLMDLEGKQGNFKNLREFVFKNIDGYFKIYSKHTPINLVRDLPQGFSALEPLVDLPIGINITRFQTLLALHRSYLTPGDSSSGWTAGAAAYYVGYLQPRTFLLKYNENGTITDAVDCALDPLSETKCTLKSFTVEKGIYQTSNFRVQPTESIVRFPNITNLCPFGEVFNATRFASVYAWNRKRISNCVADYSVLYNSASFSTFKCYGVSPTKLNDLCFTNVYADSFVIRGDEVRQIAPGQTGKIADYNYKLPDDFTGCVIAWNSNNLDSKVGGNYNYLYRLFRKSNLKPFERDISTEIYQAGSTPCNGVEGFNCYFPLQSYGFQPTNGVGYQPYRVVVLSFELLHAPATVCGPKKSTNLVKNKCVNFNFNGLTGTGVLTESNKKFLPFQQFGRDIADTTDAVRDPQTLEILDITPCSFGGVSVITPGTNTSNQVAVLYQGVNCTEVPVAIHADQLTPTWRVYSTGSNVFQTRAGCLIGAEHVNNSYECDIPIGAGICASYQTQTNSPRRARSVASQSIIAYTMSLGAENSVAYSNNSIAICTNFTISVTTEILPVSMTKTSVDCTMYICGDSTECSNLLLQYGSFCTQLNRALTGIAVEQDKNTQEVFAQVKQIYKTPPIKDFGGFNFSQILPDPSKPSKRSFIEDLLFNKVTLADAGFIKQYGDCLGDIAARDLICAQKFNGLTVLPPLLTDEMIAQYTSALLAGTITSGWTFGAGAALQIPFAMQMAYRFNGIGVTQNVLYENQKLIANQFNSAIGKIQDSLSSTASALGKLQDVVNQNAQALNTLVKQLSSNFGAISSVLNDILSRLDKVEAEVQIDRLITGRLQSLQTYVTQQLIRAAEIRASANLAATKMSECVLGQSKRVDFCGKGYHLMSFPQSAPHGVVFLHVTYVCAQEKNFTTAPAICHDGKAHFPREGVFVSNGTHWFVTQRNFYEPQIITTDNTFVSGNCDVVIGIVNNTVYDPLQPELDSGGGGSDIIKLLNEQVNKEMQSSNLYMSMSSWCYTHSLDGAGLFLFDHAAEEYEHAKKLIIFLNENNVPVQLTSISAPEHKFEGLTQIFQKAYEHEQHISESINNIVDHAIKSKDHATFNFLQWYVAEQHEEEVLFKDILDKIELIGNENHGLYLADQYVKGIAKSRKS

SEQ ID NO: 9160 - protein, 1315 aa, Artificial Sequence
  SARS-CoV-2/Belgium/ULG-6939/2020__EPI_ISL_417020 spike protein (1-1147)(P715C_P1069C) Ferritin construct
MFVFLVLLPLVSSQCVNLTTRTQLPPAYTNSFTRGVYYPDKVFRSSVLHSTQDLFLPFFSNVTWFHAIHVSGTNGTKRFDNPVLPFNDGVYFASTEKSNIIRGWIFGTTLDSKTQSLLIVNNATNVVIKVCEFQFCNDPFLGVYYHKNNKSWMESEFRVYSSANNCTFEYVSQPFLMDLEGKQGNFKNLREFVFKNIDGYFKIYSKHTPINLVRDLPQGFSALEPLVDLPIGINITRFQTLLALHRSYLTPGDSSSGWTAGAAAYYVGYLQPRTFLLKYNENGTITDAVDCALDPLSETKCTLKSFTVEKGIYQTSNFRVQPTESIVRFPNITNLCPFGEVFNATRFASVYAWNRKRISNCVADYSVLYNSASFSTFKCYGVSPTKLNDLCFTNVYADSFVIRGDEVRQIAPGQTGKIADYNYKLPDDFTGCVIAWNSNNLDSKVGGNYNYLYRLFRKSNLKPFERDISTEIYQAGSTPCNGVEGFNCYFPLQSYGFQPTNGVGYQPYRVVVLSFELLHAPATVCGPKKSTNLVKNKCVNFNFNGLTGTGVLTESNKKFLPFQQFGRDIADTTDAVRDPQTLEILDITPCSFGGVSVITPGTNTSNQVAVLYQGVNCTEVPVAIHADQLTPTWRVYSTGSNVFQTRAGCLIGAEHVNNSYECDIPIGAGICASYQTQTNSPRRARSVASQSIIAYTMSLGAENSVVYSNNSIAICTNFTISVTTEILPVSMTKTSVDCTMYICGDSTECSNLLLQYGSFCTQLNRALTGIAVEQDKNTQEVFAQVKQIYKTPPIKDFGGFNFSQILPDPSKPSKRSFIEDLLFNKVTLADAGFIKQYGDCLGDIAARDLICAQKFNGLTVLPPLLTDEMIAQYTSALLAGTITSGWTFGAGAALQIPFAMQMAYRFNGIGVTQNVLYENQKLIANQFNSAIGKIQDSLSSTASALGKLQDVVNQNAQALNTLVKQLSSNFGAISSVLNDILSRLDKVEAEVQIDRLITGRLQSLQTYVTQQLIRAAEIRASANLAATKMSECVLGQSKRVDFCGKGYHLMSFPQSAPHGVVFLHVTYVCAQEKNFTTAPAICHDGKAHFPREGVFVSNGTHWFVTQRNFYEPQIITTDNTFVSGNCDVVIGIVNNTVYDPLQPELDSGGGGSDIIKLLNEQVNKEMQSSNLYMSMSSWCYTHSLDGAGLFLFDHAAEEYEHAKKLIIFLNENNVPVQLTSISAPEHKFEGLTQIFQKAYEHEQHISESINNIVDHAIKSKDHATFNFLQWYVAEQHEEEVLFKDILDKIELIGNENHGLYLADQYVKGIAKSRKS

SEQ ID NO: 9161 - protein, 1315 aa, Artificial Sequence
  SARS-CoV-2/France/HF2496/2020__EPI_ISL_418231 spike protein (1-1147)(P715C_P1069C) Ferritin construct
MFVFLVLLPLVSSQCVNLTTRTQLPPAYTNSFTRGVYYPDKVFRSSVLHSTQDLFLPFFSNVTWFHAIHVSGTNGTKRFDNPVLPFNDGVYFASTEKSNIIRGWIFGTTLDSKTQSLLIVNNATNVVIKVCEFQFCNDPFLGVYYHKNNKSWMESEFRVYSSANNCTFEYVSQPFLMDLEGKQGNFKNLREFVFKNIDGYFKIYSKHTPINLVRDLPQGFSALEPLVDLPIGINITRFQTLLALHRSYLTPGDSSSGWTAGAAAYYVGYLQPRTFLLKYNENGTITDAVDCALDPLSETKCTLKSFTVEKGIYQTSNFRVQPTESIVRFPNITNLCPFGEVFNATRFASVYAWNRKRISNCVADYSVLYNSASFSTFKCYGVSPTKLNDLCFTNVYADSFVIRGDEVRQIAPGQTGKIADYNYKLPDDFTGCVIAWNSNNLDSKVGGNYNYLYRLFRKSNLKPFERDISTEIYQAGSTPCNGVEGFNCYFPLQSYGFQPTNGVGYQPYRVVVLSFELLHAPATVCGPKKSTNLVKNKCVNFNFNGLTGTGVLTESNKKFLPFQQFGRDIADTTDAVRDPQTLEILDITPCSFGGVSVITPGTNTSNQVAVLYQGVNCTEVPVAIHADQLTPTWRVYSTGSNVFQTRAGCLIGAEHVNNSYECDIPIGAGICASYQTQTNSPRRARSVASQSIIAYTMSLGAENSVAYSNNSIAICTNFTISVTTEILPVSMTKTSVDCTMYICGDSTECSNLLLQYGSFCTQLNRALTGIAVEQDKNTQEVFAQVKQIYKTPPIKDFGGFNFSQILPDPSKPSKRSFIEDLLFNKVTLADAGFIKQYGDCLGDIVARDLICAQKFNGLTVLPPLLTDEMIAQYTSALLAGTITSGWTFGAGAALQIPFAMQMAYRFNGIGVTQNVLYENQKLIANQFNSAIGKIQDSLSSTASALGKLQDVVNQNAQALNTLVKQLSSNFGAISSVLNDILSRLDKVEAEVQIDRLITGRLQSLQTYVTQQLIRAAEIRASANLAATKMSECVLGQSKRVDFCGKGYHLMSFPQSAPHGVVFLHVTYVCAQEKNFTTAPAICHDGKAHFPREGVFVSNGTHWFVTQRNFYEPQIITTDNTFVSGNCDVVIGIVNNTVYDPLQPELDSGGGGSDIIKLLNEQVNKEMQSSNLYMSMSSWCYTHSLDGAGLFLFDHAAEEYEHAKKLIIFLNENNVPVQLTSISAPEHKFEGLTQIFQKAYEHEQHISESINNIVDHAIKSKDHATFNFLQWYVAEQHEEEVLFKDILDKIELIGNENHGLYLADQYVKGIAKSRKS

SEQ ID NO: 9162 - protein, 1315 aa, Artificial Sequence
  SARS-CoV-2/USA/WA-UW291/2020__EPI_ISL_418076 spike protein (1-1147)(P715C_P1069C) Ferritin construct
MFVFLVLLPLVSSQCVNLTTRTQLPPAYTNSFTRGVYYPDKVFRSSVLHSTQDLFLPFFSNVTWFHAIHVSGTNGTKRFDNPVLPFNDGVYFASTEKSNIIRGWIFGTTLDSKTQSLLIVNNATNVVIKVCEFQFCNDPFLGVYYHKNNKSWMESEFRVYSSANNCTFEYVSQPFLMDLEGKQGNFKNLREFVFKNIDGYFKIYSKHTPINLVRDLPQGFSALEPLVDLPIGINITRFQTLLALHRSYLTPGDSSSGWTAGAAAYYVGYLQPRTFLLKYNENGTITDAVDCALDPLSETKCTLKSFTVEKGIYQTSNFRVQPTESIVRFPNITNLCPFGEVFNATRFASVYAWNRKRISNCVADYSVLYNSASFSTFKCYGVSPTKLNDLCFTNVYADSFVIRGDEVRQIAPGQTGKIADYNYKLPDDFTGCVIAWNSNNLDSKVGGNYNYLYRLFRKSNLKPFERDISTEIYQAGSTPCNGVEGFNCYFPLQSYGFQPTNGVGYQPYRVVVLSFELLHAPATVCGPKKSTNLVKNKCVNFNFNGLTGTGVLTESNKKFLPFQQFGRDIADTTDAVRDPQTLEILDITPCSFGGVSVITPGTNTSNQVAVLYQGVNCTEVPVAIHADQLTPTWRVYSTGSNVFQTRAGCLIGAEHVNNSYECDIPIGAGICASYQTQTNSPRRARSVASQSIIAYTMSLGAENSVAYSNNSIAICTNFTISVTTEILPVSMTKTSVDCTMYICGDSTECSNLLLQYGSFCTQLNRALTGIAVEQDKNTQEVFAQVKQIYKTPPIKDFGGFNFSQILPDPSKPSKRSFIEDLLFNKVTLADAGFIKQYGDCLGDIAARDLICAQKFNGLTVLPPLLTDEMIAQYTSALLAGTITSGWTFGAGAALQIPFAMQMAYRFNGIGVTQNVLYENQKLIANQFNSAIGKIQYSLSSTASALGKLQDVVNQNAQALNTLVKQLSSNFGAISSVLNDILSRLDKVEAEVQIDRLITGRLQSLQTYVTQQLIRAAEIRASANLAATKMSECVLGQSKRVDFCGKGYHLMSFPQSAPHGVVFLHVTYVCAQEKNFTTAPAICHDGKAHFPREGVFVSNGTHWFVTQRNFYEPQIITTDNTFVSGNCDVVIGIVNNTVYDPLQPELDSGGGGSDIIKLLNEQVNKEMQSSNLYMSMSSWCYTHSLDGAGLFLFDHAAEEYEHAKKLIIFLNENNVPVQLTSISAPEHKFEGLTQIFQKAYEHEQHISESINNIVDHAIKSKDHATFNFLQWYVAEQHEEEVLFKDILDKIELIGNENHGLYLADQYVKGIAKSRKS

SEQ ID NO: 9163 - protein, 1315 aa, Artificial Sequence; identical to SEQ ID NO: 9126
  SARS-CoV-2/Portugal/PT0034/2020__EPI_ISL_418019 spike protein (1-1147)(P715C_P1069C) Ferritin construct

SEQ ID NO: 9164 - protein, 1315 aa, Artificial Sequence; identical to SEQ ID NO: 9118
  SARS-CoV-2/Iceland/202/2020__EPI_ISL_417750 spike protein (1-1147)(P715C_P1069C) Ferritin construct

SEQ ID NO: 9165 - protein, 1315 aa, Artificial Sequence
  SARS-CoV-2/USA/WA-UW261/2020__EPI_ISL_418046 spike protein (1-1147)(P715C_P1069C) Ferritin construct
MFVFLVLLPLVSSQCVNLTTRTQLPPAYTNSFTRGVYYPDKVFRSSVLHSTQDLFLPFFSNVTWFHAIHVSGTNGTKRFDNPVLPFNDGVYFASTEKSNIIRGWIFGTTLDSKTQSLLIVNNATNVVIKVCEFQFCNDPFLGVYYHKNNKSWMESEFRVYSSANNCTFEYVSQPFLMDLEGKQGNFKNLREFVFKNIDGYFKIYSKHTPINLVRDLPQGFSALEPLVDLPIGINITRFQTLLALHRSYLTPGDSSSGWTAGAAAYYVGYLQPRTFLLKYNENGTITDAVDCALDPLSETKCTLKSFTVEKGIYQTSNFRVQPTESIVRFPNITNLCPFGEVFNATRFTSVYAWNRKRISNCVADYSVLYNSASFSTFKCYGVSPTKLNDLCFTNVYADSFVIRGDEVRQIAPGQTGKIADYNYKLPDDFTGCVIAWNSNNLDSKVGGNYNYLYRLFRKSNLKPFERDISTEIYQAGSTPCNGVEGFNCYFPLQSYGFQPTNGVGYQPYRVVVLSFELLHAPATVCGPKKSTNLVKNKCVNFNFNGLTGTGVLTESNKKFLPFQQFGRDIADTTDAVRDPQTLEILDITPCSFGGVSVITPGTNTSNQVAVLYQDVNCTEVPVAIHADQLTPTWRVYSTGSNVFQTRAGCLIGAEHVNNSYECDIPIGAGICASYQTQTNSPRRARSVASQSIIAYTMSLGAENSVAYSNNSIAICTNFTISVTTEILPVSMTKTSVDCTMYICGDSTECSNLLLQYGSFCTQLNRALTGIAVEQDKNTQEVFAQVKQIYKTPPIKDFGGFNFSQILPDPSKPSKRSFIEDLLFNKVTLADAGFIKQYGDCLGDIAARDLICAQKFNGLTVLPPLLTDEMIAQYTSALLAGTITSGWTFGAGAALQIPFAMQMAYRFNGIGVTQNVLYENQKLIANQFNSAIGKIQDSLSSTASALGKLQDVVNQNAQALNTLVKQLSSNFGAISSVLNDILSRLDKVEAEVQIDRLITGRLQSLQTYVTQQLIRAAEIRASANLAATKMSECVLGQSKRVDFCGKGYHLMSFPQSAPHGVVFLHVTYVCAQEKNFTTAPAICHDGKAHFPREGVFVSNGTHWFVTQRNFYEPQIITTDNTFVSGNCDVVIGIVNNTVYDPLQPELDSGGGGSDIIKLLNEQVNKEMQSSNLYMSMSSWCYTHSLDGAGLFLFDHAAEEYEHAKKLIIFLNENNVPVQLTSISAPEHKFEGLTQIFQKAYEHEQHISESINNIVDHAIKSKDHATFNFLQWYVAEQHEEEVLFKDILDKIELIGNENHGLYLADQYVKGIAKSRKS

SEQ ID NO: 9166 - protein, 1315 aa, Artificial Sequence
  SARS-CoV-2/Portugal/PT0035/2020__EPI_ISL_418020 spike protein (1-1147)(P715C_P1069C) Ferritin construct
MFVFLVLLPLVSSQCVNLTTRTQLPPAYTNSFTRGVYYPDKVFRSSVLHSTQDLFLPFFSNVTWFHAIHVSGTNGTKRFDNPVLPFNDGVYFASTEKSNIIRGWIFGTTLDSKTQSLLIVNNATNVVIKVCEFQFCNDPFLGVYYHKNNKSWMESEFRVYSSANNCTFEYVSQPFLMDLEGKQGNFKNLREFVFKNIDGYFKIYSKHTPINLVRDLPQGFSALEPLVDLPIGINITRFQTLLALHRSYLTPGDSSSGWTAGAAAYYVGYLQPRTFLLKYNENGTITDAVDCALDPLSETKCTLKSFTVEKGIYQTSNFRVQPTESIVRFPNITNLCPFGEVFNATRFASVYAWNRKRISNCVADYSVLYNSASFSTFKCYGVSPTKLNDLCFTNVYADSFVIRGDEVRQIAPGQTGKIADYNYKLPDDFTGCVIAWNSNNLDSKVGGNYNYLYRLFRKSNLKPFERDISTEIYQAGSTPCNGVEGFNCYFPLQSYGFQPTNGVGYQPYRVVVLSFELLHAPATVCGPKKSTNLVKNKCVNFNFNGLTGTGVLTESNKKFLPFQQFGRDIADTTDAVRDPQTLEILDITPCSFGGVSVITPGTNTSNQVAVLYQDVNCTEVPVAIHADQLTPTWRVYSTGSNVFQTRAGCLIGAEHVNNSYECDIPIGAGICASYQTQTNSPRRARSVASQSIIAYTMSLGAENSVAYSNNSIAICTNFTISVTTEILPVSMTKTSVDCTMYICGDSTECSNLLLQYGSFCTQLNRALTGIAVEQDKNTQEVFAQVKQIYKTPPIKDFGGFNFSQILPDPSKPSKRSFIEDLLFNKVTLADAGFIKQYGDCLGDISARDLICAQKFNGLTVLPPLLTDEMIAQYTSALLAGTITSGWTFGAGAALQIPFAMQMAYRFNGIGVTQNVLYENQKLIANQFNSAIGKIQDSLSSTASALGKLQDVVNQNAQALNTLVKQLSSNFGAISSVLNDILSRLDKVEAEVQIDRLITGRLQSLQTYVTQQLIRAAEIRASANLAATKMSECVLGQSKRVDFCGKGYHLMSFPQSAPHGVVFLHVTYVCAQEKNFTTAPAICHDGKAHFPREGVFVSNGTHWFVTQRNFYEPQIITTDNTFVSGNCDVVIGIVNNTVYDPLQPELDSGGGGSDIIKLLNEQVNKEMQSSNLYMSMSSWCYTHSLDGAGLFLFDHAAEEYEHAKKLIIFLNENNVPVQLTSISAPEHKFEGLTQIFQKAYEHEQHISESINNIVDHAIKSKDHATFNFLQWYVAEQHEEEVLFKDILDKIELIGNENHGLYLADQYVKGIAKSRKS

SEQ ID NO: 9167 - protein, 1315 aa, Artificial Sequence
  SARS-CoV-2/USA/NY-NYUMC7/2020__EPI_ISL_418192 spike protein (1-1147)(P715C_P1069C) Ferritin construct
MFVFLVLLPLVSSQCVNLTTRTQLPPAYTNSFTRGVYYPDKVFRSSVLHSTQDLFLPFFSNVTWFHAIHVSGTNGTKRFDNPVLPFNDGVYFASTEKSNIIRGWIFGTTLDSKTQSLLIVNNATNVVIKVCEFQFCNDPFLGVYHHKNNKSWMESEFRVYSSANNCTFEYVSQPFLMDLEGKQGNFKNLREFVFKNIDGYFKIYSKHTPINLVRDLPQGFSALEPLVDLPIGINITRFQTLLALHRSYLTPGDSSSGWTAGAAAYYVGYLQPRTFLLKYNENGTITDAVDCALDPLSETKCTLKSFTVEKGIYQTSNFRVQPTESIVRFPNITNLCPFGEVFNATRFASVYAWNRKRISNCVADYSVLYNSASFSTFKCYGVSPTKLNDLCFTNVYADSFVIRGDEVRQIAPGQTGKIADYNYKLPDDFTGCVIAWNSNNLDSKVGGNYNYLYRLFRKSNLKPFERDISTEIYQAGSTPCNGVEGFNCYFPLQSYGFQPTNGVGYQPYRVVVLSFELLHAPATVCGPKKSTNLVKNKCVNFNFNGLTGTGVLTESNKKFLPFQQFGRDIADTTDAVRDPQTLEILDITPCSFGGVSVITPGTNTSNQVAVLYQGVNCTEVPVAIHADQLTPTWRVYSTGSNVFQTRAGCLIGAEHVNNSYECDIPIGAGICASYQTQTNSPRRARSVASQSIIAYTMSLGAENSVAYSNNSIAICTNFTISVTTEILPVSMTKTSVDCTMYICGDSTECSNLLLQYGSFCTQLNRALTGIAVEQDKNTQEVFAQVKQIYKTPPIKDFGGFNFSQILPDPSKPSKRSFIEDLLFNKVTLADAGFIKQYGDCLGDIAARDLICAQKFNGLTVLPPLLTDEMIAQYTSALLAGTITSGWTFGAGAALQIPFAMQMAYRFNGIGVTQNVLYENQKLIANQFNSAIGKIQDSLSSTASALGKLQDVVNQNAQALNTLVKQLSSNFGAISSVLNDILSRLDKVEAEVQIDRLITGRLQSLQTYVTQQLIRAAEIRASANLAATKMSECVLGQSKRVDFCGKGYHLMSFPQSAPHGVVFLHVTYVCAQEKNFTTAPAICHDGKAHFPREGVFVSNGTHWFVTQRNFYEPQIITTDNTFVSGNCDVVIGIVNNTVYDPLQPELDSGGGGSDIIKLLNEQVNKEMQSSNLYMSMSSWCYTHSLDGAGLFLFDHAAEEYEHAKKLIIFLNENNVPVQLTSISAPEHKFEGLTQIFQKAYEHEQHISESINNIVDHAIKSKDHATFNFLQWYVAEQHEEEVLFKDILDKIELIGNENHGLYLADQYVKGIAKSRKS

SEQ ID NO: 9168 - protein, 1315 aa, Artificial Sequence
  SARS-CoV-2/Iceland/189/2020__EPI_ISL_417709 spike protein (1-1147)(P715C_P1069C) Ferritin construct
MFVFLVLLPLVSSQCVNLTTRTQLPPAYTNSFTRGVYYPDKVFRSSVLHSTQDLFLPFFSNVTWFHAIHVSGTNGTKRFDNPVLPFNDGVYFASTEKSNIIRGWIFGTTLDSKTQSLLIVNNATNVVIKVCEFQFCNDPFLGVYYHKNNKSWMESEFRVYSSANNCTFEYVSQPFLMDLEGKQGNFKNLREFVFKNIDGYFKIYSKHTPINLVRDLPQGFSALEPLVDLPIGINITRFQTLLALHRSYLTPGDSSSGWTAGAAAYYVGYLQPRTFLLKYNENGTITDAVDCALDPLSETKCTLKSFTVEKGIYQTSNFRVQPTESIVRFPNITNLCPFGEVFNATRFASVYAWNRKRISNCVADYSVLYNSASFSTFKCYGVSPTKLNDLCFTNVYADSFVIRGDEVRQIAPGQTGKIADYNYKLPDDFTGCVIAWNSNNLDSKVGGNYNYLYRLFRKSNLKPFERDISTEIYQAGSTPCNGVEGFNCYFPLQSYGFQPTNGVGYQPYRVVVLSFELLHAPATVCGPKKSTNLVKNKCVNFNFNGLTGTGVLTESNKKFLPFQQFGRDIADTTDAVRDPQTLEILDITPCSFGGVSVITPGTNTSNQVAVLYQGVNCTEVPVAIHADQLTPTWRVYSTGSNVFQTRAGCLIGAEHVNNSYECDIPIGAGICASYQTQTNSPRRARSVASQSIIAYTMSLGAENSVAYSNNSIAICTNFTISVTTEILPVSMTKTSVDCTMYICGDSTECSNLLLQYGSFCTQLNRALTGIAVEQDKNTQEVFAQVKQIYKTPPIKDFGGFNFSQILPDPSKPSKRSFIEDLLFNKVTLADAGFTKQYGDCLGDIAARDLICAQKFNGLTVLPPLLTDEMIAQYTSALLAGTITSGWTFGAGAALQIPFAMQMAYRFNGIGVTQNVLYENQKLIANQFNSAIGKIQDSLSSTASALGKLQDVVNQNAQALNTLVKQLSSNFGAISSVLNDILSRLDKVEAEVQIDRLITGRLQSLQTYVTQQLIRAAEIRASANLAATKMSECVLGQSKRVDFCGKGYHLMSFPQSAPHGVVFLHVTYVCAQEKNFTTAPAICHDGKAHFPREGVFVSNGTHWFVTQRNFYEPQIITTDNTFVSGNCDVVIGIVNNTVYDPLQPELDSGGGGSDIIKLLNEQVNKEMQSSNLYMSMSSWCYTHSLDGAGLFLFDHAAEEYEHAKKLIIFLNENNVPVQLTSISAPEHKFEGLTQIFQKAYEHEQHISESINNIVDHAIKSKDHATFNFLQWYVAEQHEEEVLFKDILDKIELIGNENHGLYLADQYVKGIAKSRKS

SEQ ID NO: 9169 - protein, 1315 aa, Artificial Sequence
  SARS-CoV-2/Australia/NSW56/2020__EPI_ISL_417408 spike protein (1-1147)(P715C_P1069C) Ferritin construct
MFVFLVLLPLVSSQCVNLTTRTQLPPAYTNSFTRGVYYPDKVFRSSVLHSTQDLFLPFFSNVTWFHAIHVSGTNGTKRFDNPVLPFNDGVYFASTEKSNIIRGWIFGTTLDSKTQSLLIVNNATNVVIKVCEFQFCNDPFLGVYYHKNNKSWMESEFRVYSSANNCTFEYVSQPFLMDLEGKQGNFKNLREFVFKNIDGYFKIYSKHTPINLVRDLPQGFSALEPLVDLPIGINITRFQTLLALHRSYLTPGDSSSGWTAGAAAYYVGYLQPRTFLLKYNENGTITDAVDCALDPLSETKCTLKSFTVEKGIYQTSNFRVQPTESIVRFPNITNLCPFGEVFNATRFASVYAWNRKRISNCVADYSVLYNSASFSTFKCYGVSPTKLNDLCFTNVYADSFVIRGDEVRQIAPGQTGKIADYNYKLPDDFTGCVIAWNSNNLDSKVGGNYNYLYRLFRKSNLKPFERDISTEIYQAGSTPCNGVEGFNCYFPLQSYGFQPTNGVGYQPYRVVVLSFELLHAPATVCGPKKSTNLVKNKCVNFNFNGLTGTGVLTESNKKFLPFQQFGRDIADTTDAVRDPQTLEILDITPCSFGGVSVITPGTNTSNQVAVLYQDVNCTEVPVAIHADQLTPTWRVYSTGSNVFQTRAGCLIGAEHVNNSYECDIPIGAGICASYQTQTNSPRRARSVASQSIIAYTMSLGAENSVAYSNNSIAICTNFTISVTTEILPVSMTKTSVDCTMYICGDSTECSNLLLQYGSFCTQLNRALTGIAVEQDKNTQEVFAQVKQIYKTPPIKDFGGFNFSQILPDSSKPSKRSFIEDLLFNKVTLADAGFIKQYGDCLGDIAARDLICAQKFNGLTVLPPLLTDEMIAQYTSALLAGTITSGWTFGAGAALQIPFAMQMAYRFNGIGVTQNVLYENQKLIANQFNSAIGKIQDSLSSTASALGKLQDVVNQNAQALNTLVKQLSSNFGAISSVLNDILSRLDKVEAEVQIDRLITGRLQSLQTYVTQQLIRAAEIRASANLAATKMSECVLGQSKRVDFCGKGYHLMSFPQSAPHGVVFLHVTYVCAQEKNFTTAPAICHDGKAHFPREGVFVSNGTHWFVTQRNFYEPQIITTDNTFVSGNCDVVIGIVNNTVYDPLQPELDSGGGGSDIIKLLNEQVNKEMQSSNLYMSMSSWCYTHSLDGAGLFLFDHAAEEYEHAKKLIIFLNENNVPVQLTSISAPEHKFEGLTQIFQKAYEHEQHISESINNIVDHAIKSKDHATFNFLQWYVAEQHEEEVLFKDILDKIELIGNENHGLYLADQYVKGIAKSRKS

SEQ ID NO: 9170 - protein, 1315 aa, Artificial Sequence
  SARS-CoV-2/Iceland/280/2020__EPI_ISL_417608 spike protein (1-1147)(P715C_P1069C) Ferritin construct
MFVFLVLLPLVSSQCVNLTTRTQLPPAYTNSFTRGVYYPDKVFRSSVLHSTQDLFLPFFSNVTWFHAIHVSGTNGTKRFDNPVLPFNDGVYFASTEKSNIIRGWIFGTTLDSKTQSLLIVNNATNVVIKVCEFQFCNDPFLGVYYHKNNKSWMESEFRVYSSANNCTFEYVSQPFLMDLEGKQGNFKNLREFVFKNIDGYFKIYSKHTPINLVRDLPQGFSALEPLVDLPIGINITRFQTLLALHRSYLTPGDSSSGWTAGAAAYYVGYLQPRTFLLKYNENGTITDAVDCALDPLSETKCTLKSFTVEKGIYQTSNFRVQPTESIVRFPNITNLCPFGEVFNATRFASVYAWNRKRISNCVADYSVLYNSASFSTFKCYGVSPTKLNDLCFTNVYADSFVIRGDEVRQIAPGQTGKIADYNYKLPDDFTGCVIAWNSNNLDSKVGGNYNYLYRLFRKSNLKPFERDISTEIYQAGSTPCNGVEGFNCYFPLQSYGFQPTNGVGYQPYRVVVLSFELLHAPATVCGPKKSTNLVKNKCVNFNFNGLTGTGVLTESNKKFLPFQQFGRDIADTTDAVRDPQTLEILDITPCSFGGVSVITPGTNTSNQVAVLYQGVNCTEVPVAIHADQLTPTWRVYSTGSNVFQTRAGCLIGAEHVNNSYECDIPIGAGICASYHTQTNSPRRARSVASQSIIAYTMSLGAENSVAYSNNSIAICTNFTISVTTEILPVSMTKTSVDCTMYICGDSTECSNLLLQYGSFCTQLNRALTGIAVEQDKNTQEVFAQVKQIYKTPPIKDFGGFNFSQILPDPSKPSKRSFIEDLLFNKVTLADAGFIKQYGDCLGDIAARDLICAQKFNGLTVLPPLLTDEMIAQYTSALLAGTITSGWTFGAGAALQIPFAMQMAYRFNGIGVTQNVLYENQKLIANQFNSAIGKIQDSLSSTASALGKLQDVVNQNAQALNTLVKQLSSNFGAISSVLNDILSRLDKVEAEVQIDRLITGRLQSLQTYVTQQLIRAAEIRASANLAATKMSECVLGQSKRVDFCGKGYHLMSFPQSAPHGVVFLHVTYVCAQEKNFTTAPAICHDGKAHFPREGVFVSNGTHWFVTQRNFYEPQIITTDNTFVSGNCDVVIGIVNNTVYDPLQPELDSGGGGSDIIKLLNEQVNKEMQSSNLYMSMSSWCYTHSLDGAGLFLFDHAAEEYEHAKKLIIFLNENNVPVQLTSISAPEHKFEGLTQIFQKAYEHEQHISESINNIVDHAIKSKDHATFNFLQWYVAEQHEEEVLFKDILDKIELIGNENHGLYLADQYVKGIAKSRKS

SEQ ID NO: 9171 - protein, 1315 aa, Artificial Sequence; identical to SEQ ID NO: 9126
  SARS-CoV-2/Iceland/247/2020__EPI_ISL_417575 spike protein (1-1147)(P715C_P1069C) Ferritin construct

SEQ ID NO: 9172 - protein, 1315 aa, Artificial Sequence
  SARS-CoV-2/Iceland/238/2020__EPI_ISL_417566 spike protein (1-1147)(P715C_P1069C) Ferritin construct
MFVFLVLLPLVSSQCVNLTTRTQLPPAYTNSFTRGVYYPDKVFRSSVLHSTQDLFLPFFSNVTWFHAIHVSGTNGTKRFDNPVLPFNDGVYFASTEKSNIIRGWIFGTTLDSKTQSLLIVNNATNVVIKVCEFQFCNDPFLGVYYHKNNKSWMESEFRVYSSANNCTFEYVSQPFLMDLEGKQGNFKNLREFVFKNIDGYFKIYSKHTPINLVRDLPQGFSALEPLVDLPIGINITRFQTLLALHRSYLTPGDSSSGWTAGAAAYYVGYLQPRTFLLKYNENGTITDAVDCALDPLSETKCTLKSFTVEKGIYQTSNFRVQPTESIVRFPNITNLCPFGEVFNATRFASVYAWNRKRISNCVADYSVLYNSASFSTFKCYGVSPTKLNDLCFTNVYADSFVIRGDEVRQIAPGQTGKIADYNYKLPDDFTGCVIAWNSNNLDSKVGGNYNYLYRLFRKSNLKPFERDISTEIYQAGSTPCNGVEGFNCYFPLQSYGFQPTNGVGYQPYRVVVLSFELLHAPATVCGPKKSTNLVKNKCVNFNFNGLTGTGVLTESNKKFLPFQQFGRDIADTTDAVRDPQTLEILDITPCSFGGVSVITPGTNTSNQVAVLYQGVNCTEVPVAIHADQLTPTWRVYSTGSNVFQTRAGCLIGAEHVNNSYECDIPIGAGICASYQTQTNSPRRARSVASQSIIAYTMSLGAENSVAYSNNSIAICTNFTISVTTEILPVSMTKTSVDCTMYICGDSTECSNLLLQYGSFCTQLNRALTGIAVEQDKNTQEVFAQVKQIYKTPPIKDFGGFNFSQILPDPSKPSKRSFIEDLLFNKVTLADVGFIKQYGDCLGDIAARDLICAQKFNGLTVLPPLLTDEMIAQYTSALLAGTITSGWTFGAGAALQIPFAMQMAYRFNGIGVTQNVLYENQKLIANQFNSAIGKIQDSLSSTASALGKLQDVVNQNAQALNTLVKQLSSNFGAISSVLNDILSRLDKVEAEVQIDRLITGRLQSLQTYVTQQLIRAAEIRASANLAATKMSECVLGQSKRVDFCGKGYHLMSFPQSAPHGVVFLHVTYVCAQEKNFTTAPAICHDGKAHFPREGVFVSNGTHWFVTQRNFYEPQIITTDNTFVSGNCDVVIGIVNNTVYDPLQPELDSGGGGSDIIKLLNEQVNKEMQSSNLYMSMSSWCYTHSLDGAGLFLFDHAAEEYEHAKKLIIFLNENNVPVQLTSISAPEHKFEGLTQIFQKAYEHEQHISESINNIVDHAIKSKDHATFNFLQWYVAEQHEEEVLFKDILDKIELIGNENHGLYLADQYVKGIAKSRKS

SEQ ID NO: 9173 - protein, 1315 aa, Artificial Sequence
  SARS-CoV-2/Greece/16/2020__EPI_ISL_418265 spike protein (1-1147)(P715C_P1069C) Ferritin construct
MFVFLVLLPLVSSQCVNLTTRTQLPPAYTNSFTRGVYYPDKVFRSSVLHSTQDLFLPFFSNVTWFHAIHVSGTNGTKRFDNPVLPFNDGVYFASTEKSNIIRGWIFGTTLDSKTQSLLIVNNATNVVIKVCEFQFCNDPFLGVYYHKNNKSWMESEFRVYSSANNCTFEYVSQPFLMDLEGKQGNFKNLREFVFKNVDGYFKIYSKHTPINLVRDLPQGFSALEPLVDLPIGINITRFQTLLALHRSYLTPGDSSSGWTAGAAAYYVGYLQPRTFLLKYNENGTITDAVDCALDPLSETKCTLKSFTVEKGIYQTSNFRVQPTESIVRFPNITNLCPFGEVFNATRFASVYAWNRKRISNCVADYSVLYNSASFSTFKCYGVSPTKLNDLCFTNVYADSFVIRGDEVRQIAPGQTGKIADYNYKLPDDFTGCVIAWNSNNLDSKVGGNYNYLYRLFRKSNLKPFERDISTEIYQAGSTPCNGVEGFNCYFPLQSYGFQPTNGVGYQPYRVVVLSFELLHAPATVCGPKKSTNLVKNKCVNFNFNGLTGTGVLTESNKKFLPFQQFGRDIADTTDAVRDPQTLEILDITPCSFGGVSVITPGTNTSNQVAVLYQDVNCTEVPVAIHADQLTPTWRVYSTGSNVFQTRAGCLIGAEHVNNSYECDIPIGAGICASYQTQTNSPRRARSVASQSIIAYTMSLGAENSVAYSNNSIAICTNFTISVTTEILPVSMTKTSVDCTMYICGDSTECSNLLLQYGSFCTQLNRALTGIAVEQDKNTQEVFAQVKQIYKTPPIKDFGGFNFSQILPDPSKPSKRSFIEDLLFNKVTLADAGFIKQYGDCLGDIAARDLICAQKFNGLTVLPPLLTDEMIAQYTSALLAGTITSGWTFGAGAALQIPFAMQMAYRFNGIGVTQNVLYENQKLIANQFNSAIGKIQDSLSSTASALGKLQDVVNQNAQALNTLVKQLSSNFGAISSVLNDILSRLDKVEAEVQIDRLITGRLQSLQTYVTQQLIRAAEIRASANLAATKMSECVLGQSKRVDFCGKGYHLMSFPQSAPHGVVFLHVTYVCAQEKNFTTAPAICHDGKAHFPREGVFVSNGTHWFVTQRNFYEPQIITTDNTFVSGNCDVVIGIVNNTVYDPLQPELDSGGGGSDIIKLLNEQVNKEMQSSNLYMSMSSWCYTHSLDGAGLFLFDHAAEEYEHAKKLIIFLNENNVPVQLTSISAPEHKFEGLTQIFQKAYEHEQHISESINNIVDHAIKSKDHATFNFLQWYVAEQHEEEVLFKDILDKIELIGNENHGLYLADQYVKGIAKSRKS

SEQ ID NO: 9174 - protein, 1315 aa, Artificial Sequence
  SARS-CoV-2/Iceland/319/2020__EPI_ISL_417648 spike protein (1-1147)(P715C_P1069C) Ferritin construct
MFVFLVLLPLVSSQCVNLTTRTQLPPAYTNSFTRGVYYPDKVFRSSVLHSTQDLFLPFFSNVTWFHAIHVSGTNGTKRFDNPVLPFNDGVYFASTEKSNIIRGWIFGTTLDSKTQSLLIVNNATNVVIKVCEFQFCNDPFLGVYYHKNNKSWMESEFRVYSSANNCTFEYVSQPFLIDLEGKQGNFKNLREFVFKNIDGYFKIYSKHTPINLVRDLPQGFSALEPLVDLPIGINITRFQTLLALHRSYLTPGDSSSGWTAGAAAYYVGYLQPRTFLLKYNENGTITDAVDCALDPLSETKCTLKSFTVEKGIYQTSNFRVQPTESIVRFPNITNLCPFGEVFNATRFASVYAWNRKRISNCVADYSVLYNSASFSTFKCYGVSPTKLNDLCFTNVYADSFVIRGDEVRQIAPGQTGKIADYNYKLPDDFTGCVIAWNSNNLDSKVGGNYNYLYRLFRKSNLKPFERDISTEIYQAGSTPCNGVEGFNCYFPLQSYGFQPTNGVGYQPYRVVVLSFELLHAPATVCGPKKSTNLVKNKCVNFNFNGLTGTGVLTESNKKFLPFQQFGRDIADTTDAVRDPQTLEILDITPCSFGGVSVITPGTNTSNQVAVLYQGVNCTEVPVAIHADQLTPTWRVYSTGSNVFQTRAGCLIGAEHVNNSYECDIPIGAGICASYQTQTNSPRRARSVASQSIIAYTMSLGAENSVAYSNNSIAICTNFTISVTTEILPVSMTKTSVDCTMYICGDSTECSNLLLQYGSFCTQLNRALTGIAVEQDKNTQEVFAQVKQIYKTPPIKDFGGFNFSQILPDPSKPSKRSFIEDLLFNKVTLADAGFIKQYGDCLGDIAARDLICAQKFNGLTVLPPLLTDEMIAQYTSALLAGTITSGWTFGAGAALQIPFAMQMAYRFNGIGVTQNVLYENQKLIANQFNSAIGKIQDSLSSTASALGKLQDVVNQNAQALNTLVKQLSSNFGAISSVLNDILSRLDKVEAEVQIDRLITGRLQSLQTYVTQQLIRAAEIRASANLAATKMSECVLGQSKRVDFCGKGYHLMSFPQSAPHGVVFLHVTYVCAQEKNFTTAPAICHDGKAHFPREGVFVSNGTHWFVTQRNFYEPQIITTDNTFVSGNCDVVIGIVNNTVYDPLQPELDSGGGGSDIIKLLNEQVNKEMQSSNLYMSMSSWCYTHSLDGAGLFLFDHAAEEYEHAKKLIIFLNENNVPVQLTSISAPEHKFEGLTQIFQKAYEHEQHISESINNIVDHAIKSKDHATFNFLQWYVAEQHEEEVLFKDILDKIELIGNENHGLYLADQYVKGIAKSRKS

SEQ ID NO: 9175 - protein, 1315 aa, Artificial Sequence
  SARS-CoV-2/Congo/94/2020__EPI_ISL_417947 spike protein (1-1147)(P715C_P1069C) Ferritin construct
MFVFLVLLPLVSSQCVNLTTRTQLPPAYTNSFTRGVYYPDKVFRSSVLHSTQDLFLPFFSNVTWFHAIHVSGTNGTKRFDNPVLPFNDGVYFASTEKSNIIRGWIFGTTLDSKTQSLLIVNNATNVVIKVCEFQFCNDPFLGVYYHKNNKSWMESEFRVYSSANNCTFEYVSQPFLMDLEGKQGNFKNLREFVFKNIDGYFKIYSKHTPINLVRDLPQGFSALEPLVDLPIGINITRFQTLLALHRSYLTPGDSSSGWTAGAAAYYVGYLQPRTFLLKYNENGTITDAVDCALDPLSETKCTLKSFTVEKGIYQTSNFRVQPTESIVRFPNITNLCPFGEVFNATRFASVYAWNRKRISNCVADYSVLYNSASFSTFKCYGVSPTKLNDLCFTNVYADSFVIRGDEVRQIAPGQTGKIADYNYKLPDDFTGCVIAWNSNNLDSKVGGNYNYLYRLFRKSNLKPFERDISTEIYQAGSTPCNGVEGFNCYFPLQSYGFQPTNGVGYQPYRVVVLSFELLHAPATVCGPKKSTNLVKNKCVNFNFNGLTGTGVLTESNKKFLPFQQFGRDIADTTDAVRDPQTLEILDITPCSFGGVSVITPGTNTSNQVAVLYQGVNCTEVPVAIHADQLTPTWRVYSTGSNVFQTRAGCLIGAEHVNNSYECDIPIGAGICASYQTQTNSPRRARSVASQSIIAYTMSLGAENSVAYSNNSIAICTNFTISVTTEILPVSMTKTSVDCTMYICGDSTECSNLLLQYGSFCTQLNRALTGIAVEQDKNTQEVFAQVKQIYKTPPIKDFGGFNFSQILPDPSKPSKRSFIEDILFNKVTLADAGFIKQYGDCLGDIAARDLICAQKFNGLTVLPPLLTDEMIAQYTSALLAGTITSGWTFGAGAALQIPFAMQMAYRFNGIGVTQNVLYENQKLIANQFNSAIGKIQDSLSSTASALGKLQDVVNQNAQALNTLVKQLSSNFGAISSVLNDILSRLDKVEAEVQIDRLITGRLQSLQTYVTQQLIRAAEIRASANLAATKMSECVLGQSKRVDFCGKGYHLMSFPQSAPHGVVFLHVTYVCAQEKNFTTAPAICHDGKAHFPREGVFVSNGTHWFVTQRNFYEPQIITTDNTFVSGNCDVVIGIVNNTVYDPLQPELDSGGGGSDIIKLLNEQVNKEMQSSNLYMSMSSWCYTHSLDGAGLFLFDHAAEEYEHAKKLIIFLNENNVPVQLTSISAPEHKFEGLTQIFQKAYEHEQHISESINNIVDHAIKSKDHATFNFLQWYVAEQHEEEVLFKDILDKIELIGNENHGLYLADQYVKGIAKSRKS

SEQ ID NO: 9176 - protein, 1315 aa, Artificial Sequence
  SARS-CoV-2/Congo/158/2020__EPI_ISL_417950 spike protein (1-1147)(P715C_P1069C) Ferritin construct
MFVFLVLLPLVSSQCVNLTTRTQLPPAYTNSFTRGVYYPDKVFRSSVLHSTQDLFLPFFSNVTWFHAIHVSGTNGTKRFDNPVLPFNDGVYFASTEKSNIIRGWIFGTTLDSKTQSLLIVNNATNVVIKVCEFQFCNDPFLGVYYHKNNKSWMESEFRVYSSANNCTFEYVSQPFLMDLEGKQGNFKNLREFVFKNIDGYFKIYSKHTPINLVRDLPQGFSALEPLVDLPIGINITRFQTLLALHRSYLTPGDSSSGWTAGAAAYYVGYLQPRTFLLKYNENGTITDAVDCALDPLSETKCTLKSFTVEKGIYQTSNFRVQPTESIVRFPNITNLCPFGEVFNATRFASVYAWNRKRISNCVADYSVLYNSASFSTFKCYGVSPTKLNDLCFTNVYADSFVIRGDEVRQIAPGQTGKIADYNYKLPDDFTGCVIAWNSNNLDSKVGGNYNYLYRLFRKSNLKPFERDISTEIYQAGSTPCNGVEGFNCYFPLQSYGFQPTNGVGYQPYRVVVLSFELLHAPATVCGPKKSTNLVKNKCVNFNFNGLTGTGVLTESNKKFLPFQQFGRDIADTTDAVRDPQTLEILDITPCSFGGVSVITPGTNTSNQVAVLYQDVNCTEVPVAIHADQLTPTWRVYSTGSNVFQTRAGCLIGAEHVNNSYECDIPIGAGICASYQTQTNSPRRARSVASQSIIAYTMSLGAENSVAYSNNSIAICTNFTISVTTEILPVSMTKTSVDCTMYICGDSTECSNLLLQYGSFCTQLNRALTGIAVEQDKNTQEVFAQVKQIYKTPPIKDFGGFNFSQILPDPSKPSKRSFIEDLLFNKVTLADAGFIKQYGDCLGDIAARDLICAQKFNGLTVLPPLLTDEMIAQYTSALLAGTITSGWTFGAGAALQIPFAMQMAYRFNGIGVTQNVLYENQKLIANQFNSAIGKIQDSLSSTASALGKLQDVVNQNAQALNTLVKQLSSNFGAISSVLNDILSRLDKVEAEVQIDRLITGRLQSLQTYVTQQLIRAAEIRASANLAATKMSECVLGQSKRVDFCGKGYHLMSFPQSAPHGVVFLHVTYVCAQEKNFTTAPAICHDGKAHFPREGVFVSNGTHWFVTQRNFYEPQIITTDNTFLSGNCDVVIGIVNNTVYDPLQPELDSGGGGSDIIKLLNEQVNKEMQSSNLYMSMSSWCYTHSLDGAGLFLFDHAAEEYEHAKKLIIFLNENNVPVQLTSISAPEHKFEGLTQIFQKAYEHEQHISESINNIVDHAIKSKDHATFNFLQWYVAEQHEEEVLFKDILDKIELIGNENHGLYLADQYVKGIAKSRKS

SEQ ID NO: 9177 - protein, 1315 aa, Artificial Sequence
  SARS-CoV-2/USA/UT-00034/2020__EPI_ISL_417977 spike protein (1-1147)(P715C_P1069C) Ferritin construct
MFVFLVLLPLVSSQCVNLTTRTQLPPAYTNSFTRGVYYPDKVFRSSVLHSTQDLFLPFFSNVTWFHAIHVSGTNGTKRFDNPVLPFNDGVYFASTEKSNIIRGWIFGTTLDSKTQSLLIVNNATNVVIKVCEFQFCNDPFLGVYYYKNNKSWMESEFRVYSSANNCTFEYVSQPFLMDLEGKQGNFKNLREFVFKNIDGYFKIYSKHTPINLVRDLPQGFSALEPLVDLPIGINITRFQTLLALHRSYLTPGDSSSGWTAGAAAYYVGYLQPRTFLLKYNENGTITDAVDCALDPLSETKCTLKSFTVEKGIYQTSNFRVQPTESIVRFPNITNLCPFGEVFNATRFASVYAWNRKRISNCVADYSVLYNSASFSTFKCYGVSPTKLNDLCFTNVYADSFVIRGDEVRQIAPGQTGKIADYNYKLPDDFTGCVIAWNSNNLDSKVGGNYNYLYRLFRKSNLKPFERDISTEIYQAGSTPCNGVEGFNCYFPLQSYGFQPTNGVGYQPYRVVVLSFELLHAPATVCGPKKSTNLVKNKCVNFNFNGLTGTGVLTESNKKFLPFQQFGRDIADTTDAVRDPQTLEILDITPCSFGGVSVITPGTNTSNQVAVLYQGVNCTEVPVAIHADQLTPTWRVYSTGSNVFQTRAGCLIGAEHVNNSYECDIPIGAGICASYQTQTNSPRRARSVASQSIIAYTMSLGAENSVAYSNNSIAICTNFTISVTTEILPVSMTKTSVDCTMYICGDSTECSNLLLQYGSFCTQLNRALTGIAVEQDKNTQEVFAQVKQIYKTPPIKDFGGFNFSQILPDPSKPSKRSFIEDLLFNKVTLADAGFIKQYGDCLGDIAARDLICAQKFNGLTVLPPLLTDEMIAQYTSALLAGTITSGWTFGAGAALQIPFAMQMAYRFNGIGVTQNVLYENQKLIANQFNSAIGKIQDSLSSTASALGKLQDVVNQNAQALNTLVKQLSSNFGAISSVLNDILSRLDKVEAEVQIDRLITGRLQSLQTYVTQQLIRAAEIRASANLAATKMSECVLGQSKRVDFCGKGYHLMSFPQSAPHGVVFLHVTYVCAQEKNFTTAPAICHDGKAHFPREGVFVSNGTHWFVTQRNFYEPQIITTDNTFVSGNCDVVIGIVNNTVYDPLQPELDSGGGGSDIIKLLNEQVNKEMQSSNLYMSMSSWCYTHSLDGAGLFLFDHAAEEYEHAKKLIIFLNENNVPVQLTSISAPEHKFEGLTQIFQKAYEHEQHISESINNIVDHAIKSKDHATFNFLQWYVAEQHEEEVLFKDILDKIELIGNENHGLYLADQYVKGIAKSRKS

SEQ ID NO: 9178 - protein, 1315 aa, Artificial Sequence
  SARS-CoV-2/USA/UT-00033/2020__EPI_ISL_417976 spike protein (1-1147)(P715C_P1069C) Ferritin construct
MFVFLVLLPLVSSQCVNLTTRTQLPPAYTNSFTRGVYYPDKVFRSSVLHSTQDLFLPFFSNVTWFHAIHVSGTNGTKRFDNPVLPFNDGVYFASTEKSNIIRGWIFGTTLDSKTQSLLIVNNATNVVIKVCEFQFCNDPFLGVYYHKNNKSWMESEFRVYSSANNCTFEYVSQPFLMDLEGKQGNFKNLREFVFKNIDGYFKIYSKHTPINLVRDLPQGFSALEPLVDLPIGINITRFQTLLALHRSYLTPGDSSSGLTAGAAAYYVGYLQPRTFLLKYNENGTITDAVDCALDPLSETKCTLKSFTVEKGIYQTSNFRVQPTESIVRFPNITNLCPFGEVFNATRFASVYAWNRKRISNCVADYSVLYNSASFSTFKCYGVSPTKLNDLCFTNVYADSFVIRGDEVRQIAPGQTGKIADYNYKLPDDFTGCVIAWNSNNLDSKVGGNYNYLYRLFRKSNLKPFERDISTEIYQAGSTPCNGVEGFNCYFPLQSYGFQPTNGVGYQPYRVVVLSFELLHAPATVCGPKKSTNLVKNKCVNFNFNGLTGTGVLTESNKKFLPFQQFGRDIADTTDAVRDPQTLEILDITPCSFGGVSVITPGTNTSNQVAVLYQGVNCTEVPVAIHADQLTPTWRVYSTGSNVFQTRAGCLIGAEHVNNSYECDIPIGAGICASYQTQTNSPRRARSVASQSIIAYTMSLGAENSVAYSNNSIAICTNFTISVTTEILPVSMTKTSVDCTMYICGDSTECSNLLLQYGSFCTQLNRALTGIAVEQDKNTQEVFAQVKQIYKTPPIKDFGGFNFSQILPDPSKPSKRSFIEDLLFNKVTLADAGFIKQYGDCLGDIAARDLICAQKFNGLTVLPPLLTDEMIAQYTSALLAGTITSGWTFGAGAALQIPFAMQMAYRFNGIGVTQNVLYENQKLIANQFNSAIGKIQDSLSSTASALGKLQDVVNQNAQALNTLVKQLSSNFGAISSVLNDILSRLDKVEAEVQIDRLITGRLQSLQTYVTQQLIRAAEIRASANLAATKMSECVLGQSKRVDFCGKGYHLMSFPQSAPHGVVFLHVTYVCAQEKNFTTAPAICHDGKAHFPREGVFVSNGTHWFVTQRNFYEPQIITTDNTFVSGNCDVVIGIVNNTVYDPLQPELDSGGGGSDIIKLLNEQVNKEMQSSNLYMSMSSWCYTHSLDGAGLFLFDHAAEEYEHAKKLIIFLNENNVPVQLTSISAPEHKFEGLTQIFQKAYEHEQHISESINNIVDHAIKSKDHATFNFLQWYVAEQHEEEVLFKDILDKIELIGNENHGLYLADQYVKGIAKSRKS

SEQ ID NO: 9179 - protein, 1315 aa, Artificial Sequence
  SARS-CoV-2/USA/WI-13/2020__EPI_ISL_417516 spike protein (1-1147)(P715C_P1069C) Ferritin construct
MFVFLVLLPLVSSQCVNLTTRTQLPPAYTNSFTRGVYYPDKVFRSSVLHSTQDLFLPFFSNVTWFHAIHVSGTNGTKRFDNPVLPFNDGVYFASTEKSNIIRGWIFGTTLDSKTQSLLIVNNATNVVIKVCEFQFCNDPFLGVYYHKNNKSWMESEFRVYSSANNCTFEYVSQPFLMDLEGKQGNFKNLREFVFKNIDGYFKIYSKHTPINLVRDLPQGFSALEPLVDLPIGINITRFQTLLALHRSYLTPGDSSSGWTAGAAAYYVGYLQPRTFLLKYNENGTITDAVDCALDPLSETKCTLKSFTVEKGIYQTSNFRVLPTESIVRFPNITNLCPFGEVFNATRFASVYAWNRKRISNCVADYSVLYNSASFSTFKCYGVSPTKLNDLCFTNVYADSFVIRGDEVRQIAPGQTGKIADYNYKLPDDFTGCVIAWNSNNLDSKVGGNYNYLYRLFRKSNLKPFERDISTEIYQAGSTPCNGVEGFNCYFPLQSYGFQPTNGVGYQPYRVVVLSFELLHAPATVCGPKKSTNLVKNKCVNFNFNGLTGTGVLTESNKKFLPFQQFGRDIADTTDAVRDPQTLEILDITPCSFGGVSVITPGTNTSNQVAVLYQGVNCTEVPVAIHADQLTPTWRVYSTGSNVFQTRAGCLIGAEHVNNSYECDIPIGAGICASYQTQTNSPRRARSVASQSIIAYTMSLGAENSVAYSNNSIAICTNFTISVTTEILPVSMTKTSVDCTMYICGDSTECSNLLLQYGSFCTQLNRALTGIAVEQDKNTQEVFAQVKQIYKTPPIKDFGGFNFSQILPDPSKPSKRSFIEDLLFNKVTLADAGFIKQYGDCLGDIAARDLICAQKFNGLTVLPPLLTDEMIAQYTSALLAGTITSGWTFGAGAALQIPFAMQMAYRFNGIGVTQNVLYENQKLIANQFNSAIGKIQDSLSSTASALGKLQDVVNQNAQALNTLVKQLSSNFGAISSVLNDILSRLDKVEAEVQIDRLITGRLQSLQTYVTQQLIRAAEIRASANLAATKMSECVLGQSKRVDFCGKGYHLMSFPQSAPHGVVFLHVTYVCAQEKNFTTAPAICHDGKAHFPREGVFVSNGTHWFVTQRNFYEPQIITTDNTFVSGNCDVVIGIVNNTVYDPLQPELDSGGGGSDIIKLLNEQVNKEMQSSNLYMSMSSWCYTHSLDGAGLFLFDHAAEEYEHAKKLIIFLNENNVPVQLTSISAPEHKFEGLTQIFQKAYEHEQHISESINNIVDHAIKSKDHATFNFLQWYVAEQHEEEVLFKDILDKIELIGNENHGLYLADQYVKGIAKSRKS

SEQ ID NO: 9180 - protein, 1314 aa, Artificial Sequence
  SARS-CoV-2/India/1-27/2020__EPI_ISL_413522 spike protein (1-1146)(P714C_P1068C) Ferritin construct
MFVFLVLLPLVSSQCVNLTTRTQLPPAYTNSFTRGVYYPDKVFRSSVLHSTQDLFLPFFSNVTWFHAIHVSGTNGTKRFDNPVLPFNDGVYFASTEKSNIIRGWIFGTTLDSKTQSLLIVNNATNVVIKVCEFQFCNDPFLGVYHKNNKSWMESEFRVYSSANNCTFEYVSQPFLMDLEGKQGNFKNLREFVFKNIDGYFKIYSKHTPINLVRDLPQGFSALEPLVDLPIGINITRFQTLLALHRSYLTPGDSSSGWTAGAAAYYVGYLQPRTFLLKYNENGTITDAVDCALDPLSETKCTLKSFTVEKGIYQTSNFRVQPTESIVRFPNITNLCPFGEVFNATRFASVYAWNRKRISNCVADYSVLYNSASFSTFKCYGVSPTKLNDLCFTNVYADSFVIRGDEVIQIAPGQTGKIADYNYKLPDDFTGCVIAWNSNNLDSKVGGNYNYLYRLFRKSNLKPFERDISTEIYQAGSTPCNGVEGFNCYFPLQSYGFQPTNGVGYQPYRVVVLSFELLHAPATVCGPKKSTNLVKNKCVNFNFNGLTGTGVLTESNKKFLPFQQFGRDIADTTDAVRDPQTLEILDITPCSFGGVSVITPGTNTSNQVAVLYQDVNCTEVPVAIHADQLTPTWRVYSTGSNVFQTRAGCLIGAEHVNNSYECDIPIGAGICASYQTQTNSPRRARSVASQSIIAYTMSLGAENSVAYSNNSIAICTNFTISVTTEILPVSMTKTSVDCTMYICGDSTECSNLLLQYGSFCTQLNRALTGIAVEQDKNTQEVFAQVKQIYKTPPIKDFGGFNFSQILPDPSKPSKRSFIEDLLFNKVTLADAGFIKQYGDCLGDIAARDLICAQKFNGLTVLPPLLTDEMIAQYTSALLAGTITSGWTFGAGAALQIPFAMQMAYRFNGIGVTQNVLYENQKLIANQFNSAIGKIQDSLSSTASALGKLQDVVNQNAQALNTLVKQLSSNFGAISSVLNDILSRLDKVEAEVQIDRLITGRLQSLQTYVTQQLIRAAEIRASANLAATKMSECVLGQSKRVDFCGKGYHLMSFPQSAPHGVVFLHVTYVCAQEKNFTTAPAICHDGKAHFPREGVFVSNGTHWFVTQRNFYEPQIITTDNTFVSGNCDVVIGIVNNTVYDPLQPELDSGGGGSDIIKLLNEQVNKEMQSSNLYMSMSSWCYTHSLDGAGLFLFDHAAEEYEHAKKLIIFLNENNVPVQLTSISAPEHKFEGLTQIFQKAYEHEQHISESINNIVDHAIKSKDHATFNFLQWYVAEQHEEEVLFKDILDKIELIGNENHGLYLADQYVKGIAKSRKS

SEQ ID NO: 9181 - protein, 1309 aa, Artificial Sequence
  SARS-CoV-2/pangolin/Guangxi/P4L/2017__EPI_ISL_410538 spike protein (1-1141)(P709C_P1063C) Ferritin construct
MFVFLFVLPLVSSQCVNLTTRTGIPPGYTNSSTRGVYYPDKVFRSSILHLTQDLFLPFFSNVTWFNTINYQGGFKKFDNPVLPFNDGVYFASTEKSNIIRGWIFGTTLDARTQSLLIVNNATNVVIKVCEFQFCTDPFLGVYYHNNNKTWVENEFRVYSSANNCTFEYISQPFLMDLEGKQGNFKNLREFVFKNVDGYFKIYSKHTPIDLVRDLPRGFAALEPLVDLPIGINITRFQTLLALHRSYLTPGNLESGWTTGAAAYYVGYLQQRTFLLSYNQNGTITDAVDCSLDPLSETKCTLKSLTVEKGIYQTSNFRVQPTISIVRFPNITNLCPFGEVFNASKFASVYAWNRKRISNCVADYSVLYNSTSFSTFKCYGVSPTKLNDLCFTNVYADSFVVKGDEVRQIAPGQTGVIADYNYKLPDDFTGCVIAWNSVKQDALTGGNYGYLYRLFRKSKLKPFERDISTEIYQAGSTPCNGQVGLNCYYPLERYGFHPTTGVNYQPFRVVVLSFELLNGPATVCGPKLSTTLVKDKCVNFNFNGLTGTGVLTTSKKQFLPFQQFGRDISDTTDAVRDPQTLEILDITPCSFGGVSVITPGTNTSNQVAVLYQDVNCTEVPMAIHAEQLTPAWRVYSAGANVFQTRAGCLVGAEHVNNSYECDIPVGAGICASYHSMSSLRSVNQRSIIAYTMSLGAENSVAYSNNSIAICTNFTISVTTEILPVSMTKTSVDCTMYICGDSIECSNLLLQYGSFCTQLNRALTGIAVEQDKNTQEVFAQVKQIYKTPPIKDFGGFNFSQILPDPSKPSKRSFIEDLLFNKVTLADAGFIKQYGDCLGDIAARDLICAQKFNGLTVLPPLLTDEMIAQYTSALLAGTITSGWTFGAGAALQIPFAMQMAYRFNGIGVTQNVLYENQKLIANQFNSAIGKIQDSLSSTASALGKLQDVVNQNAQALNTLVKQLSSNFGAISSVLNDILSRLDKVEAEVQIDRLITGRLQSLQTYVTQQLIRAAEIRASANLAATKMSECVLGQSKRVDFCGKGYHLMSFPQSAPHGVVFLHVTYVCAQEKNFTTAPAICHEGKAHFPREGVFVSNGTHWFITQRNFYEPQIITTDNTFVSGSCDVVIGIVNNTVYDPLQPELDSGGGGSDIIKLLNEQVNKEMQSSNLYMSMSSWCYTHSLDGAGLFLFDHAAEEYEHAKKLIIFLNENNVPVQLTSISAPEHKFEGLTQIFQKAYEHEQHISESINNIVDHAIKSKDHATFNFLQWYVAEQHEEEVLFKDILDKIELIGNENHGLYLADQYVKGIAKSRKS

SEQ ID NO: 9182 - protein, 1309 aa, Artificial Sequence
  SARS-CoV-2/pangolin/Guangxi/P5L/2017__EPI_ISL_410540 spike protein (1-1141)(P709C_P1063C) Ferritin construct
MFVFLFVLPLVSSQCVNLTTRTGIPPGYTNSSTRGVYYPDKVFRSSILHLTQDLFLPFFSNVTWFNTINYQGGFKKFDNPVLPFNDGVYFASTEKSNIIRGWIFGTTLDARTQSLLIVNNATNVVIKVCEFQFCTDPFLGVYYHNNNKTWVENEFRVYSSANNCTFEYISQPFLMDLEGKQGNFKNLREFVFKNVDGYFKIYSKHTPIDLVRDLPRGFAALEPLVDLPIGINITRFQTLLALHRSYLTPGKLESGWTTGAAAYYVGYLQQRTFLLSYNQNGTITDAVDCSLDPLSETKCTLKSLTVEKGIYQTSNFRVQPTISIVRFPNITNLCPFGEVFNASKFASVYAWNRKRISNCVADYSVLYNSTSFSTFKCYGVSPTKLNDLCFTNVYADSFVVKGDEVRQIAPGQTGVIADYNYKLPDDFTGCVIAWNSVKQDALTGGNYGYLYRLFRKSKLKPFERDISTEIYQAGSTPCNGQVGLNCYYPLERYGFHPTTGVNYQPFRVVVLSFELLNGPATVCGPKLSTTLVKDKCVNFNFNGLTGTGVLTTSKKQFLPFQQFGRDISDTTDAVRDPQTLEILDITPCSFGGVSVITPGTNTSNQVAVLYQDVNCTEVPMAIHAEQLTPAWRVYSAGANVFQTRAGCLVGAEHVNNSYECDIPVGAGICASYHSMSSFRSVNQRSIIAYTMSLGAENSVAYSNNSIAICTNFTISVTTEILPVSMTKTSVDCTMYICGDSIECSNLLLQYGSFCTQLNRALTGIAVEQDKNTQEVFAQVKQIYKTPPIKDFGGFNFSQILPDPSKPSKRSFIEDLLFNKVTLADAGFIKQYGDCLGDIAARDLICAQKFNGLTVLPPLLTDEMIAQYTSALLAGTITSGWTFGAGAALQIPFAMQMAYRFNGIGVTQNVLYENQKLIANQFNSAIGKIQDSLSSTASALGKLQDVVNQNAQALNTLVKQLSSNFGAISSVLNDILSRLDKVEAEVQIDRLITGRLQSLQTYVTQQLIRAAEIRASANLAATKMSECVLGQSKRVDFCGKGYHLMSFPQSAPHGVVFLHVTYVCAQEKNFTTAPAICHEGKAHFPREGVFVSNGTHWFITQRNFYEPQIITTDNTFVSGSCDVVIGIVNNTVYDPLQPELDSGGGGSDIIKLLNEQVNKEMQSSNLYMSMSSWCYTHSLDGAGLFLFDHAAEEYEHAKKLIIFLNENNVPVQLTSISAPEHKFEGLTQIFQKAYEHEQHISESINNIVDHAIKSKDHATFNFLQWYVAEQHEEEVLFKDILDKIELIGNENHGLYLADQYVKGIAKSRKS

SEQ ID NO: 9183 - protein, 1309 aa, Artificial Sequence
  SARS-CoV-2/pangolin/Guangxi/P5E/2017__EPI_ISL_410541 spike protein (1-1141)(P709C_P1063C) Ferritin construct
MFVFLFVLPLVSSQCVNLTTRTGIPPGYTNSSTRGVYYPDKVFRSSILHLTQDLFLPFFSNVTWFNTITYQGGSKKFDNPVLPFNDGVYFASTEKSNIIRGWIFGTTLDARTQSLLIVNNATNVVIKVCEFQFCTDPFLGVYYHNNNKTWVENEFRVYSSANNCTFEYISQPFLMDLEGKQGNFKNLREFVFKNVDGYFKIYSKHTPIDLVRDLPRGFAALEPLVDLPIGINITRFQTLLALHRSYLTPGKLESGWTTGAAAYYVGYLQQRTFLLSYNQNGTITDAVDCSLDPLSETKCTLKSLTVEKGIYQTSNFRVQPTISIVRFPNITNLCPFGEVFNASKFASVYAWNRKRISNCVADYSVLYNSTSFSTFKCYGVSPTKLNDLCFTNVYADSFVVKGDEVRQIAPGQTGVIADYNYKLPDDFTGCVIAWNSVKQDALTGDNYGYLYRLFRKSKLKPFERDISTEIYQAGSTPCNGQVGLNCYYPLERYGFHPTTGVNYQPFRVVVLSFELLNGPATVCGPKLSTTLVKDKCVNFNFNGLTGTGVLTTSKKQFLPFQQFGRDISDTTDAVRDPQTLEILDITPCSFGGVSVITPGTNTSNQVAVLYQDVNCTEVPMAIHAEQLTPAWRVYSAGANVFQTRAGCLVGAEHVNNSYECDIPVGAGICASYHSMSSFRSVNQRSIIAYTMSLGAENSVAYSNNSIAICTNFTISVTTEILPVSMTKTSVDCTMYICGDSIECSNLLLQYGSFCTQLNRALTGIAVEQDKNTQEVFAQVKQIYKTPPIKDFGGFNFSQILPDPSKPSKRSFIEDLLFNKVTLADAGFIKQYGDCLGDIAARDLICAQKFNGLTVLPPLLTDEMIAQYTSALLAGTITSGWTFGAGAALQIPFAMQMAYRFNGIGVTQNVLYENQKLIANQFNSAIGKIQDSLSSTASALGKLQDVVNQNAQALNTLVKQLSSNFGAISSVLNDILSRLDKVEAEVQIDRLITGRLQSLQTYVTQQLIRAAEIRASANLAATKMSECVLGQSKRVDFCGKGYHLMSFPQSAPHGVVFLHVTYVCAQEKNFTTAPAICHEGKAHFPREGVFVSNGTHWFITQRNFYEPQIITTDNTFVSGSCDVVIGIVNNTVYDPLQPELDSGGGGSDIIKLLNEQVNKEMQSSNLYMSMSSWCYTHSLDGAGLFLFDHAAEEYEHAKKLIIFLNENNVPVQLTSISAPEHKFEGLTQIFQKAYEHEQHISESINNIVDHAIKSKDHATFNFLQWYVAEQHEEEVLFKDILDKIELIGNENHGLYLADQYVKGIAKSRKS

SEQ ID NO: 9184 - protein, 1307 aa, Artificial Sequence
  SARS-CoV-2/pangolin/Guangxi/P1E/2017__EPI_ISL_410539 spike protein (1-1139)(P707C_P1061C) Ferritin construct
MFVFLFVLPLVSSQCVNLTTRTGIQPGYTNSSTRGVYYPDKVFRSSILHLTQDLFLPFFSNVTWFNTINYQGGFKKFDNPVLPFNDGVYFASTEKSNIIRGWIFGTTLDARTQSLLIVNNATNVVIKVCEFQFCTDPFLGVYYHNNNKTWVENEFRVYSSANNCTFEYISQPFLMDLEGKQGNFKNLREFVFKNVDGYFKIYSKHTPIDLVRDLPRGFAALEPLVDLPIGINITRFQTLLALHRSYLTPGKLESGWTTGAAAYYVGYLQQRTFLLSYNQNGTITDAVDCSLDPLSETKCTLKSLTVEKGIYQTSNFRVQPTISIVRFPNITNLCPFGEVFNASKFASVYAWNRKRISNCVADYSVLYNSTSFSTFKCYGVSPTKLNDLCFTNVYADSFVVKGDEVRQIAPGQTGVIADYNYKLPDDFTGCVIAWNSVKQDALTGGNYLYRLFRKSKLKPFERDISTEIYQAGSTPCNGQVGLNCYYPLERYGFHPTTGVNYQPFRVVVLSFELLNGPATVCGPKLSTTLVKDKCVNFNFNGLTGTGVLTTSKKQFLPFQQFGRDISDTTDAVRDPQTLEILDITPCSFGGVSVITPGTNTSNQVAVLYQDVNCTEVPMAIHAEQLTPAWRVYSAGANVFQTRAGCLVGAEHVNNSYECDIPVGAGICASYHSMSSLRSVNQRSIIAYTMSLGAENSVAYSNNSIAICTNFTISVTTEILPVSMTKTSVDCTMYICGDSIECSNLLLQYGSFCTQLNRALTGIAVEQDKNTQEVFAQVKQIYKTPPIKDFGGFNFSQILPDPSKPSKRSFIEDLLFNKVTLADAGFIKQYGDCLGDIAARDLICAQKFNGLTVLPPLLTDEMIAQYTSALLAGTITSGWTFGAGAALQIPFAMQMAYRFNGIGVTQNVLYENQKLIANQFNSAIGKIQDSLSSTASALGKLQDVVNQNAQALNTLVKQLSSNFGAISSVLNDILSRLDKVEAEVQIDRLITGRLQSLQTYVTQQLIRAAEIRASANLAATKMSECVLGQSKRVDFCGKGYHLMSFPQSAPHGVVFLHVTYVCAQEKNFTTAPAICHEGKAHFPREGVFVSNGTHWFITQRNFYEPQIITTDNTFVSGSCDVVIGIVNNTVYDPLQPELDSGGGGSDIIKLLNEQVNKEMQSSNLYMSMSSWCYTHSLDGAGLFLFDHAAEEYEHAKKLIIFLNENNVPVQLTSISAPEHKFEGLTQIFQKAYEHEQHISESINNIVDHAIKSKDHATFNFLQWYVAEQHEEEVLFKDILDKIELIGNENHGLYLADQYVKGIAKSRKS

SEQ ID NO: 9185 - protein, 1315 aa, Artificial Sequence
  SARS-CoV-2/Wuhan/WIV05/2019__EPI_ISL_402128 spike protein (1-1147)(G889C_L1034C) Ferritin construct
MFVFLVLLPLVSSQCVNLTTRTQLPPAYTNSFTRGVYYPDKVFRSSVLHSTQDLFLPFFSNVTWFHAIHVSGTNGTKRFDNPVLPFNDGVYFASTEKSNIIRGWIFGTTLDSKTQSLLIVNNATNVVIKVCEFQFCNDPFLGVYYHKNNKSWMESEFRVYSSANNCTFEYVSQPFLMDLEGKQGNFKNLREFVFKNIDGYFKIYSKHTPINLVRDLPQGFSALEPLVDLPIGINITRFQTLLALHRSYLTPGDSSSGWTAGAAAYYVGYLQPRTFLLKYNENGTITDAVDCALDPLSETKCTLKSFTVEKGIYQTSNFRVQPTESIVRFPNITNLCPFGEVFNATRFASVYAWNRKRISNCVADYSVLYNSASFSTFKCYGVSPTKLNDLCFTNVYADSFVIRGDEVRQIAPGQTGKIADYNYKLPDDFTGCVIAWNSNNLDSKVGGNYNYLYRLFRKSNLKPFERDISTEIYQAGSTPCNGVEGFNCYFPLQSYGFQPTNGVGYQPYRVVVLSFELLHAPATVCGPKKSTNLVKNKCVNFNFNGLTGTGVLTESNKKFLPFQQFGRDIADTTDAVRDPQTLEILDITPCSFGGVSVITPGTNTSNQVAVLYQDVNCTEVPVAIHADQLTPTWRVYSTGSNVFQTRAGCLIGAEHVNNSYECDIPIGAGICASYQTQTNSPRRARSVASQSIIAYTMSLGAENSVAYSNNSIAIPTNFTISVTTEILPVSMTKTSVDCTMYICGDSTECSNLLLQYGSFCTQLNRALTGIAVEQDKNTQEVFAQVKQIYKTPPIKDFGGFNFSQILPDPSKPSKRSFIEDLLFNKVTLADAGFIKQYGDCLGDIAARDLICAQKFNGLTVLPPLLTDEMIAQYTSALLAGTITSGWTFCAGAALQIPFAMQMAYRFNGIGVTQNVLYENQKLIANQFNSAIGKIQDSLSSTASALGKLQDVVNQNAQALNTLVKQLSSNFGAISSVLNDILSRLDKVEAEVQIDRLITGRLQSLQTYVTQQLIRAAEIRASANLAATKMSECVCGQSKRVDFCGKGYHLMSFPQSAPHGVVFLHVTYVPAQEKNFTTAPAICHDGKAHFPREGVFVSNGTHWFVTQRNFYEPQIITTDNTFVSGNCDVVIGIVNNTVYDPLQPELDSGGGGSDIIKLLNEQVNKEMQSSNLYMSMSSWCYTHSLDGAGLFLFDHAAEEYEHAKKLIIFLNENNVPVQLTSISAPEHKFEGLTQIFQKAYEHEQHISESINNIVDHAIKSKDHATFNFLQWYVAEQHEEEVLFKDILDKIELIGNENHGLYLADQYVKGIAKSRKS

SEQ ID NO: 9186 - protein, 1311 aa, Artificial Sequence
  SARS-CoV-2/bat/Yunnan/RaTG13/2013__EPI_ISL_402131 spike protein (1-1143)(G885C_L1030C) Ferritin construct
MFVFLVLLPLVSSQCVNLTTRTQLPPAYTNSSTRGVYYPDKVFRSSVLHLTQDLFLPFFSNVTWFHAIHVSGTNGIKRFDNPVLPFNDGVYFASTEKSNIIRGWIFGTTLDSKTQSLLIVNNATNVVIKVCEFQFCNDPFLGVYYHKNNKSWMESEFRVYSSANNCTFEYVSQPFLMDLEGKQGNFKNLREFVFKNIDGYFKIYSKHTPINLVRDLPPGFSALEPLVDLPIGINITRFQTLLALHRSYLTPGDSSSGWTAGAAAYYVGYLQPRTFLLKYNENGTITDAVDCALDPLSETKCTLKSFTVEKGIYQTSNFRVQPTDSIVRFPNITNLCPFGEVFNATTFASVYAWNRKRISNCVADYSVLYNSTSFSTFKCYGVSPTKLNDLCFTNVYADSFVITGDEVRQIAPGQTGKIADYNYKLPDDFTGCVIAWNSKHIDAKEGGNFNYLYRLFRKANLKPFERDISTEIYQAGSKPCNGQTGLNCYYPLYRYGFYPTDGVGHQPYRVVVLSFELLNAPATVCGPKKSTNLVKNKCVNFNFNGLTGTGVLTESNKKFLPFQQFGRDIADTTDAVRDPQTLEILDITPCSFGGVSVITPGTNASNQVAVLYQDVNCTEVPVAIHADQLTPTWRVYSTGSNVFQTRAGCLIGAEHVNNSYECDIPIGAGICASYQTQTNSRSVASQSIIAYTMSLGAENSVAYSNNSIAIPTNFTISVTTEILPVSMTKTSVDCTMYICGDSTECSNLLLQYGSFCTQLNRALTGIAVEQDKNTQEVFAQVKQIYKTPPIKDFGGFNFSQILPDPSKPSKRSFIEDLLFNKVTLADAGFIKQYGDCLGDIAARDLICAQKFNGLTVLPPLLTDEMIAQYTSALLAGTITSGWTFCAGAALQIPFAMQMAYRFNGIGVTQNVLYENQKLIANQFNSAIGKIQDSLSSTASALGKLQDVVNQNAQALNTLVKQLSSNFGAISSVLNDILSRLDKVEAEVQIDRLITGRLQSLQTYVTQQLIRAAEIRASANLAATKMSECVCGQSKRVDFCGKGYHLMSFPQSAPHGVVFLHVTYVPAQEKNFTTAPAICHDGKAHFPREGVFVSNGTHWFVTQRNFYEPQIITTDNTFVSGSCDVVIGIVNNTVYDPLQPELDSGGGGSDIIKLLNEQVNKEMQSSNLYMSMSSWCYTHSLDGAGLFLFDHAAEEYEHAKKLIIFLNENNVPVQLTSISAPEHKFEGLTQIFQKAYEHEQHISESINNIVDHAIKSKDHATFNFLQWYVAEQHEEEVLFKDILDKIELIGNENHGLYLADQYVKGIAKSRKS

SEQ ID NO: 9187 - protein, 1315 aa, Artificial Sequence
  SARS-CoV-2/Wuhan/HBCDC-HB-01/2019__EPI_ISL_402132 spike protein (1-1147)(G889C_L1034C) Ferritin construct
MFVFLVLLPLVSSQCVNLTTRTQLPPAYTNSITRGVYYPDKVFRSSVLHSTQDLFLPFFSNVTWFHAIHVSGTNGTKRFDNPVLPFNDGVYFASTEKSNIIRGWIFGTTLDSKTQSLLIVNNATNVVIKVCEFQFCNDPFLGVYYHKNNKSWMESEFRVYSSANNCTFEYVSQPFLMDLEGKQGNFKNLREFVFKNIDGYFKIYSKHTPINLVRDLPQGFSALEPLVDLPIGINITRFQTLLALHRSYLTPGDSSSGWTAGAAAYYVGYLQPRTFLLKYNENGTITDAVDCALDPLSETKCTLKSFTVEKGIYQTSNFRVQPTESIVRFPNITNLCPFGEVFNATRFASVYAWNRKRISNCVADYSVLYNSASFSTFKCYGVSPTKLNDLCFTNVYADSFVIRGDEVRQIAPGQTGKIADYNYKLPDDFTGCVIAWNSNNLDSKVGGNYNYLYRLFRKSNLKPFERDISTEIYQAGSTPCNGVEGFNCYFPLQSYGFQPTNGVGYQPYRVVVLSFELLHAPATVCGPKKSTNLVKNKCVNFNFNGLTGTGVLTESNKKFLPFQQFGRDIADTTDAVRDPQTLEILDITPCSFGGVSVITPGTNTSNQVAVLYQDVNCTEVPVAIHADQLTPTWRVYSTGSNVFQTRAGCLIGAEHVNNSYECDIPIGAGICASYQTQTNSPRRARSVASQSIIAYTMSLGAENSVAYSNNSIAIPTNFTISVTTEILPVSMTKTSVDCTMYICGDSTECSNLLLQYGSFCTQLNRALTGIAVEQDKNTQEVFAQVKQIYKTPPIKDFGGFNFSQILPDPSKPSKRSFIEDLLFNKVTLADAGFIKQYGDCLGDIAARDLICAQKFNGLTVLPPLLTDEMIAQYTSALLAGTITSGWTFCAGAALQIPFAMQMAYRFNGIGVTQNVLYENQKLIANQFNSAIGKIQDSLSSTASALGKLQDVVNQNAQALNTLVKQLSSNFGAISSVLNDILSRLDKVEAEVQIDRLITGRLQSLQTYVTQQLIRAAEIRASANLAATKMSECVCGQSKRVDFCGKGYHLMSFPQSAPHGVVFLHVTYVPAQEKNFTTAPAICHDGKAHFPREGVFVSNGTHWFVTQRNFYEPQIITTDNTFVSGNCDVVIGIVNNTVYDPLQPELDSGGGGSDIIKLLNEQVNKEMQSSNLYMSMSSWCYTHSLDGAGLFLFDHAAEEYEHAKKLIIFLNENNVPVQLTSISAPEHKFEGLTQIFQKAYEHEQHISESINNIVDHAIKSKDHATFNFLQWYVAEQHEEEVLFKDILDKIELIGNENHGLYLADQYVKGIAKSRKS

SEQ ID NO: 9188 - protein, 1315 aa, Artificial Sequence
  SARS-CoV-2/Guangdong/20SF028/2020__EPI_ISL_403936 spike protein (1-1147)(G889C_L1034C) Ferritin construct
MFVFLVLLPLVSSQCVNLTTRTQLPPAYTNSFTRGVYYPDKVFRSSVLYSTQDLFLPFFSNVTWFHAIHVSGTNGTKRFDNPVLPFNDGVYFASTEKSNIIRGWIFGTTLDSKTQSLLIVNNATNVVIKVCEFQFCNDPFLGVYYHKNNKSWMESEFRVYSSANNCTFEYVSQPFLMDLEGKQGNFKNLREFVFKNIDGYFKIYSKHTPINLVRDLPQGFSALEPLVDLPIGINITRFQTLLALHRSYLTPGDSSSGWTAGAAAYYVGYLQPRTFLLKYNENGTITDAVDCALDPLSETKCTLKSFTVEKGIYQTSNFRVQPTESIVRFPNITNLCPFGEVFNATRFASVYAWNRKRISNCVADYSVLYNSASFSTFKCYGVSPTKLNDLCFTNVYADSFVIRGDEVRQIAPGQTGKIADYNYKLPDDFTGCVIAWNSNNLDSKVGGNYNYLYRLFRKSNLKPFERDISTEIYQAGSTPCNGVEGFNCYFPLQSYGFQPTNGVGYQPYRVVVLSFELLHAPATVCGPKKSTNLVKNKCVNFNFNGLTGTGVLTESNKKFLPFQQFGRDIADTTDAVRDPQTLEILDITPCSFGGVSVITPGTNTSNQVAVLYQDVNCTEVPVAIHADQLTPTWRVYSTGSNVFQTRAGCLIGAEHVNNSYECDIPIGAGICASYQTQTNSPRRARSVASQSIIAYTMSLGAENSVAYSNNSIAIPTNFTISVTTEILPVSMTKTSVDCTMYICGDSTECSNLLLQYGSFCTQLNRALTGIAVEQDKNTQEVFAQVKQIYKTPPIKDFGGFNFSQILPDPSKPSKRSFIEDLLFNKVTLADAGFIKQYGDCLGDIAARDLICAQKFNGLTVLPPLLTDEMIAQYTSALLAGTITSGWTFCAGAALQIPFAMQMAYRFNGIGVTQNVLYENQKLIANQFNSAIGKIQDSLSSTASALGKLQDVVNQNAQALNTLVKQLSSNFGAISSVLNDILSRLDKVEAEVQIDRLITGRLQSLQTYVTQQLIRAAEIRASANLAATKMSECVCGQSKRVDFCGKGYHLMSFPQSAPHGVVFLHVTYVPAQEKNFTTAPAICHDGKAHFPREGVFVSNGTHWFVTQRNFYEPQIITTDNTFVSGNCDVVIGIVNNTVYDPLQPELDSGGGGSDIIKLLNEQVNKEMQSSNLYMSMSSWCYTHSLDGAGLFLFDHAAEEYEHAKKLIIFLNENNVPVQLTSISAPEHKFEGLTQIFQKAYEHEQHISESINNIVDHAIKSKDHATFNFLQWYVAEQHEEEVLFKDILDKIELIGNENHGLYLADQYVKGIAKSRKS

SEQ ID NO: 9189 - protein, 1315 aa, Artificial Sequence
  SARS-CoV-2/Shenzhen/SZTH-001/2020__EPI_ISL_406592 spike protein (1-1147)(G889C_L1034C) Ferritin construct
MFVFLVLLPLVSSQCVNLTTRTQLPPAYTNSFTRGVYYPDKVFRSSVLHSTQDLFLPFFSNVTWFHAIHVSGTNGTKRFDNPVLPFNDGVYFASTEKSNIIRGWIFGTTLDSKTQSLLIVNNATNVVIKVCEFQFCNDPFLGVYYHKNNKSWMESEFRVYSSANNCTFEYVSQPFLMDLEGKQGNFKNLREFVFKNIDGYFKIYSKHTPINLVRDLPQGFSALEPLVDLPIGINITRFQTLLALHRSYLTPGDSSSGWTAGAAAYYVGYLQPRTFLLKYNENGTITDAVDCALDPLSETKCTLKSFTVEKGIYQTSNFRVQPTESIVRFPNITNLCPFGEVFNATRFASVYAWNRKRISNCVADYSVLYNSASFSTFKCYGVSPTKLNDLCFTNVYADSFVIRGDEVRQIAPGQTGKIADYNYKLPDDFTGCVIAWNSNNLDSKVGGNYNYLYRLFRKSNLKPFERDISTEIYQAGSTPCNGVEGFNCYFPLQSYGFQPTNGVGYQPYRVVVLSFELLHAPATVCGPKKSTNLVKNKCVNFNFNGLTGTGVLTESNKKFLPFQQFGRDIADTTDAVRDPQTLEILDITPCSFGGVSVITPGTNTSNQVAVLYQDVNCTEVPVAIHADQLTPTWRVYSTGSNVFQTRAGCLIGAEHVNNSYECDIPIGAGICASYQTQTNSPRRARSVASQSIIAYTMSLGAENSVAYSNNSIAIPTNFTISVTTEILPVSMTKTSVDCTMYICGDSTECSNLLLQYGSFCTQLNRALTGIAVEQDKNTQEVFAQVKQIYKTPPIKDFGGFNFSQILPDPSKPSKRSFIEDLLFNKVTLADAGFIKQYGDCLGDIAARDLICAQKFNGLTVLPPLLTDEMIAQYTSALLAGTITSGWTFCAGAALQIPFAMQMAYRFNGIGVTQNVLYENQKLIANQFNSAIGKIQDSLSSTASALGKLQDVVNQNAQALNTLVKQLSSNFGAISSVLNDILSRLDKVEAEVQIDRLITGRLQSLQTYVTQQLIRAAEIRASANLAATKMSECVCGQSKRVDFCGKGYHLMSFPQSAPHGVVFLHVTYVPAQEKNFTTAPAICHDGKAHFPREGVFVSNGTHWFVTQRNFYEPQIITTDNTFVSGNCDVLIGIVNNTVYDPLQPELDSGGGGSDIIKLLNEQVNKEMQSSNLYMSMSSWCYTHSLDGAGLFLFDHAAEEYEHAKKLIIFLNENNVPVQLTSISAPEHKFEGLTQIFQKAYEHEQHISESINNIVDHAIKSKDHATFNFLQWYVAEQHEEEVLFKDILDKIELIGNENHGLYLADQYVKGIAKSRKS

SEQ ID NO: 9190 - protein, 1315 aa, Artificial Sequence
  SARS-CoV-2/Shenzhen/SZTH-004/2020__EPI_ISL_406595 spike protein (1-1147)(G889C_L1034C) Ferritin construct
MFVFLVLLPLVSSQCVNLTTRTQLPPAYTNSFTRGVYYPDKVFRSSVLHSTQDLFLPFFSNVTWFHAIHVSGTNGTKRFDNPVLPFNDGVYFASTEKSNIIRGWIFGTTLDSKTQSLLIVNNATNVVIKVCEFQFCNDPFLGVYYHKNNKSWMESEFRVYSSANNCTFEYVSQPFLMDLEGKQGNFKNLREFVFKNIDGYFKIYSKHTPINLVRDLPQGFSALEPLVDLPIGINITRFQTLLALHRSYLTPGDSSSGWTAGAAAYYVGYLQPRTFLLKYNENGTITDAVDCALDPLSETKCTLKSFTVEKGIYQTSNFRVQPTESIVRFPNITNLCPFGEVFNATRFASVYAWDRKRISNCVAYYSVLYNSASFSTFKCYGVSPTKLNDLCFTNVYADSFVIRGDEVRQIAPGQTGKIADYNYKLPDDFTGCVIAWNSNNLDSKVGGNYNYLYRLFRKSNLKPFERDISTEIYQAGSTPCNGVEGFNCYFPLQSYGFQPTNGVGYQPYRVVVLSFELLHAPATVCGPKKSTNLVKNKCVNFNFNGLTGTGVLTESNKKFLPFQQFGRDIADTTDAVRDPQTLEILDITPCSFGGVSVITPGTNTSNQVAVLYQDVNCTEVPVAIHADQLTPTWRVYSTGSNVFQTRAGCLIGAEHVNNSYECDIPIGAGICASYQTQTNSPRRARSVASQSIIAYTMSLGAENSVAYSNNSIAIPTNFTISVTTEILPVSMTKTSVDCTMYICGDSTECSNLLLQYGSFCTQLNRALTGIAVEQDKNTQEVFAQVKQIYKTPPIKDFGGFNFSQILPDPSKPSKRSFIEDLLFNKVTLADAGFIKQYGDCLGDIAARDLICAQKFNGLTVLPPLLTDEMIAQYTSALLAGTITSGWTFCAGAALQIPFAMQMAYRFNGIGVTQNVLYENQKLIANQFNSAIGKIQDSLSSTASALGKLQDVVNQNAQALNTLVKQLSSNFGAISSVLNDILSRLDKVEAEVQIDRLITGRLQSLQTYVTQQLIRAAEIRASANLAATKMSECVCGQSKRVDFCGKGYHLMSFPQSAPHGVVFLHVTYVPAQEKNFTTAPAICHDGKAHFPREGVFVSNGTHWFVTQRNFYEPQIITTDNTFVSGNCDVVIGIVNNTVYDPLQPELDSGGGGSDIIKLLNEQVNKEMQSSNLYMSMSSWCYTHSLDGAGLFLFDHAAEEYEHAKKLIIFLNENNVPVQLTSISAPEHKFEGLTQIFQKAYEHEQHISESINNIVDHAIKSKDHATFNFLQWYVAEQHEEEVLFKDILDKIELIGNENHGLYLADQYVKGIAKSRKS

SEQ ID NO: 9191 - protein, 1315 aa, Artificial Sequence
  SARS-CoV-2/France/IDF0372/2020__EPI_ISL_406596 spike protein (1-1147)(G889C_L1034C) Ferritin construct
MFVFLVLLPLVSSQCVNLTTRTQLPPAYTNSFTRGVYYPDKVFRSSVLHSTQDLFLPFFSNVTWFHAIHVSGTNGTKRFDNPVLPFNDGVYFASTEKSNIIRGWIFGTTLDSKTQSLLIVNNATNVVIKVCEFQFCNDPFLGVYYHKNNKSWMESEFRVYSSANNCTFEYVSQPFLMDLEGKQGNFKNLREFVFKNIDGYFKIYSKHTPINLVRDLPQGFSALEPLVDLPIGINITRFQTLLALHRSYLTPGDSSSGWTAGAAAYYVGYLQPRTFLLKYNENGTITDAVDCALDPLSETKCTLKSFTVEKGIYQTSNFRVQPTESIVRFPNITNLCPFGEVFNATRFASVYAWNRKRISNCVADYSFLYNSASFSTFKCYGVSPTKLNDLCFTNVYADSFVIRGDEVRQIAPGQTGKIADYNYKLPDDFTGCVIAWNSNNLDSKVGGNYNYLYRLFRKSNLKPFERDISTEIYQAGSTPCNGVEGFNCYFPLQSYGFQPTNGVGYQPYRVVVLSFELLHAPATVCGPKKSTNLVKNKCVNFNFNGLTGTGVLTESNKKFLPFQQFGRDIADTTDAVRDPQTLEILDITPCSFGGVSVITPGTNTSNQVAVLYQDVNCTEVPVAIHADQLTPTWRVYSTGSNVFQTRAGCLIGAEHVNNSYECDIPIGAGICASYQTQTNSPRRARSVASQSIIAYTMSLGAENSVAYSNNSIAIPTNFTISVTTEILPVSMTKTSVDCTMYICGDSTECSNLLLQYGSFCTQLNRALTGIAVEQDKNTQEVFAQVKQIYKTPPIKDFGGFNFSQILPDPSKPSKRSFIEDLLFNKVTLADAGFIKQYGDCLGDIAARDLICAQKFNGLTVLPPLLTDEMIAQYTSALLAGTITSGWTFCAGAALQIPFAMQMAYRFNGIGVTQNVLYENQKLIANQFNSAIGKIQDSLSSTASALGKLQDVVNQNAQALNTLVKQLSSNFGAISSVLNDILSRLDKVEAEVQIDRLITGRLQSLQTYVTQQLIRAAEIRASANLAATKMSECVCGQSKRVDFCGKGYHLMSFPQSAPHGVVFLHVTYVPAQEKNFTTAPAICHDGKAHFPREGVFVSNGTHWFVTQRNFYEPQIITTDNTFVSGNCDVVIGIVNNTVYDPLQPELDSGGGGSDIIKLLNEQVNKEMQSSNLYMSMSSWCYTHSLDGAGLFLFDHAAEEYEHAKKLIIFLNENNVPVQLTSISAPEHKFEGLTQIFQKAYEHEQHISESINNIVDHAIKSKDHATFNFLQWYVAEQHEEEVLFKDILDKIELIGNENHGLYLADQYVKGIAKSRKS

SEQ ID NO: 9192 - protein, 1315 aa, Artificial Sequence
  SARS-CoV-2/Australia/VIC01/2020__EPI_ISL_406844 spike protein (1-1147)(G889C_L1034C) Ferritin construct
MFVFLVLLPLVSSQCVNLTTRTQLPPAYTNSFTRGVYYPDKVFRSSVLHSTQDLFLPFFSNVTWFHAIHVSGTNGTKRFDNPVLPFNDGVYFASTEKSNIIRGWIFGTTLDSKTQSLLIVNNATNVVIKVCEFQFCNDPFLGVYYHKNNKSWMESEFRVYSSANNCTFEYVSQPFLMDLEGKQGNFKNLREFVFKNIDGYFKIYSKHTPINLVRDLPQGFSALEPLVDLPIGINITRFQTLLALHRRYLTPGDSSSGWTAGAAAYYVGYLQPRTFLLKYNENGTITDAVDCALDPLSETKCTLKSFTVEKGIYQTSNFRVQPTESIVRFPNITNLCPFGEVFNATRFASVYAWNRKRISNCVADYSVLYNSASFSTFKCYGVSPTKLNDLCFTNVYADSFVIRGDEVRQIAPGQTGKIADYNYKLPDDFTGCVIAWNSNNLDSKVGGNYNYLYRLFRKSNLKPFERDISTEIYQAGSTPCNGVEGFNCYFPLQSYGFQPTNGVGYQPYRVVVLSFELLHAPATVCGPKKSTNLVKNKCVNFNFNGLTGTGVLTESNKKFLPFQQFGRDIADTTDAVRDPQTLEILDITPCSFGGVSVITPGTNTSNQVAVLYQDVNCTEVPVAIHADQLTPTWRVYSTGSNVFQTRAGCLIGAEHVNNSYECDIPIGAGICASYQTQTNSPRRARSVASQSIIAYTMSLGAENSVAYSNNSIAIPTNFTISVTTEILPVSMTKTSVDCTMYICGDSTECSNLLLQYGSFCTQLNRALTGIAVEQDKNTQEVFAQVKQIYKTPPIKDFGGFNFSQILPDPSKPSKRSFIEDLLFNKVTLADAGFIKQYGDCLGDIAARDLICAQKFNGLTVLPPLLTDEMIAQYTSALLAGTITSGWTFCAGAALQIPFAMQMAYRFNGIGVTQNVLYENQKLIANQFNSAIGKIQDSLSSTASALGKLQDVVNQNAQALNTLVKQLSSNFGAISSVLNDILSRLDKVEAEVQIDRLITGRLQSLQTYVTQQLIRAAEIRASANLAATKMSECVCGQSKRVDFCGKGYHLMSFPQSAPHGVVFLHVTYVPAQEKNFTTAPAICHDGKAHFPREGVFVSNGTHWFVTQRNFYEPQIITTDNTFVSGNCDVVIGIVNNTVYDPLQPELDSGGGGSDIIKLLNEQVNKEMQSSNLYMSMSSWCYTHSLDGAGLFLFDHAAEEYEHAKKLIIFLNENNVPVQLTSISAPEHKFEGLTQIFQKAYEHEQHISESINNIVDHAIKSKDHATFNFLQWYVAEQHEEEVLFKDILDKIELIGNENHGLYLADQYVKGIAKSRKS

SEQ ID NO: 9193 - protein, 1315 aa, Artificial Sequence
  SARS-CoV-2/Germany/BavPat1/2020__EPI_ISL_406862 spike protein (1-1147)(G889C_L1034C) Ferritin construct
MFVFLVLLPLVSSQCVNLTTRTQLPPAYTNSFTRGVYYPDKVFRSSVLHSTQDLFLPFFSNVTWFHAIHVSGTNGTKRFDNPVLPFNDGVYFASTEKSNIIRGWIFGTTLDSKTQSLLIVNNATNVVIKVCEFQFCNDPFLGVYYHKNNKSWMESEFRVYSSANNCTFEYVSQPFLMDLEGKQGNFKNLREFVFKNIDGYFKIYSKHTPINLVRDLPQGFSALEPLVDLPIGINITRFQTLLALHRSYLTPGDSSSGWTAGAAAYYVGYLQPRTFLLKYNENGTITDAVDCALDPLSETKCTLKSFTVEKGIYQTSNFRVQPTESIVRFPNITNLCPFGEVFNATRFASVYAWNRKRISNCVADYSVLYNSASFSTFKCYGVSPTKLNDLCFTNVYADSFVIRGDEVRQIAPGQTGKIADYNYKLPDDFTGCVIAWNSNNLDSKVGGNYNYLYRLFRKSNLKPFERDISTEIYQAGSTPCNGVEGFNCYFPLQSYGFQPTNGVGYQPYRVVVLSFELLHAPATVCGPKKSTNLVKNKCVNFNFNGLTGTGVLTESNKKFLPFQQFGRDIADTTDAVRDPQTLEILDITPCSFGGVSVITPGTNTSNQVAVLYQGVNCTEVPVAIHADQLTPTWRVYSTGSNVFQTRAGCLIGAEHVNNSYECDIPIGAGICASYQTQTNSPRRARSVASQSIIAYTMSLGAENSVAYSNNSIAIPTNFTISVTTEILPVSMTKTSVDCTMYICGDSTECSNLLLQYGSFCTQLNRALTGIAVEQDKNTQEVFAQVKQIYKTPPIKDFGGFNFSQILPDPSKPSKRSFIEDLLFNKVTLADAGFIKQYGDCLGDIAARDLICAQKFNGLTVLPPLLTDEMIAQYTSALLAGTITSGWTFCAGAALQIPFAMQMAYRFNGIGVTQNVLYENQKLIANQFNSAIGKIQDSLSSTASALGKLQDVVNQNAQALNTLVKQLSSNFGAISSVLNDILSRLDKVEAEVQIDRLITGRLQSLQTYVTQQLIRAAEIRASANLAATKMSECVCGQSKRVDFCGKGYHLMSFPQSAPHGVVFLHVTYVPAQEKNFTTAPAICHDGKAHFPREGVFVSNGTHWFVTQRNFYEPQIITTDNTFVSGNCDVVIGIVNNTVYDPLQPELDSGGGGSDIIKLLNEQVNKEMQSSNLYMSMSSWCYTHSLDGAGLFLFDHAAEEYEHAKKLIIFLNENNVPVQLTSISAPEHKFEGLTQIFQKAYEHEQHISESINNIVDHAIKSKDHATFNFLQWYVAEQHEEEVLFKDILDKIELIGNENHGLYLADQYVKGIAKSRKS

SEQ ID NO: 9194 - protein, 1315 aa, Artificial Sequence
  SARS-CoV-2/Wuhan/HBCDC-HB-02/2020__EPI_ISL_412978 spike protein (1-1147)(G889C_L1034C) Ferritin construct
MFVFLVLLPLVSSQCVNLTTRTQLPPAYTNSFTRGVYYPDKVFRSSVLHSTQDLFLPFFSNVTWFHAIHVSGTNGTKRFDNPVLPFNDGVYFASTEKSNIIRGWIFGTTLDSKTQSLLIVNNATNVVIKVCEFQFCNDPFLGVYYHKNNKSWMESEFRVYSSANNCTFEYVSQPFLMDLEGKQGNFKNLREFVFKNIDGYFKIYSKHTPINLVRDLPQGFSALEPLVDLPIGINITRFQTLLALHRSYLTPGDSSSGWTAGAAAYYVGYLQPRTFLLKYNENGTITDAVDCALDPLSETKCTLKSFTVEKGIYQTSNFRVQPTESIVRFPNITNLCPFGEVFNATRFASVYAWNRKRISNCVADYSVLYNSASFSTFKCYGVSPTKLNDLCFTNVYADSFVIRGDEVRQIAPGQTGKIADYNYKLPDDFTGCVIAWNSNNLDSKVGGNYNYLYRLFRKSNLKPFERDISTEIYQAGSTPCNGVEGFNCYFPLQSYGFQPTNGVGYQPYRVVVLSFELLHAPATVCGPKKSTNLVKNKCVNFNFNGLTGTGVLTESNKKFLPFQQFGRDIADTTDAVRDPQTLEILDITPCSFGGVSVITPGTNTSNQVAVLYQDVNCTEVPVAIHADQLTPTWRVYSTGSNVFQTRAGCLIGAEHVNNSYECDIPIGAGICASYQTQTNSPRRARSVASQSIIAYTMSLGAENSVAYSNNSIAIPTNFTISVTTEILPVSMTKTSVDCTMYICGDSTECSNFLLQYGSFCTQLNRALTGIAVEQDKNTQEVFAQVKQIYKTPPIKDFGGFNFSQILPDPSKPSKRSFIEDLLFNKVTLADAGFIKQYGDCLGDIAARDLICAQKFNGLTVLPPLLTDEMIAQYTSALLAGTITSGWTFCAGAALQIPFAMQMAYRFNGIGVTQNVLYENQKLIANQFNSAIGKIQDSLSSTASALGKLQDVVNQNAQALNTLVKQLSSNFGAISSVLNDILSRLDKVEAEVQIDRLITGRLQSLQTYVTQQLIRAAEIRASANLAATKMSECVCGQSKRVDFCGKGYHLMSFPQSAPHGVVFLHVTYVPAQEKNFTTAPAICHDGKAHFPREGVFVSNGTHWFVTQRNFYEPQIITTDNTFVSGNCDVVIGIVNNTVYDPLQPELDSGGGGSDIIKLLNEQVNKEMQSSNLYMSMSSWCYTHSLDGAGLFLFDHAAEEYEHAKKLIIFLNENNVPVQLTSISAPEHKFEGLTQIFQKAYEHEQHISESINNIVDHAIKSKDHATFNFLQWYVAEQHEEEVLFKDILDKIELIGNENHGLYLADQYVKGIAKSRKS

SEQ ID NO: 9195 - protein, 1315 aa, Artificial Sequence
  SARS-CoV-2/Australia/QLD02/2020__EPI_ISL_407896 spike protein (1-1147)(G889C_L1034C) Ferritin construct
MFVFLVLLPLVSSQCVNLTTRTQLPPAYTNSFTRGVYYPDKVFRSSVLHSTQDLFLPFFSNVTWFHAIHVSGTNGTKRFDNPVLPFNDGVYFASTEKSNIIRGWIFGTTLDSKTQSLLIVNNATNVVIKVCEFQFCNDPFLGVYYHKNNKSWMESEFRVYSSANNCTFEYVSQPFLMDLEGKQGNFKNLREFVFKNIDGYFKIYSKHTPINLVRDLPQGFSALEPLVDLPIGINITRFQTLLALHRSYLTPGDSSSGWTAGAAAYYVGYLQPRTFLLKYNENGTITDAVDCALDPLSETKCTLKSFTVEKGIYQTSNFRVQPTESIVRFPNITNLCPFGEVFNATRFASVYAWNRKRISNCVADYSVLYNSASFSTFKCYGVSPTKLNDLCFTNVYADSFVIRGDEVRQIAPGQTGKIADYNYKLPDDFTGCVIAWNSNNLDSKVGGNYNYLYRLFRKSNLKPFERDISTEIYQAGSTPCNGVEGFNCYFPLQSYGFQPTNGVGYQPYRVVVLSFELLHAPATVCGPKKSTNLVKNKCVNFNFNGLTGTGVLTESNKKFLPFQQFGRDIADTTDAVRDPQTLEILDITPCSFGGVSVITPGTNTSNQVAVLYQDVNCTEVPVAIHADQLTPTWRVYSTGSNVFQTRAGCLIGAEHVNNSYECDIPIGAGICASYQTQTNSPRRARSVASQSIIAYTMSLGAENSVAYSNNSIAIPTNFTISVTTEILPVSMTKTSVDCTMYICGDSTECSNLLLQYGSFCTQLNRALTGIAVEQDKNTQEVFAQVKQIYKTPPIKDFGGFNFSQILPDPSKPSKRSFIEDLLFNKVTLADAGFIKQYGDCLGDIAARDLICAQKFNGLTVLPPLLTDEMIAQYTSALLAGTITSGWTFCAGAALQIPFAMQMAYRFNGIGVTQNVLYENQKLIANQFNSAIGKIQDSLSSTASALGKLQDVVNQNAQALNTLVKQLSSNFGAISSVLNDILSRLDKVEAEVQIDRLITGRLQSLQTYVTQQLIRAAEIRASANLAATKMSECVCGQSKRVDFCGKGYHLMSFPQSAPHGVVFLHVTYVPAQEKNFTTAPAICHDGKAHFPREGVFVSNGTHWFVTQRNFYEPQIITTDNTFVSGNCDVVIGIVNNTVYDPLQLELDSGGGGSDIIKLLNEQVNKEMQSSNLYMSMSSWCYTHSLDGAGLFLFDHAAEEYEHAKKLIIFLNENNVPVQLTSISAPEHKFEGLTQIFQKAYEHEQHISESINNIVDHAIKSKDHATFNFLQWYVAEQHEEEVLFKDILDKIELIGNENHGLYLADQYVKGIAKSRKS

SEQ ID NO: 9196 - protein, 1315 aa, Artificial Sequence
  SARS-CoV-2/India/1-31/2020__EPI_ISL_413523 spike protein (1-1147)(G889C_L1034C) Ferritin construct
MFVFLVLLPLVSSQCVNLTTRTQLPPAYTNSFTRGVYYPDKVFRSSVLHSTQDLFLPFFSNVTWFHAIHVSGTNGTKRFDNPVLPFNDGVYFASTEKSNIIRGWIFGTTLDSKTQSLLIVNNATNVVIKVCEFQFCNDPFLGVYYHKNNKSWMESEFRVYSSANNCTFEYVSQPFLMDLEGKQGNFKNLREFVFKNIDGYFKIYSKHTPINLVRDLPQGFSALEPLVDLPIGINITRFQTLLALHRSYLTPGDSSSGWTAGAAAYYVGYLQPRTFLLKYNENGTITDAVDCALDPLSETKCTLKSFTVEKGIYQTSNFRVQPTESIVRFPNITNLCPFGEVFNATRFASVYAWNRKRISNCVADYSVLYNSASFSTFKCYGVSPTKLNDLCFTNVYADSFVIRGDEVRQIAPGQTGKIADYNYKLPDDFTGCVIAWNSNNLDSKVGGNYNYLYRLFRKSNLKPFERDISTEIYQAGSTPCNGVEGFNCYFPLQSYGFQPTNGVGYQPYRVVVLSFELLHAPATVCGPKKSTNLVKNKCVNFNFNGLTGTGVLTESNKKFLPFQQFGRDIADTTDAVRDPQTLEILDITPCSFGGVSVITPGTNTSNQVAVLYQDVNCTEVPVAIHADQLTPTWRVYSTGSNVFQTRAGCLIGAEHVNNSYECDIPIGAGICASYQTQTNSPRRARSVASQSIIAYTMSLGAENSVAYSNNSIAIPTNFTISVTTEILPVSMTKTSVDCTMYICGDSTECSNLLLQYGSFCTQLNRALTGIAVEQDKNTQEVFAQVKQIYKTPPIKDFGGFNFSQILPDPSKPSKRSFIEDLLFNKVTLADAGFIKQYGDCLGDIAARDLICAQKFNGLTVLPPLLTDEMIAQYTSALLAGTITSGWTFCAGAALQIPFAMQMAYRFNGIGVTQNVLYENQKLIANQFNSVIGKIQDSLSSTASALGKLQDVVNQNAQALNTLVKQLSSNFGAISSVLNDILSRLDKVEAEVQIDRLITGRLQSLQTYVTQQLIRAAEIRASANLAATKMSECVCGQSKRVDFCGKGYHLMSFPQSAPHGVVFLHVTYVPAQEKNFTTAPAICHDGKAHFPREGVFVSNGTHWFVTQRNFYEPQIITTDNTFVSGNCDVVIGIVNNTVYDPLQPELDSGGGGSDIIKLLNEQVNKEMQSSNLYMSMSSWCYTHSLDGAGLFLFDHAAEEYEHAKKLIIFLNENNVPVQLTSISAPEHKFEGLTQIFQKAYEHEQHISESINNIVDHAIKSKDHATFNFLQWYVAEQHEEEVLFKDILDKIELIGNENHGLYLADQYVKGIAKSRKS

SEQ ID NO: 9197 - protein, 1315 aa, Artificial Sequence
  SARS-CoV-2/Guangdong/GD2020087-P0008/2020__EPI_ISL_413863 spike protein (1-1147)(G889C_L1034C) Ferritin construct
MFVFLVLLPLVSSQCVNLTTRTQLPPAYTNSFTRGVYYPDKVFRSSVLHSTQDLFLPFFSNVTWFHAIHVSGTNGTKRFDNPVLPFNDGVYFASTEKSNIIRGWIFGTTLDSKTQSLLIVNNATNVVIKVCEFQFCNDPFLGVYYHKNNKSWMESEFRVYSSANNCTFEYVSQPFLMDLEGKQGNFKNLREFVFKNIDGYFKIYSKHTPINLVRDLPQGFSALEPLVDLPIGINITRFQTLLALHRSYLTPGDSSSGWTAGAAAYYVGYLQPRTFLLKYNENGTITDAVDCALDPLSETKCTLKSFTVEKGIYQTSNFRVQPTESIVRFPNITNLCPFGEVFNATRFASVYAWNRKRISNCVADYSVLYNSASFSTFKCYGVSPTKLNDLCFTNVYADSFVIRGDEVREIAPGQTGKIADYNYKLPDDFTGCVIAWNSNNLDSKVGGNYNYLYRLFRKSNLKPFERDISTEIYQAGSTPCNGVEGFNCYFPLQSYGFQPTNGVGYQPYRVVVLSFELLHAPATVCGPKKSTNLVKNKCVNFNFNGLTGTGVLTESNKKFLPFQQFGRDIADTTDAVRDPQTLEILDITPCSFGGVSVITPGTNTSNQVAVLYQDVNCTEVPVAIHADQLTPTWRVYSTGSNVFQTRAGCLIGAEHVNNSYECDIPIGAGICASYQTQTNSPRRARSVASQSIIAYTMSLGAENSVAYSNNSIAIPTNFTISVTTEILPVSMTKTSVDCTMYICGDSTECSNLLLQYGSFCTQLNRALTGIAVEQDKNTQEVFAQVKQIYKTPPIKDFGGFNFSQILPDPSKPSKRSFIEDLLFNKVTLADAGFIKQYGDCLGDIAARDLICAQKFNGLTVLPPLLTDEMIAQYTSALLAGTITSGWTFCAGAALQIPFAMQMAYRFNGIGVTQNVLYENQKLIANQFNSAIGKIQDSLSSTASALGKLQDVVNQNAQALNTLVKQLSSNFGAISSVLNDILSRLDKVEAEVQIDRLITGRLQSLQTYVTQQLIRAAEIRASANLAATKMSECVCGQSKRVDFCGKGYHLMSFPQSAPHGVVFLHVTYVPAQEKNFTTAPAICHDGKAHFPREGVFVSNGTHWFVTQRNFYEPQIITTDNTFVSGNCDVVIGIVNNTVYDPLQPELDSGGGGSDIIKLLNEQVNKEMQSSNLYMSMSSWCYTHSLDGAGLFLFDHAAEEYEHAKKLIIFLNENNVPVQLTSISAPEHKFEGLTQIFQKAYEHEQHISESINNIVDHAIKSKDHATFNFLQWYVAEQHEEEVLFKDILDKIELIGNENHGLYLADQYVKGIAKSRKS

SEQ ID NO: 9198 - protein, 1315 aa, Artificial Sequence
  SARS-CoV-2/Sweden/01/2020__EPI_ISL_411951 spike protein (1-1147)(G889C_L1034C) Ferritin construct
MFVFLVLLPLVSSQCVNLTTRTQLPPAYTNSFTRGVYYPDKVFRSSVLHSTQDLFLPFFSNVTWFHAIHVSGTNGTKRFDNPVLPFNDGVYFASTEKSNIIRGWIFGTTLDSKTQSLLIVNNATNVVIKVCEFQFCNDPFLGVYYHKNNKSWMESEFRVYSSANNCTFEYVSQPFLMDLEGKQGNFKNLREFVFKNIDGYFKIYSKHTPINLVRDLPQGFSALEPLVDLPIGINITRFQTLLALHRSYLTPGDSSSGWTAGAAAYYVGYLQPRTFLLKYNENGTITDAVDCALDPLSETKCTLKSFTVEKGIYQTSNFRVQPTESIVRFPNITNLCPFGEVFNATRFASVYAWNRKRISNCVADYSVLYNSASFSTFKCYGVSPTKLNDLCFTNVYADSFVIRGDEVRQIAPGQTGKIADYNYKLPDDFTGCVIAWNSNNLDSKVGGNYNYLYRLFRKSNLKPFERDISTEIYQAGSTPCNGVEGFNCYFPLQSYGFQPTNGVGYQPYRVVVLSFELLHAPATVCGPKKSTNLVKNKCVNFNFNGLTGTGVLTESNKKFLPFQQFGRDIADTTDAVRDPQTLEILDITPCSFGGVSVITPGTNTSNQVAVLYQDVNCTEVPVAIHADQLTPTWRVYSTGSNVFQTRAGCLIGAEHVNNSYECDIPIGAGICASYQTQTNSPRRARSVASQSIIAYTMSLGAENSVAYSNNSIAIPTNFTISVTTEILPVSMTKTSVDCTMYICGDSTECSNLLLQYGSFCTQLNRALTGIAVEQDKNTQEVFAQVKQIYKTPPIKDCGGFNFSQILPDPSKPSKRSFIEDLLFNKVTLADAGFIKQYGDCLGDIAARDLICAQKFNGLTVLPPLLTDEMIAQYTSALLAGTITSGWTFCAGAALQIPFAMQMAYRFNGIGVTQNVLYENQKLIANQFNSAIGKIQDSLSSTASALGKLQDVVNQNAQALNTLVKQLSSNFGAISSVLNDILSRLDKVEAEVQIDRLITGRLQSLQTYVTQQLIRAAEIRASANLAATKMSECVCGQSKRVDFCGKGYHLMSFPQSAPHGVVFLHVTYVPAQEKNFTTAPAICHDGKAHFPREGVFVSNGTHWFVTQRNFYEPQIITTDNTFVSGNCDVVIGIVNNTVYDPLQPELDSGGGGSDIIKLLNEQVNKEMQSSNLYMSMSSWCYTHSLDGAGLFLFDHAAEEYEHAKKLIIFLNENNVPVQLTSISAPEHKFEGLTQIFQKAYEHEQHISESINNIVDHAIKSKDHATFNFLQWYVAEQHEEEVLFKDILDKIELIGNENHGLYLADQYVKGIAKSRKS

SEQ ID NO: 9199 - protein, 1315 aa, Artificial Sequence
  SARS-CoV-2/Tianmen/HBCDC-HB-07/2020__EPI_ISL_412983 spike protein (1-1147)(G889C_L1034C) Ferritin construct
MFVFLVLLPLVSSQCVNLTTRTQLPPAYTNSFTRGVYYPDKVFRSSVLHSTQDLFLPFFSNVTWFHAIHVSGTNGTKRFDNPVLPFNDGVYFASTEKSNIIRGWIFGTTLDSKTQSLLIVNNATNVVIKVCEFQFCNDPFLGVYYHKNNKSWMESEFRVYSSANNCTFEYVSQPFLMDLEGKQGNFKNLREFVFKNIDGYFKIYSKHTPINLVRDLPQGFSALEPLVDLPIGINITRFQTLLALHRSYLTPGDSSSGWTAGAAAYYVGYLQPRTFLLKYNENGTITDAVDCALDPLSETKCTLKSFTVEKGIYQTSNFRVQPTESIVRFPNITNLCPFGEVFNATRFASVYAWNRKRISNCVADYSVLYNSASFSTFKCYGVSPTKLNDLCFTNVYADSFVIRGDEVRQIAPGQTGKIADYNYKLPDDFTGCVIAWNSNNLDSKVGGNYNYLYRLFRKSNLKPFERDISTEIYQAGSTPCNGVEGFNCYFPLQSYGFQPTNGVGYQPYRVVVLSFELLHAPATVCGPKKSTNLVKNKCVNFNFNGLTGTGVLTESNKKFLPFQQFGRDIADTTDAVRDPQTLEILDITPCSFGGVSVITPGTNTSNQVAVLYQDLNCTEVPVAIHADQLTPTWRVYSTGSNVFQTRAGCLIGAEHVNNSYECDIPIGAGICASYQTQTNSPRRARSVASQSIIAYTMSLGAENSVAYSNNSIAIPTNFTISVTTEILPVSMTKTSVDCTMYICGDSTECSNLLLQYGSFCTQLNRALTGIAVEQDKNTQEVFAQVKQIYKTPPIKDFGGFNFSQILPDPSKPSKRSFIEDLLFNKVTLADAGFIKQYGDCLGDIAARDLICAQKFNGLTVLPPLLTDEMIAQYTSALLAGTITSGWTFCAGAALQIPFAMQMAYRFNGIGVTQNVLYENQKLIANQFNSAIGKIQDSLSSTASALGKLQDVVNQNAQALNTLVKQLSSNFGAISSVLNDILSRLDKVEAEVQIDRLITGRLQSLQTYVTQQLIRAAEIRASANLAATKMSECVCGQSKRVDFCGKGYHLMSFPQSAPHGVVFLHVTYVPAQEKNFTTAPAICHDGKAHFPREGVFVSNGTHWFVTQRNFYEPQIITTDNTFVSGNCDVVIGIVNNTVYDPLQPELDSGGGGSDIIKLLNEQVNKEMQSSNLYMSMSSWCYTHSLDGAGLFLFDHAAEEYEHAKKLIIFLNENNVPVQLTSISAPEHKFEGLTQIFQKAYEHEQHISESINNIVDHAIKSKDHATFNFLQWYVAEQHEEEVLFKDILDKIELIGNENHGLYLADQYVKGIAKSRKS

SEQ ID NO: 9200 - protein, 1315 aa, Artificial Sequence
  SARS-CoV-2/Hong Kong/case42_VM20002493/2020__EPI_ISL_414527 spike protein (1-1147)(G889C_L1034C) Ferritin construct
MFVFLVLLPLVSSQCVNLTTRTQLPPAYTNSFTRGVYYPDKVFRSSVLHSTQDLFLPFFSNVTWFHAIHVSGTNGTKRFDNPVLPFNDGVYFASTEKSNIIRGWIFGTTLDSKTQSLLIVNNATNVVIKVCEFQFCNDPFLGVYYHKNNKSWMESEFRVYSSANNCTFEYVSQPFLMDLEGKQGNFKNLREFVFKNIDGYFKIYSKHTPINLVRDLPQGFSALEPLVDLPIGINITRFQTLLALHRSYLTPGDSSSGWTAGAAAYYVGYLQPRTFLLKYNENGTITDAVDCALDPLSETKCTLKSFTVEKGIYQTSNFRVQPTESIVRFPNITNLCPFGEVFNATRFASVYAWNRKRISNCVADYSVLYNSASFSTFKCYGVSPTKLNDLCFTNVYADSFVIRGDEVRQIAPGQTGKIADYNYKLPDDFTGCVIAWNSNNLDSKVGGNYNYLYRLFRKSNLKPFERDISTEIYQAGSTPCNGVEGFNCYFPLQSYGFQPTNGVGYQPYRVVVLSFELLHAPATVCGPKKSTNLVKNKCVNFNFNGLTGTGVLTESNKKFLPFQQFGRDIADTTDAVRDPQTLEILDITPCSFGGVSVITPGTNTSNQVAVLYQDVNCTEVPVAIHADQLTPTWRVYSTGSNVFQTRAGCLIGAEHVNNSYECDIPIGAGICASYQTQTNSPRRARSVASQSIIAYTMSLGAENSVAYSNNSIAIPTNFAISVTTEILPVSMTKTSVDCTMYICGDSTECSNLLLQYGSFCTQLNRALTGIAVEQDKNTQEVFAQVKQIYKTPPIKDFGGFNFSQILPDPSKPSKRSFIEDLLFNKVTLADAGFIKQYGDCLGDIAARDLICAQKFNGLTVLPPLLTDEMIAQYTSALLAGTITSGWTFCAGAALQIPFAMQMAYRFNGIGVTQNVLYENQKLIANQFNSAIGKIQDSLSSTASALGKLQDVVNQNAQALNTLVKQLSSNFGAISSVLNDILSRLDKVEAEVQIDRLITGRLQSLQTYVTQQLIRAAEIRASANLAATKMSECVCGQSKRVDFCGKGYHLMSFPQSAPHGVVFLHVTYVPAQEKNFTTAPAICHDGKAHFPREGVFVSNGTHWFVTQRNFYEPQIITTDNTFVSGNCDVVIGIVNNTVYDPLQPELDSGGGGSDIIKLLNEQVNKEMQSSNLYMSMSSWCYTHSLDGAGLFLFDHAAEEYEHAKKLIIFLNENNVPVQLTSISAPEHKFEGLTQIFQKAYEHEQHISESINNIVDHAIKSKDHATFNFLQWYVAEQHEEEVLFKDILDKIELIGNENHGLYLADQYVKGIAKSRKS

SEQ ID NO: 9201 - protein, 1315 aa, Artificial Sequence
  SARS-CoV-2/USA/CruiseA-23/2020__EPI_ISL_414482 spike protein (1-1147)(G889C_L1034C) Ferritin construct
MFVFLVLLPLVSSQCVNLTTRTQLPPAYTNSFTRGVYYPDKVFRSSVLHSTQDLFLPFFSNVTWFHAIHVSGTNGTKRFDNPVLPFNDGVYFASTEKSNIIRGWIFGTTLDSKTQSLLIVNNATNVVIKVCEFQFCNDPFLGVYYHKNNKSWMESEFRVYSSANNCTFEYVSQPFLMDLEVKQGNFKNLREFVFKNIDGYFKIYSKHTPINLVRDLPQGFSALEPLVDLPIGINITRFQTLLALHRSYLTPGDSSSGWTAGAAAYYVGYLQPRTFLLKYNENGTITDAVDCALDPLSETKCTLKSFTVEKGIYQTSNFRVQPTESIVRFPNITNLCPFGEVFNATRFASVYAWNRKRISNCVADYSVLYNSASFSTFKCYGVSPTKLNDLCFTNVYADSFVIRGDEVRQIAPGQTGKIADYNYKLPDDFTGCVIAWNSNNLDSKVGGNYNYLYRLFRKSNLKPFERDISTEIYQAGSTPCNGVEGFNCYFPLQSYGFQPTNGVGYQPYRVVVLSFELLHAPATVCGPKKSTNLVKNKCVNFNFNGLTGTGVLTESNKKFLPFQQFGRDIADTTDAVRDPQTLEILDITPCSFGGVSVITPGTNTSNQVAVLYQDVNCTEVPVAIHADQLTPTWRVYSTGSNVFQTRAGCLIGAEHVNNSYECDIPIGAGICASYQTQTNSPRRARSVASQSIIAYTMSLGAENSVAYSNNSIAIPTNFTISVTTEILPVSMTKTSVDCTMYICGDSTECSNLLLQYGSFCTQLNRALTGIAVEQDKNTQEVFAQVKQIYKTPPIKDFGGFNFSQILPDPSKPSKRSFIEDLLFNKVTLADAGFIKQYGDCLGDIAARDLICAQKFNGLTVLPPLLTDEMIAQYTSALLAGTITSGWTFCAGAALQIPFAMQMAYRFNGIGVTQNVLYENQKLIANQFNSAIGKIQDSLSSTASALGKLQDVVNQNAQALNTLVKQLSSNFGAISSVLNDILSRLDKVEAEVQIDRLITGRLQSLQTYVTQQLIRAAEIRASANLAATKMSECVCGQSKRVDFCGKGYHLMSFPQSAPHGVVFLHVTYVPAQEKNFTTAPAICHDGKAHFPREGVFVSNGTHWFVTQRNFYEPQIITTDNTFVSGNCDVVIGIVNNTVYDPLQPELDSGGGGSDIIKLLNEQVNKEMQSSNLYMSMSSWCYTHSLDGAGLFLFDHAAEEYEHAKKLIIFLNENNVPVQLTSISAPEHKFEGLTQIFQKAYEHEQHISESINNIVDHAIKSKDHATFNFLQWYVAEQHEEEVLFKDILDKIELIGNENHGLYLADQYVKGIAKSRKS

SEQ ID NO: 9202 - protein, 1315 aa, Artificial Sequence
  SARS-CoV-2/Hong Kong/case85_VM20002868/2020__EPI_ISL_414519 spike protein (1-1147)(G889C_L1034C) Ferritin construct
MFVFLVLVPLVSSQCVNLTTRTQLPPAYTNSFTRGVYYPDKVFRSSVLHSTQDLFLPFFSNVTWFHAIHVSGTNGTKRFDNPVLPFNDGVYFASTEKSNIIRGWIFGTTLDSKTQSLLIVNNATNVVIKVCEFQFCNDPFLGVYYHKNNKSWMESEFRVYSSANNCTFEYVSQPFLMDLEGKQGNFKNLREFVFKNIDGYFKIYSKHTPINLVRDLPQGFSALEPLVDLPIGINITRFQTLLALHRSYLTPGDSSSGWTAGAAAYYVGYLQPRTFLLKYNENGTITDAVDCALDPLSETKCTLKSFTVEKGIYQTSNFRVQPTESIVRFPNITNLCPFGEVFNATRFASVYAWNRKRISNCVADYSVLYNSASFSTFKCYGVSPTKLNDLCFTNVYADSFVIRGDEVRQIAPGQTGKIADYNYKLPDDFTGCVIAWNSNNLDSKVGGNYNYLYRLFRKSNLKPFERDISTEIYQAGSTPCNGVEGFNCYFPLQSYGFQPTNGVGYQPYRVVVLSFELLHAPATVCGPKKSTNLVKNKCVNFNFNGLTGTGVLTESNKKFLPFQQFGRDIADTTDAVRDPQTLEILDITPCSFGGVSVITPGTNTSNQVAVLYQDVNCTEVPVAIHADQLTPTWRVYSTGSNVFQTRAGCLIGAEHVNNSYECDIPIGAGICASYQTQTNSPRRARSVASQSIIAYTMSLGAENSVAYSNNSIAIPTNFTISVTTEILPVSMTKTSVDCTMYICGDSTECSNLLLQYGSFCTQLNRALTGIAVEQDKNTQEVFAQVKQIYKTPPIKDFGGFNFSQILPDPSKPSKRSFIEDLLFNKVTLADAGFIKQYGDCLGDIAARDLICAQKFNGLTVLPPLLTDEMIAQYTSALLAGTITSGWTFCAGAALQIPFAMQMAYRFNGIGVTQNVLYENQKLIANQFNSAIGKIQDSLSSTASALGKLQDVVNQNAQALNTLVKQLSSNFGAISSVLNDILSRLDKVEAEVQIDRLITGRLQSLQTYVTQQLIRAAEIRASANLAATKMSECVCGQSKRVDFCGKGYHLMSFPQSAPHGVVFLHVTYVPAQEKNFTTAPAICHDGKAHFPREGVFVSNGTHWFVTQRNFYEPQIITTDNTFVSGNCDVVIGIVNNTVYDPLQPELDSGGGGSDIIKLLNEQVNKEMQSSNLYMSMSSWCYTHSLDGAGLFLFDHAAEEYEHAKKLIIFLNENNVPVQLTSISAPEHKFEGLTQIFQKAYEHEQHISESINNIVDHAIKSKDHATFNFLQWYVAEQHEEEVLFKDILDKIELIGNENHGLYLADQYVKGIAKSRKS

SEQ ID NO: 9203 - protein, 1315 aa, Artificial Sequence; identical to SEQ ID NO: 9193
  SARS-CoV-2/England/200990660/2020__EPI_ISL_414523 spike protein (1-1147)(G889C_L1034C) Ferritin construct

SEQ ID NO: 9204 - protein, 1315 aa, Artificial Sequence
  SARS-CoV-2/Australia/NSW09/2020__EPI_ISL_413595 spike protein (1-1147)(G889C_L1034C) Ferritin construct
MFVFLVLLPLVSSQCVNLTTRTQLPPAYTNSFTRGVYYPDKVFRSSVLHSTQDLFLPFFSNVTWFHAIHVSGTNGTKRFDNPVLPFNDGVYFASTEKSNIIRGWIFGTTLDSKTQSLLIVNNATNVVIKVCEFQFCNDPFLGVYYHKNNKSWMESEFRVYSSANNCTFEYVSQPFLMDLEGKQGNFKNLREFVFKNIDGYFKIYSKHTPINLVRDLPQGFSALEPLVDLPIGINITRFQTLLALHRSYLTPGDSSSGWTAGAAAYYVGYLQPRTFLLKYNENGTITDAVDCALDPLSETKCTLKSFTVEKGIYQTSNFRVQPTESIVRFPNITNLCPFGEVFNATRFASVYAWNRKRISNCVADYSVLYNSASFSTFKCYGVSPTKLNDLCFTNVYADSFVIRGDEVRQIAPGQTGKIADYNYKLPDDFTGCVIAWNSNNLDSKVGGNYNYLYRLFRKSNLKPFERDISTEIYQAGSTPCNGVEGFNCYFPLQSYGFQPTNGVGYQPYRVVVLSFELLHAPATVCGPKKSTNLVKNKCVNFNFNGLTGTGVLTESNKKFLPFQQFGRDIADTTDAVRDPQTLEILDITPCSFGGVSVITPGTNTSNQVAVLYQDVNCTEVPVAIHADQLTPTWRVYSTGSNVFQTRAGCLIGAEHVNNSYECDIPIGAGICASYQTQTNSPRRARSVASQSIIAYTMSLGAENSVAYSNNSIAIPTNFTISVTTEILPVSMTKTSVDCTMYICGDSTECSNLLLQYGSFCTQLNRALTGIAVEQDKNTQEVFAQVKQIYKTPPIKDFGGFNFSQILPDPSKPSKRSFIEDLLFNKVTLADAGFIKQYGDCLGDIAARDLICAQKFNGLTVLPPLLTDEMIAQYTSALLAGTITSGWTFCAGAALQIPFAMQMAYRFNGIGVTQNVLYENQKLIANQFNSAIGKIQDSLSFTASALGKLQDVVNQNAQALNTLVKQLSSNFGAISSVLNDILSRLDKVEAEVQIDRLITGRLQSLQTYVTQQLIRAAEIRASANLAATKMSECVCGQSKRVDFCGKGYHLMSFPQSAPHGVVFLHVTYVPAQEKNFTTAPAICHDGKAHFPREGVFVSNGTHWFVTQRNFYEPQIITTDNTFVSGNCDVVIGIVNNTVYDPLQPELDSGGGGSDIIKLLNEQVNKEMQSSNLYMSMSSWCYTHSLDGAGLFLFDHAAEEYEHAKKLIIFLNENNVPVQLTSISAPEHKFEGLTQIFQKAYEHEQHISESINNIVDHAIKSKDHATFNFLQWYVAEQHEEEVLFKDILDKIELIGNENHGLYLADQYVKGIAKSRKS

SEQ ID NO: 9205 - protein, 1315 aa, Artificial Sequence; identical to SEQ ID NO: 9185
  SARS-CoV-2/Australia/NSW10/2020__EPI_ISL_413596 spike protein (1-1147)(G889C_L1034C) Ferritin construct

SEQ ID NO: 9206 - protein, 1315 aa, Artificial Sequence
  SARS-CoV-2/Switzerland/1000477797/2020__EPI_ISL_413023 spike protein (1-1147)(G889C_L1034C) Ferritin construct
MFVFLVLLPLVSSQCVNLTTRTQLPPAYTNSFTRGVYYPDKVFRSSVLHSTQDLFLPFFSNVTWFHAIHVSGTNGTKRFDNPVLPFNDGVYFASTEKSNIIRGWIFGTTLDSKTQSLLIVNNATNVVIKVCEFQFCNDPFLGVYYHKNNKSWMESEFRVYSSANNCTFEYVSQPFLMDLEGKQGNFKNLREFVFKNIDGYFNIYSKHTPINLVRDLPQGFSALEPLVDLPIGINITRFQTLLALHRSYLTPGDSSSGWTAGAAAYYVGYLQPRTFLLKYNENGTITDAVDCALDPLSETKCTLKSFTVEKGIYQTSNFRVQPTESIVRFPNITNLCPFGEVFNATRFASVYAWNRKRISNCVADYSVLYNSASFSTFKCYGVSPTKLNDLCFTNVYADSFVIRGDEVRQIAPGQTGKIADYNYKLPDDFTGCVIAWNSNNLDSKVGGNYNYLYRLFRKSNLKPFERDISTEIYQAGSTPCNGVEGFNCYFPLQSYGFQPTNGVGYQPYRVVVLSFELLHAPATVCGPKKSTNLVKNKCVNFNFNGLTGTGVLTESNKKFLPFQQFGRDIADTTDAVRDPQTLEILDITPCSFGGVSVITPGTNTSNQVAVLYQGVNCTEVPVAIHADQLTPTWRVYSTGSNVFQTRAGCLIGAEHVNNSYECDIPIGAGICASYQTQTNSPRRARSVASQSIIAYTMSLGAENSVAYSNNSIAIPTNFTISVTTEILPVSMTKTSVDCTMYICGDSTECSNLLLQYGSFCTQLNRALTGIAVEQDKNTQEVFAQVKQIYKTPPIKDFGGFNFSQILPDPSKPSKRSFIEDLLFNKVTLADAGFIKQYGDCLGDIAARDLICAQKFNGLTVLPPLLTDEMIAQYTSALLAGTITSGWTFCAGAALQIPFAMQMAYRFNGIGVTQNVLYENQKLIANQFNSAIGKIQDSLSSTASALGKLQDVVNQNAQALNTLVKQLSSNFGAISSVLNDILSRLDKVEAEVQIDRLITGRLQSLQTYVTQQLIRAAEIRASANLAATKMSECVCGQSKRVDFCGKGYHLMSFPQSAPHGVVFLHVTYVPAQEKNFTTAPAICHDGKAHFPREGVFVSNGTHWFVTQRNFYEPQIITTDNTFVSGNCDVVIGIVNNTVYDPLQPELDSGGGGSDIIKLLNEQVNKEMQSSNLYMSMSSWCYTHSLDGAGLFLFDHAAEEYEHAKKLIIFLNENNVPVQLTSISAPEHKFEGLTQIFQKAYEHEQHISESINNIVDHAIKSKDHATFNFLQWYVAEQHEEEVLFKDILDKIELIGNENHGLYLADQYVKGIAKSRKS

SEQ ID NO: 9207 - protein, 1315 aa, Artificial Sequence
  SARS-CoV-2/Belgium/BA-02291/2020__EPI_ISL_415159 spike protein (1-1147)(G889C_L1034C) Ferritin construct
MFVFLVLLPLVSSQCVNLTTRTQLPPAYTNSFTRGVYYPDKVFRSSVLHSTQDLFLPFFSNVTWFHAIHVSGTNGTKRFDNPVLPFNDGVYFASTEKSNIIRGWIFGTTLDSKTQSLLIVNNATNVVIKVCEFQFCNDPFLGVYYHKNNKSWMESEFRVYSSANNCTFEYVSQPFLMDLEGKQGNFKNLREFVFKNIDGYFKIYSKHTPINLVRDLPQGFSALEPLVDLPIGINITRFQTLLALHRSYLTPGDSSSGWTAGAAAYYVGYLQPRTFLLKYNENGTITDAVDCALDPLSETKCTLKSFTVEKGIYQTSNFRVQPTESIVRFPNITNLCPFGEVFNATRFASVYAWNRKRISNCVADYSVLYNSASFSTFKCYGVSPTKLNDLCFTNVYADSFVIRGDEVRQIAPGQTGKIADYNYKLPDDFTGCVIAWNSNNLDSKVGGNYNYLYRLFRRSNLKPFERDISTEIYQAGSTPCNGVEGFNCYFPLQSYGFQPTNGVGYQPYRVVVLSFELLPAPATVCGPKKSTNLVKNKCVNFNFNGLTGTGVLTESNKKFLPFQQFGRDIADTTDAVRDPQTLEILDITPCSFGGVSVITPGTNTSNQVAVLYQGVNCTEVPVAIHADQLTPTWRVYSTGSNVFQTRAGCLIGAEHVNNSYECDIPIGAGICASYQTQTNSPRRARSVASQSIIAYTMSLGAENSVAYSNNSIAIPTNFTISVTTEILPVSMTKTSVDCTMYICGDSTECSNLLLQYGSFCTQLNRALTGIAVEQDKNTQEVFAQVKQIYKTPPIKDFGGFNFSQILPDPSKPSKRSFIEDLLFNKVTLADAGFIKQYGDCLGDIAARDLICAQKFNGLTVLPPLLTDEMIAQYTSALLAGTITSGWTFCAGAALQIPFAMQMAYRFNGIGVTQNVLYENQKLIANQFNSAIGKIQDSLSSAAPALGKLQDVVNQNAQALNTLVKQLSSNFGAISSVLNDILSRLDKVEAEVQIDRLITGRLQSLQTYVTQQLIRAAEIRASANLAATKMSECVCGQSKRVDFCGKGYHLMSFPQSAPHGVVFLHVTYVPAQEKNFTTAPAICHDGKAHFPREGVFVSNGTHWFVTQRNFYEPQIITTDNTFVSGNCDVVIGIVNNTVYDPLQPELDSGGGGSDIIKLLNEQVNKEMQSSNLYMSMSSWCYTHSLDGAGLFLFDHAAEEYEHAKKLIIFLNENNVPVQLTSISAPEHKFEGLTQIFQKAYEHEQHISESINNIVDHAIKSKDHATFNFLQWYVAEQHEEEVLFKDILDKIELIGNENHGLYLADQYVKGIAKSRKS

SEQ ID NO: 9208 - protein, 1315 aa, Artificial Sequence
  SARS-CoV-2/USA/WA8-UW5/2020__EPI_ISL_413486 spike protein (1-1147)(G889C_L1034C) Ferritin construct
MFVFLVLLPLVSSQCVNLTTRTQLPPAYTNSFTRGVYYPDKVFRSSVLHSTQDLFLPFFSNVTWFHAIHVSGTNGTKRFDNPVLPFNDGVYFASTEKSNIIRGWIFGTTLDSKTQSLLIVNNATNVVIKVCEFQFCNDPFLGVYYHKNNKSWMESEFRVYSSANNCTFEYVSQPFLMDLEGKQGNFKNLREFVFKNIDGYFKIYSKHTPINLVRDLPQGFSALEPLVDLPIGINITRFQTLLALHRSYLTPGDSSSGWTAGAAAYYVGYLQPRTFLLKYNENGTITDAVDCALDPLSETKCTLKSFTVEKGIYQTSNFRVQPTESIVRFPNITNLCPFGEVFNATRFASVYAWNRKRISNCVADYSVLYNSASFSTFKCYGVSPTKLNDLCFTNVYADSFVIRGDEVRQIAPGQTGKIADYNYKLPDDFTGCVIAWNSNNLDSKVGGNYNYLYRLFRKSNLKPFERDISTEIYQAGSTPCNGVEGFNCYFPLQSYGFQPTNGVGYQPYRVVVLSFELLHAPATVCGPKKSTNLVKNKCVNFNFNGLTGTGVLTESNKKFLPFQQFGRDIADTTDAVRDPQTLEILDITPCSFGGVSVITPGTNTSNQVAVLYQDVNCTEVPVAIHADQLTPTWRVYSTGSNVFQTRAGCLIGAEYVNNSYECDIPIGAGICASYQTQTNSPRRARSVASQSIIAYTMSLGAENSVAYSNNSIAIPTNFTISVTTEILPVSMTKTSVDCTMYICGDSTECSNLLLQYGSFCTQLNRALTGIAVEQDKNTQEVFAQVKQIYKTPPIKDFGGFNFSQILPDPSKPSKRSFIEDLLFNKVTLADAGFIKQYGDCLGDIAARDLICAQKFNGLTVLPPLLTDEMIAQYTSALLAGTITSGWTFCAGAALQIPFAMQMAYRFNGIGVTQNVLYENQKLIANQFNSAIGKIQDSLSSTASALGKLQDVVNQNAQALNTLVKQLSSNFGAISSVLNDILSRLDKVEAEVQIDRLITGRLQSLQTYVTQQLIRAAEIRASANLAATKMSECVCGQSKRVDFCGKGYHLMSFPQSAPHGVVFLHVTYVPAQEKNFTTAPAICHDGKAHFPREGVFVSNGTHWFVTQRNFYEPQIITTDNTFVSGNCDVVIGIVNNTVYDPLQPELDSGGGGSDIIKLLNEQVNKEMQSSNLYMSMSSWCYTHSLDGAGLFLFDHAAEEYEHAKKLIIFLNENNVPVQLTSISAPEHKFEGLTQIFQKAYEHEQHISESINNIVDHAIKSKDHATFNFLQWYVAEQHEEEVLFKDILDKIELIGNENHGLYLADQYVKGIAKSRKS

SEQ ID NO: 9209 - protein, 1315 aa, Artificial Sequence
  SARS-CoV-2/England/20102000506/2020__EPI_ISL_415147 spike protein (1-1147)(G889C_L1034C) Ferritin construct
MFVFLVLLPLVSSQCVNLTTRTQLPPAYTNSFTRGVYYPDKVFRSSVLHSTQDLFLPFFSNVTWFHAIHVSGTNGTKRFDNPVLPFNDGVYFASTEKSNIIRGWIFGTTLDSKTQSLLIVNNATNVVIKVCEFQFCNDPFLGVYYHKNNKSWMESEFRVYSSANNCTFEYVSQPFLMDLEGKQGNFKNLREFVFKNIDGYFKIYSKHTPINLVRDLPQGFSALEPLVDLPIGINITRFQTLLALHRSYLTPGDSSSGWTAGAAAYYVGYLQPRTFLLKYNENGTITDAVDCALDPLSETKCTLKSFTVEKGIYQTSNFRVQPTESIVRFPNITNLCPFGEVFNATRFASVYAWNRKRISNCVADYSVLYNSASFSTFKCYGVSPTKLNDLCFTNVYADSFVIRGDEVRQIAPGQTGKIADYNYKLPDDFTGCVIAWNSNNLDSKVGGNYNYLYRLFRKSNLKPFERDISTEIYQAGSTPCNGVEGFNCYFPLQSYGFQPTNGVGYQPYRVVVLSFELLHAPATVCGPKKSTNLVKNKCVNFNFNGLTGTGVLTESNKKFLPFQQFGRDIADTTDAVRDPQTLEILDITPCSFGGVSVITPGTNTSNQVAVLYQGVNCTEVPVAIHADQLTPTWRVYSTGSNVFQTRAGCLIGAEHVNNSYECDIPIGAGICASYQTQTNSPRRARSVASQSIIAYTMSLGAENSVAYSNNSIAIPTNFTISVTTEILPVSMTKTSVDCTMYICGDSTECSNLLLQYGSFCTQLNRALTGIAVEQDKNTQEVFAQVKQIYKTPPIKDFGGFNFSQILPDPSKPSKRSFIEDLLFNKVTLADAGFIKQYGYCLGDIAARDLICAQKFNGLTVLPPLLTDEMIAQYTSALLAGTITSGWTFCAGAALQIPFAMQMAYRFNGIGVTQNVLYENQKLIANQFNSAIGKIQDSLSSTASALGKLQDVVNQNAQALNTLVKQLSSNFGAISSVLNDILSRLDKVEAEVQIDRLITGRLQSLQTYVTQQLIRAAEIRASANLAATKMSECVCGQSKRVDFCGKGYHLMSFPQSAPHGVVFLHVTYVPAQEKNFTTAPAICHDGKAHFPREGVFVSNGTHWFVTQRNFYEPQIITTDNTFVSGNCDVVIGIVNNTVYDPLQPELDSGGGGSDIIKLLNEQVNKEMQSSNLYMSMSSWCYTHSLDGAGLFLFDHAAEEYEHAKKLIIFLNENNVPVQLTSISAPEHKFEGLTQIFQKAYEHEQHISESINNIVDHAIKSKDHATFNFLQWYVAEQHEEEVLFKDILDKIELIGNENHGLYLADQYVKGIAKSRKS

SEQ ID NO: 9210 - protein, 1315 aa, Artificial Sequence
  SARS-CoV-2/Belgium/VAG-03013/2020__EPI_ISL_415155 spike protein (1-1147)(G889C_L1034C) Ferritin construct
MFVFLVLLPLVSSQCVNLTTRTQLPPAYTNSFTRGVYYPDKVFRSSVLHSTQDLFLPFFSNVTWFHAIHVSGTNGTKRFDNPVLPFNDGVYFASTEKSNIIRGWIFGTTLDSKTQSLLIVNNATNVVIKVCEFQFCNDPFLGVYYHKNNKSWMESEFRVYSSANNCTFEYVSQPFLMDLEGKQGNFKNLREFVFKNIDGYFKIYSKHTPINLVRDLPQGFSALEPLVDLPIGINITRFQTLLALHRSYLTPGDSSSGWTAGAAAYYVGYLQPRTFLLKYNENGTITDAVDCALDPLSETKCTLKSFTVEKGIYQTSNFRVQPTESIVRFPNITNLCPFGEVFNATRFASVYAWNRKRISNCVADYSVLYNSASFSTFKCYGVSPTKLNDLCFTNVYADSFVIRGDEVRQIAPGQTGKIADYNYKLPDDFTGCVIAWNSNNLDSKVGGNYNYLYRLFRKSNLKPFERDISTEIYQAGSTPCNGVEGFNCYFPLQSYGFQPTNGVGYQPYRVVVLSFELLHAPATVCGPKKSTNLVKNKCVNFNFNGLTGTGVLTESNKKFLPFQQFGRDIADTTDAVRDPQTLEILDITPCSFGGVSVITPGTNTSNQVAVLYQGVNCTEVPVAIHADQLTPTWRVYSTGSNVFQTRAGCLIGAEHVNNSYECDIPIGAGICASYQTQTNSPRRARSVASQSIIAYTMSLGAENSVAYSNNSIAIPTNFTISVTTEILPVSMTKTSVDCTMYICGDSTECSNLLLQYGSFCTQLNRALTGIAVEQDKNTQEVFAQVKQIYKTPPIKDFGGFNFSQILPDPSKPSKRSFIEDLLFNKVTLADAGFIKQYGDCLGDIAARDLICAQKFNGLTVLPPLLTDEMIAQYTSALLAGTITSGWTFCAGAALQIPFAMQMAYRFNGIGVTQNVLYENQKLIANQFNSAIGKIQDSLSSTATALGKLQDVVNQNAQALNTLVKQLSSNFGAISSVLNDILSRLDKVEAEVQIDRLITGRLQSLQTYVTQQLIRAAEIRASANLAATKMSECVCGQSKRVDFCGKGYHLMSFPQSAPHGVVFLHVTYVPAQEKNFTTAPAICHDGKAHFPREGVFVSNGTHWFVTQRNFYEPQIITTDNTFVSGNCDVVIGIVNNTVYDPLQPELDSGGGGSDIIKLLNEQVNKEMQSSNLYMSMSSWCYTHSLDGAGLFLFDHAAEEYEHAKKLIIFLNENNVPVQLTSISAPEHKFEGLTQIFQKAYEHEQHISESINNIVDHAIKSKDHATFNFLQWYVAEQHEEEVLFKDILDKIELIGNENHGLYLADQYVKGIAKSRKS

SEQ ID NO: 9211 - protein, 1315 aa, Artificial Sequence
  SARS-CoV-2/Belgium/BC-03016/2020__EPI_ISL_415157 spike protein (1-1147)(G889C_L1034C) Ferritin construct
MFVFLVLLPLVSSQCVNLTTRTQLPPAYTNSFTRGVYYPDKVFRSSVLHSTQDLFLPFFSNVTWFHAIHVSGTNGTKRFDNPVLPFNDGVYFASTEKSNIIRGWIFGTTLDSKTQSLLIVNNATNVVIKVCEFQFCNDPFLGVYYHKNNKSWMESEFRVYSSANNCTFEYVSQPFLMDLEGKQGNFKNLREFVFKNIDGYFKIYSKHTPINLVRDLPQGFSALEPLVDLPIGINITRFQTLLALHRSYLTPGDSSSGWTAGAAAYYVGYLQPRTFLLKYNENGTITDAVDCALDPLSETKCTLKSFTVEKGIYQTSNFRVQPTESIVRFPNITNLCPFGEVFNATRFASVYAWNRKRISNCVADYSVLYNSASFSTFKCYGVSPTKLNDLCFTNVYADSFVIRGDEVRQIAPGQTGKIADYNYKLPDDFTGCVIAWNSNNLDSKVGGNYNYLYRLFRKSNLKPFERDISTEIYQAGSTPCNGVEGFNCYFPLQSYGFQPTNGVGYQPYRVVVLSFELLHAPATVCGPKKSTNLVKNKCVNFNFNGLTGTGVLTESNKKFLPFQQFGRDIADTTDAVRDPQTLEILDITPCSFGGVSVITPGTNTSNQVAVLYQGVNCTEVPVAIHADQLTPTWRVYSTGSNVFQTRAGCLIGAEHVNNSYECDIPIGAGICASYQTQTNSPRRARSVASQSIIAYTMSLGAENSVAYSNNSIAIPTNFTISVTTEILPVSMTKTSVDCTMYICGDSTECSNLLLQYGSFCTQLNRALTGIAVEQDKNTQEVFAQVKQIYKTPPIKDFGGFNFSQILPDPSKPSKRSFIEDLLFNKVTLADAGFIKQYGDCLGDIAARDLICAQKFNGLTVLPPLLTDEMIAQYTSALLAGTITSGWTFCAGAALQIPFAMQMAYRFNGIGVTQNVLYENQKLIANQFNSAIGKIQDSLSSTAPALGKLQDVVNQNAQALNTLVKQLSSNFGAISSVLNDILSRLDKVEAEVQIDRLITGRLQSLQTYVTQQLIRAAEIRASANLAATKMSECVCGQSKRVDFCGKGYHLMSFPQSAPHGVVFLHVTYVPAQEKNFTTAPAICHDGKAHFPREGVFVSNGTHWFVTQRNFYEPQIITTDNTFVSGNCDVVIGIVNNTVYDPLQPELDSGGGGSDIIKLLNEQVNKEMQSSNLYMSMSSWCYTHSLDGAGLFLFDHAAEEYEHAKKLIIFLNENNVPVQLTSISAPEHKFEGLTQIFQKAYEHEQHISESINNIVDHAIKSKDHATFNFLQWYVAEQHEEEVLFKDILDKIELIGNENHGLYLADQYVKGIAKSRKS

SEQ ID NO: 9212 - protein, 1315 aa, Artificial Sequence
  SARS-CoV-2/Germany/BavPat3/2020__EPI_ISL_414521 spike protein (1-1147)(G889C_L1034C) Ferritin construct
MFVFLVLLPLVSSQCVNLTTRTQLPPAYTNSFTRGVYYPDKVFRSSVLHSTQDLFLPFFSNVTWFHAIHVSGTNGTKRFDNPVLPFNDGVYFASTEKSNIIRGWIFGTTLDSKTQSLLIVNNATNVVIKVCEFQFCNDPFLGVYYHKNNKSWMESEFRVYSSANNCTFEYVSQPFLMDLEGKQGNFKNLREFVFKNIDGYFKIYSKHTPINLVRDLPQGFSALEPLVDLPIGINITRFQTLLALHRSYLTPGDSSSGWTAGAAAYYVGYLQPRTFLLKYNENGTITDAVDCALDPLSETKCTLKSFTVEKGIYQTSNFRVQPTESIVRFPNITNLCPFGEVFNATRFASVYAWNRKRISNCVADYSVLYNSASFSTFKCYGVSPTKLNDLCFTNVYADSFVIRGDEVRQIAPGQTGKIADYNYKLPDDFTGCVIAWNSNNLDSKVGGNYNYLYRLFRKSNLKPFERDISTEIYQAGSTPCNGVEGFNCYFPLQSYGFQPTNGVGYQPYRVVVLSFELLHAPATVCGPKKSTNLVKNKCVNFNFNGLTGTGVLTESNKKFLPFQQFGRDIADTTDAVRDPQTLEILDITPCSFGGVSVITPGTNTSNQVAVLYQDVNCTEVPVAIHADQLTPTWRVYSTGSNVFQTRAGCLIGAEHVNNSYECDIPIGAGICASYQTQTNSPRRARSVASQSIIAYTMSLGAENSVAYSNNSIAIPTNFTISVTTEILPVSMTKTSVDCTMYICGDSTECSNLLLQYGSFCTQLNRALTGIAVEQDKNTQQVFAQVKQIYKTPPIKDFGGFNFSQILPDPSKPSKRSFIEDLLFNKVTLADAGFIKQYGDCLGDIAARDLICAQKFNGLTVLPPLLTDEMIAQYTSALLAGTITSGWTFCAGAALQIPFAMQMAYRFNGIGVTQNVLYENQKLIANQFNSAIGKIQDSLSSTASALGKLQDVVNQNAQALNTLVKQLSSNFGAISSVLNDILSRLDKVEAEVQIDRLITGRLQSLQTYVTQQLIRAAEIRASANLAATKMSECVCGQSKRVDFCGKGYHLMSFPQSAPHGVVFLHVTYVPAQEKNFTTAPAICHDGKAHFPREGVFVSNGTHWFVTQRNFYEPQIITTDNTFVSGNCDVVIGIVNNTVYDPLQPELDSGGGGSDIIKLLNEQVNKEMQSSNLYMSMSSWCYTHSLDGAGLFLFDHAAEEYEHAKKLIIFLNENNVPVQLTSISAPEHKFEGLTQIFQKAYEHEQHISESINNIVDHAIKSKDHATFNFLQWYVAEQHEEEVLFKDILDKIELIGNENHGLYLADQYVKGIAKSRKS

SEQ ID NO: 9213 - protein, 1315 aa, Artificial Sequence
  SARS-CoV-2/France/HF1805/2020__EPI_ISL_414628 spike protein (1-1147)(G889C_L1034C) Ferritin construct
MFVFLVLLPLVSSQCVNLTTRTQLPPAYTNSFTRGVYYPDKVFRSSVLHSTQDLFLPFFSNVTWFHAIHVSGTNGTKRFDNPVLPFNDGVYFASTEKSNIIRGWIFGTTLDSKTQSLLIVNNATNVVIKVCEFQFCNDPFLGVYYHKNNKSWMESEFRVYSSANNCTFEYVSQPFLMDLEGKQGNFKNLREFVFKNIDGYFKIYSKHTPINLVRDLPQGFSALEPLVDLPIGINITRFQTLLALHRSYLTPGDSSSGWTAGAAAYYVGYLQPRTFLLKYNENGTITDAVDCALDPLSETKCTLKSFTVEKGIYQTSNFRVQPTESIVRFPNITNLCPFGEVFNATRFASVYAWNRKRISNCVADYSVLYNSASFSTFKCYGVSPTKLNDLCFTNVYADSFVIRGDEVRQIAPGQTGKIADYNYKLPDDFTGCVIAWNSNNLDSKVGGNYNYLYRLFRKSNLKPFERDISTEIYQAGSTPCNGVEGFNCYFPLQSYGFQPTNGVGYQPYRVVVLSFELLHAPATVCGPKKSTNLVKNKCVNFNFNGLTGTGVLTESNKKFLPFQQFGRDIADTTDAVRDPQTLEILDITPCSFGGVSVITPGTNTSNQVAVLYQGVNCTEVPVAIHADQLTPTWRVYSTGSNVFQTRAGCLIGAEHVNNSYECDIPIGAGICASYQTQTNSPRRARSVASQSIIAYTMSLGAENSVAYSNNSIAIPTNFTISVTTEILPVSMTKTSVDCTMYICGDSTECSNLLLQYGSFCTQLNRALTGIAVEQDKNTQEVFAQVKQIYKTPPIKDFGGFNFSQILPDPSKPSKRSFIEDLLFNKVTLADAGFIKQYGDCLGDIAARDLICAQKFNGLTVLPPLLTDEMIAQYTSALLAGTITSGWTFCAGAALQIPFAMQMAYRFNGIGVTQNVLYENQKLIANQFNSAIGKIQDSLSSTASALGKLQDVVNQNAQALNTLVKQLSSNFGAISSVLNDILSRLDKVEAEVQIDRLITGRLQSLQTYVTQQLIRAAEIRASANLAATKMSECVCGQSKRVDFCGKGYHLMSFPQSAPHGVVFLHVTYVPAQEKNFTTAPAICHDGKAHFPREGVFVSNGTHWFVTQRNFYEPQIITTDNTFVSGNCDVVIGVVNNTVYDPLQPELDSGGGGSDIIKLLNEQVNKEMQSSNLYMSMSSWCYTHSLDGAGLFLFDHAAEEYEHAKKLIIFLNENNVPVQLTSISAPEHKFEGLTQIFQKAYEHEQHISESINNIVDHAIKSKDHATFNFLQWYVAEQHEEEVLFKDILDKIELIGNENHGLYLADQYVKGIAKSRKS

SEQ ID NO: 9214 - protein, 1315 aa, Artificial Sequence
  SARS-CoV-2/Netherlands/ZuidHolland_9/2020__EPI_ISL_414445 spike protein (1-1147)(G889C_L1034C) Ferritin construct
MFVFLVLLPLVSSQCVNLTTRTQLPPAYTNSFTRGVYYPDKVFRSSVLHSTQDLFLPFFSNVTWFHAIHVSGTNGTKRFDNPVLPFNDGVYFASTEKSNIIRGWIFGTTLDSKTQSLLIVNNATNVVIKVCEFQFCNDPFLGVYYHKNNKSWMESEFRVYSSANNCTFEYVSQPFLMDLEGKQGNFKNLREFVFKNIDGYFKIYSKHTPINLVRDLPQGFSALEPLVDLPIGINITRFQTLLALHRSYLTPGDSSSGWTAGAAAYYVGYLQPRTFLLKYNENGTITDAVDCALDPLSETKCTLKSFTVEKGIYQTSNFRVQPTESIVRFPNITNLCPFGEVFNATRFASVYAWNRKRISNCVADYSVLYNSASFSTFKCYGVSPTKLNDLCFTNVYADSFVIRGDEVRQIAPGQTGKIADYNYKLPDDFTGCVIAWNSNNLDSKVGGNYNYLYRLFRKSNLKPFERDISTEIYQAGSTPCNGVEGFNCYFPLQSYGFQPTNGVGYQPYRVVVLSFELLHAPATVCGPKKSTNLVKNKCVNFNFNGLTGTGVLTESNKKFLPFQQFGRDIADTTDAVRDPQTLEILDITPCSFGGVSVITPGTNTSNQVAVLYQGVNCTEVPVAIHADQLTPTWRVYSTGSNVFQTRAGCLIGAEHVNNSYECDIPIGAGICASYQTQTNSPRRARSVASQSIIAYTMSLGAENSVAYSNNSIAIPTNFTISVTTEILPVSMTKTSVDCTMYICGDSTECSNLLLQYGSFCTQLNRALTGIAVEQDKNTQEVFAQVKQIYKTPPIKDFGGFNFSQILPDPSKPSKRSFIEDLLFNKVTLADAGFIKQYGDCLGDIAARDLICVQKFNGLTVLPPLLTDEMIAQYTSALLAGTITSGWTFCAGAALQIPFAMQMAYRFNGIGVTQNVLYENQKLIANQFNSAIGKIQDSLSSTASALGKLQDVVNQNAQALNTLVKQLSSNFGAISSVLNDILSRLDKVEAEVQIDRLITGRLQSLQTYVTQQLIRAAEIRASANLAATKMSECVCGQSKRVDFCGKGYHLMSFPQSAPHGVVFLHVTYVPAQEKNFTTAPAICHDGKAHFPREGVFVSNGTHWFVTQRNFYEPQIITTDNTFVSGNCDVVIGIVNNTVYDPLQPELDSGGGGSDIIKLLNEQVNKEMQSSNLYMSMSSWCYTHSLDGAGLFLFDHAAEEYEHAKKLIIFLNENNVPVQLTSISAPEHKFEGLTQIFQKAYEHEQHISESINNIVDHAIKSKDHATFNFLQWYVAEQHEEEVLFKDILDKIELIGNENHGLYLADQYVKGIAKSRKS

SEQ ID NO: 9215 - protein, 1315 aa, Artificial Sequence
  SARS-CoV-2/Finland/FIN03032020A/2020__EPI_ISL_413602 spike protein (1-1147)(G889C_L1034C) Ferritin construct
MFVFLVLLPLVSSQCVNLTTRTQLPPAYTNSFTRGVYYPDKVFRSSVLHSTQDLFLPFFSNVTWFHAIHVSGTNGTKRFDNPVLPFNDGVYFASTEKSNIIRGWIFGTTLDSKTQSLLIVNNATNVVIKVCEFQFCNDPFLGVYYHKNNKSWMESEFRVYSSANNCTFEYVSQPFLMDLEGKQGNFKNLREFVFKNIDGYFKIYSKHTPINLVRDLPQGFSALEPLVDLPIGINITRFQTLLALHRSYLTPGDSSSGWTAGAAAYYVGYLQPRTFLLKYNENGTITDAVDCALDPLSETKCTLKSFTVEKGIYQTSNFRVQPTESIVRFPNITNLCPFGEVFNATRFASVYAWNRKRISNCVADYSVLYNSASFSTFKCYGVSPTKLNDLCFTNVYADSFVIRGDEVRQIAPGQTGKIADYNYKLPDDFTGCVISWNSNNLDSKVGGNYNYLYRLFRKSNLKPFERDISTEIYQAGSTPCNGVEGFNCYFPLQSYGFQPTNGVGYQPYRVVVLSFELLHAPATVCGPKKSTNLVKNKCVNFNFNGLTGTGVLTESNKKFLPFQQFGRDIADTTDAVRDPQTLEILDITPCSFGGVSVITPGTNTSNQVAVLYQGVNCTEVPVAIHADQLTPTWRVYSTGSNVFQTRAGCLIGAEHVNNSYECDIPIGAGICASYQTQTNSPRRARSVASQSIIAYTMSLGAENSVAYSNNSIAIPTNFTISVTTEILPVSMTKTSVDCTMYICGDSTECSNLLLQYGSFCTQLNRALTGIAVEQDKNTQEVFAQVKQIYKTPPIKDFGGFNFSQILPDPSKPSKRSFIEDLLFNKVTLADAGFIKQYGDCLGDIAARDLICAQKFNGLTVLPPLLTDEMIAQYTSALLAGTITSGWTFCAGAALQIPFAMQMAYRFNGIGVTQNVLYENQKLIANQFNSAIGKIQDSLSSTASALGKLQDVVNQNAQALNTLVKQLSSNFGAISSVLNDILSRLDKVEAEVQIDRLITGRLQSLQTYVTQQLIRAAEIRASANLAATKMSECVCGQSKRVDFCGKGYHLMSFPQSAPHGVVFLHVTYVPAQEKNFTTAPAICHDGKAHFPREGVFVSNGTHWFVTQRNFYEPQIITTDNTFVSGNCDVVIGIVNNTVYDPLQPELDSGGGGSDIIKLLNEQVNKEMQSSNLYMSMSSWCYTHSLDGAGLFLFDHAAEEYEHAKKLIIFLNENNVPVQLTSISAPEHKFEGLTQIFQKAYEHEQHISESINNIVDHAIKSKDHATFNFLQWYVAEQHEEEVLFKDILDKIELIGNENHGLYLADQYVKGIAKSRKS

SEQ ID NO: 9216 - protein, 1315 aa, Artificial Sequence
  SARS-CoV-2/France/GE1977/2020__EPI_ISL_414632 spike protein (1-1147)(G889C_L1034C) Ferritin construct
MFVFLVLLPLVSSQCVNLTTRTQLPPAYTNSFTRGVYYPDKVFRSSVLHSTQDLFLPFFSNVTWFHAIHVSGTNGTKRFDNPVLPFNDGVYFASTEKSNIIRGWIFGTTLDSKTQSLLIVNNATNVVIKVCEFQFCNDPFLGVYYHKNNKSWMESEFRVYSSANNCTFEYVSQPFLMDLEGKQGNFKNLREFVFKNIDGYFKIYSKHTPINLVRDLPQGFSALEPLVDLPIGINITRFQTLLALHRSYLTPGDSSSGWTAGAAAYYVGYLQPRTFLLKYNENGTITDAVDCALDPLSETKCTLKSFTVEKGIYQTSNFRVQPTESIVRFPNITNLCPFGEVFNATRFASVYAWNRKRISNCVADYSVLYNSASFSTFKCYGVSPTKLNDLCFTNVYADSFVIRGDEVRQIAPGQTGKIADYNYKLPDDFTGCVIAWNSNNLDSKVGGNYNYLYRLFRKSNLKPFERDISTEIYQAGSTPCNGVEGFNCYFPLQSYGFQPTNGVGYQPYRVVVLSFELLHAPATVCGPKKSTNLVKNKCVNFNFNGLTGTGVLTESNKKFLPFQQFGRDIADTTDAVRDPQTLEILDITPCSFGGVSVITPGTNTSNQVAVLYQGVNCTEVPVAIHADQLTPTWRVYSTGSNVFQTRAGCLIGAEHVNNSYECDIPIGAGICASYQTQTNSPRRARSVASQSIIAYTMSLGAENSVAYSNNSIAIPTNFTISVTTEILPVSMTKTSVDCTMYICGDSTECSNLLLQYGSFCTQLNRALTGIAVEQDKNTQEVFAQVKQIYKTPPIKDFGGFNFSQILPDPSKPSKRSFIEDLLFNKVTLADAGFIKQYGDCLGDIAARDLICAQKFNGLTVLPPLLTDEMIAQYTSALLAGTITSGWTFCAGAALQIPFAMQMAYRFNGIGVTQNVLYENQKLIANQFNSAIGKIQDSLFSTASALGKLQDVVNQNAQALNTLVKQLSSNFGAISSVLNDILSRLDKVEAEVQIDRLITGRLQSLQTYVTQQLIRAAEIRASANLAATKMSECVCGQSKRVDFCGKGYHLMSFPQSAPHGVVFLHVTYVPAQEKNFTTAPAICHDGKAHFPREGVFVSNGTHWFVTQRNFYEPQIITTDNTFVSGNCDVVIGIVNNTVYDPLQPELDSGGGGSDIIKLLNEQVNKEMQSSNLYMSMSSWCYTHSLDGAGLFLFDHAAEEYEHAKKLIIFLNENNVPVQLTSISAPEHKFEGLTQIFQKAYEHEQHISESINNIVDHAIKSKDHATFNFLQWYVAEQHEEEVLFKDILDKIELIGNENHGLYLADQYVKGIAKSRKS

SEQ ID NO: 9217 - protein, 1315 aa, Artificial Sequence
  SARS-CoV-2/Finland/FIN-313/2020__EPI_ISL_414641 spike protein (1-1147)(G889C_L1034C) Ferritin construct
MFVFLVLLPLVSSQCVNLTTRTQLPPAYTNSFTRGVYYPDKVFRSSVLHSTQDLFLPFFSNVTWFHAIHVSGTNGTKRFDNPVLPFNDGVYFASTEKSNIIRGWIFGTTLDSKTQSLLIVNNATNVVIKVCEFQFCNDPFLGVYYHKNNKSWMESEFRVYSSANNCTFEYVSQPFLMDLEGKQGNFKNLREFVFKNIDGYFKIYSKHTPINLVRDLPQGFSALEPLVDLPIGINITRFKTLLALHRSYLTPGDSSSGWTAGAAAYYVGYLQPRTFLLKYNENGTITDAVDCALDPLSETKCTLKSFTVEKGIYQTSNFRVQPTESIVRFPNITNLCPFGEVFNATRFASVYAWNRKRISNCVADYSVLYNSASFSTFKCYGVSPTKLNDLCFTNVYADSFVIRGDEVRQIAPGQTGKIADYNYKLPDDFTGCVIAWNSNNLDSKVGGNYNYLYRLFRKSNLKPFERDISTEIYQAGSTPCNGVEGFNCYFPLQSYGFQPTNGVGYQPYRVVVLSFELLHAPATVCGPKKSTNLVKNKCVNFNFNGLTGTGVLTESNKKFLPFQQFGRDIADTTDAVRDPQTLEILDITPCSFGGVSVITPGTNTSNQVAVLYQGVNCTEVPVAIHADQLTPTWRVYSTGSNVFQTRAGCLIGAEHVNNSYECDIPIGAGICASYQTQTNSPRRARSVASQSIIAYTMSLGAENSVAYSNNSIAIPTNFTISVTTEILPVSMTKTSVDCTMYICGDSTECSNLLLQYGSFCTQLNRALTGIAVEQDKNTQEVFAQVKQIYKTPPIKDFGGFNFSQILPDPSKPSKRSFIEDLLFNKVTLADAGFIKQYGDCLGDIAARDLICAQKFNGLTVLPPLLTDEMIAQYTSALLAGTITSGWTFCAGAALQIPFAMQMAYRFNGIGVTQNVLYENQKLIANQFNSAIGKIQDSLSSTASALGKLQDVVNQNAQALNTLVKQLSSNFGAISSVLNDILSRLDKVEAEVQIDRLITGRLQSLQTYVTQQLIRAAEIRASANLAATKMSECVCGQSKRVDFCGKGYHLMSFPQSAPHGVVFLHVTYVPAQEKNFTTAPAICHDGKAHFPREGVFVSNGTHWFVTQRNFYEPQIITTDNTFVSGNCDVVIGIVNNTVYDPLQPELDSGGGGSDIIKLLNEQVNKEMQSSNLYMSMSSWCYTHSLDGAGLFLFDHAAEEYEHAKKLIIFLNENNVPVQLTSISAPEHKFEGLTQIFQKAYEHEQHISESINNIVDHAIKSKDHATFNFLQWYVAEQHEEEVLFKDILDKIELIGNENHGLYLADQYVKGIAKSRKS

SEQ ID NO: 9218 - protein, 1315 aa, Artificial Sequence
  SARS-CoV-2/Netherlands/ZuidHolland_2/2020__EPI_ISL_414556 spike protein (1-1147)(G889C_L1034C) Ferritin construct
MFVFLVLLPLVSSQCVNLTTRTQLPPAYTNSFTRGVYYPDKVFRSSVLHSTQDLFLPFFSNVTWFHAIHVSGTNGTKRFDNPVLPFNDGVYFASTEKSNIIRGWIFGTTLDSKTQSLLIVNNATNVVIKVCEFQFCNDPFLGVYYHKNNKSWMESEFRVYSSANNCTFEYVSQPFLMDLEGKQGNFKNLREFVFKNIDGYFKIYSKHTPINLVRDLPQGFSALEPLVDLPIGINITRFQTLLALHRSYLTPGDSSSGWTAGAAAYYVGYLQPRTFLLKYNENGTITDAVDCALDPLSETKCTLKSFTVEKGIYQTSNFRVQPTESIVRFPNITNLCPFGEVFNATRFASVYAWNRKRISNCVADYSVLYNSASFSTFKCYGVSPTKLNDLCFTNVYADSFVIRGDEVRQIAPGQTGKIADYNYKLPDDFTGCVIAWNSNNLDSKVGGNYNYLYRLFRKSNLKPFERDISTEIYQAGSTPCNGVEGFNCYFPLQSYGFQPTNGVGYQPYRVVVLSFELLHAPATVCGPKKSTNLVKNKCVNFNFNGLTGTGVLTESNKKFLPFQQFGRDIADTTDAVRDPQTLEILDITPCSFGGVSVITPGTNTSNQVAVLYQGVNCTEVPVAIHADQLTPTWRVYSTGSNVFQTRAGCLIGAEHVNNSYECDIPIGAGICASYQTQTNSPRRARSVASQSIIAYTMSLGAENSVAYSNNSIAIPTNFTISVTTEILPVSMTKTSVDCTMYICGDSTECSNLLLQYGSFCTQLNRALTGIALEQDKNTQEVFAQVKQIYKTPPIKDFGGFNFSQILPDPSKPSKRSFIEDLLFNKVTLADAGFIKQYGDCLGDIAARDLICAQKFNGLTVLPPLLTDEMIAQYTSALLAGTITSGWTFCAGAALQIPFAMQMAYRFNGIGVTQNVLYENQKLIANQFNSAIGKIQDSLSSTASALGKLQDVVNQNAQALNTLVKQLSSNFGAISSVLNDILSRLDKVEAEVQIDRLITGRLQSLQTYVTQQLIRAAEIRASANLAATKMSECVCGQSKRVDFCGKGYHLMSFPQSAPHGVVFLHVTYVPAQEKNFTTAPAICHDGKAHFPREGVFVSNGTHWFVTQRNFYEPQIITTDNTFVSGNCDVVIGIVNNTVYDPLQPELDSGGGGSDIIKLLNEQVNKEMQSSNLYMSMSSWCYTHSLDGAGLFLFDHAAEEYEHAKKLIIFLNENNVPVQLTSISAPEHKFEGLTQIFQKAYEHEQHISESINNIVDHAIKSKDHATFNFLQWYVAEQHEEEVLFKDILDKIELIGNENHGLYLADQYVKGIAKSRKS

SEQ ID NO: 9219 - protein, 1315 aa, Artificial Sequence
  SARS-CoV-2/USA/WA-UW31/2020__EPI_ISL_414618 spike protein (1-1147)(G889C_L1034C) Ferritin construct
MFVFLVLLPLVSSQCVNLTTRTQLPPAYTNSFTRGVYYPDKVFRSSVLHSTQDLFLPFFSNVTWFHAIHVSGTNGTKRFDNPVLPFNDGVYFASTEKSNIIRGWIFGTTLDSKTQSLLIVNNATNVVIKVCEFQFCNDPFLGVYYHKNNKSWMESEFRVYSSANNCTFEYVSQPFLMDLEGKQGNFKNLREFVFKNIDGYFKIYSKHTPINLVRDLPQGFSALEPLVDLPIGINITRFQTLLALHRSYLTPGDSSSGWTAGAAAYYVGYLQPRTFLLKYNENGTITDAVDCALDPLSETKCTLKSFTVEKGIYQTSNFRVQPTESIVRFPNITNLCPFGEVFNATRFASVYAWNRKRISNCVADYSVLYNSASFSTFKCYGVSPTKLNDLCFTNVYADSFVIRGDEVRQIAPGQTGKIADYNYKLPDDFTGCVIAWNSNNLDSKVGGNYNYLYRLFRKSNLKPFERDISTEIYQAGSTPCNGAEGFNCYFPLQSYGFQPTNGVGYQPYRVVVLSFELLHAPATVCGPKKSTNLVKNKCVNFNFNGLTGTGVLTESNKKFLPFQQFGRDIADTTDAVRDPQTLEILDITPCSFGGVSVITPGTNTSNQVAVLYQDVNCTEVPVAIHADQLTPTWRVYSTGSNVFQTRAGCLIGAEHVNNSYECDIPIGAGICASYQTQTNSPRRARSVASQSIIAYTMSLGAENSVAYSNNSIAIPTNFTISVTTEILPVSMTKTSVDCTMYICGDSTECSNLLLQYGSFCTQLNRALTGIAVEQDKNTQEVFAQVKQIYKTPPIKDFGGFNFSQILPDPSKPSKRSFIEDLLFNKVTLADAGFIKQYGDCLGDIAARDLICAQKFNGLTVLPPLLTDEMIAQYTSALLAGTITSGWTFCAGAALQIPFAMQMAYRFNGIGVTQNVLYENQKLIANQFNSAIGKIQDSLSSTASALGKLQDVVNQNAQALNTLVKQLSSNFGAISSVLNDILSRLDKVEAEVQIDRLITGRLQSLQTYVTQQLIRAAEIRASANLAATKMSECVCGQSKRVDFCGKGYHLMSFPQSAPHGVVFLHVTYVPAQEKNFTTAPAICHDGKAHFPREGVFVSNGTHWFVTQRNFYEPQIITTDNTFVSGNCDVVIGIVNNTVYDPLQPELDSGGGGSDIIKLLNEQVNKEMQSSNLYMSMSSWCYTHSLDGAGLFLFDHAAEEYEHAKKLIIFLNENNVPVQLTSISAPEHKFEGLTQIFQKAYEHEQHISESINNIVDHAIKSKDHATFNFLQWYVAEQHEEEVLFKDILDKIELIGNENHGLYLADQYVKGIAKSRKS

SEQ ID NO: 9220 - protein, 1315 aa, Artificial Sequence
  SARS-CoV-2/South Korea/SNU01/2020__EPI_ISL_411929 spike protein (1-1147)(G889C_L1034C) Ferritin construct
MFVFLVLLPLVSSQCVNLTTRTQLPPAYTNSFTRGVYYPDKVFRSSVLHSTQDLFLPFFSNVTWFHAIHVSGTNGTKRFDNPVLPFNDGVYFASTEKSNIIRGWIFGTTLDSKTQSLLIVNNATNVVIKVCEFQFCNDPFLGVYYHKNNKSWMESEFRVYSSANNCTFEYVSQPFLMDLEGKQGNFKNLREFVFKNIDGYFKIYSKHTPINLVRDLPQGFWALEPLVDLPIGINITRFQTLLALHRSYLTPGDSSSGWTAGAAAYYVGYLQPRTFLLKYNENGTITDAVDCALDPLSETKCTLKSFTVEKGIYQTSNFRVQPTESIVRFPNITNLCPFGEVFNATRFASVYAWNRKRISNCVADYSVLYNSASFSTFKCYGVSPTKLNDLCFTNVYADSFVIRGDEVRQIAPGQTGKIADYNYKLPDDFTGCVIAWNSNNLDSKVGGNYNYLYRLFRKSNLKPFERDISTEIYQAGSTPCNGVEGFNCYFPLQSYGFQPTNGVGYQPYRVVVLSFELLHAPATVCGPKKSTNLVKNKCVNFNFNGLTGTGVLTESNKKFLPFQQFGRDIADTTDAVRDPQTLEILDITPCSFGGVSVITPGTNTSNQVAVLYQDVNCTEVPVAIHADQLTPTWRVYSTGSNVFQTRAGCLIGAEHVNNSYECDIPIGAGICASYQTQTNSPRRARSVASQSIIAYTMSLGAENSVAYSNNSIAIPTNFTISVTTEILPVSMTKTSVDCTMYICGDSTECSNLLLQYGSFCTQLNRALTGIAVEQDKNTQEVFAQVKQIYKTPPIKDFGGFNFSQILPDPSKPSKRSFIEDLLFNKVTLADAGFIKQYGDCLGDIAARDLICAQKFNGLTVLPPLLTDEMIAQYTSALLAGTITSGWTFCAGAALQIPFAMQMAYRFNGIGVTQNVLYENQKLIANQFNSAIGKIQDSLSSTASALGKLQDVVNQNAQALNTLVKQLSSNFGAISSVLNDILSRLDKVEAEVQIDRLITGRLQSLQTYVTQQLIRAAEIRASANLAATKMSECVCGQSKRVDFCGKGYHLMSFPQSAPHGVVFLHVTYVPAQEKNFTTAPAICHDGKAHFPREGVFVSNGTHWFVTQRNFYEPQIITTDNTFVSGNCDVVIGIVNNTVYDPLQPELDSGGGGSDIIKLLNEQVNKEMQSSNLYMSMSSWCYTHSLDGAGLFLFDHAAEEYEHAKKLIIFLNENNVPVQLTSISAPEHKFEGLTQIFQKAYEHEQHISESINNIVDHAIKSKDHATFNFLQWYVAEQHEEEVLFKDILDKIELIGNENHGLYLADQYVKGIAKSRKS

SEQ ID NO: 9221 - protein, 1315 aa, Artificial Sequence
  SARS-CoV-2/China/WF0004/2020__EPI_ISL_413694 spike protein (1-1147)(G889C_L1034C) Ferritin construct
MFVFLVLLPLVSSQCVNLTTRTQLPPAYTNSFTRGVYYPDKVFRSSVLHSTQDLFLPFFSNVTWFHAIHVSGTNGTKRFDNPVLPFNDGVYFASTEKSNIIRGWIFGTTLDSKTQSLLIVNNATNVVIKVCEFQFCNDPFLGVYYHKNNKSWTESEFRVYSSANNCTFEYVSQPFLMDLEGKQGNFKNLREFVFKNIDGYFKIYSKHTPINLVRDLPQGFSALEPLVDLPIGINITRFQTLLALHRSYLTPGDSSSGWTAGAAAYYVGYLQPRTFLLKYNENGTITDAVDCALDPLSETKCTLKSFTVEKGIYQTSNFRVQPTESIVRFPNITNLCPFGEVFNATRFASVYAWNRKRISNCVADYSVLYNSASFSTFKCYGVSPTKLNDLCFTNVYADSFVIRGDEVRQIAPGQTGKIADYNYKLPDDFTGCVIAWNSNNLDSKVGGNYNYLYRLFRKSNLKPFERDISTEIYQAGSTPCNGVEGFNCYFPLQSYGFQPTNGVGYQPYRVVVLSFELLHAPATVCGPKKSTNLVKNKCVNFNFNGLTGTGVLTESNKKFLPFQQFGRDIADTTDAVRDPQTLEILDITPCSFGGVSVITPGTNTSNQVAVLYQDVNCTEVPVAIHADQLTPTWRVYSTGSNVFQTRAGCLIGAEHVNNSYECDIPIGAGICASYQTQTNSPRRARSVASQSIIAYTMSLGAENSVAYSNNSIAIPTNFTISVTTEILPVSMTKTSVDCTMYICGDSTECSNLLLQYGSFCTQLNRALTGIAVEQDKNTQEVFAQVKQIYKTPPIKDFGGFNFSQILPDPSKPSKRSFIEDLLFNKVTLADAGFIKQYGDCLGDIAARDLICAQKFNGLTVLPPLLTDEMIAQYTSALLAGTITSGWTFCAGAALQIPFAMQMAYRFNGIGVTQNVLYENQKLIANQFNSAIGKIQDSLSSTASALGKLQDVVNQNAQALNTLVKQLSSNFGAISSVLNDILSRLDKVEAEVQIDRLITGRLQSLQTYVTQQLIRAAEIRASANLAATKMSECVCGQSKRFDFCGKGYHLMSFPQSAPHGVVFLHVTYVPAQEKNFTTAPAICHDGKAHFPREGVFVSNGTHWFVTQRNFYEPQIITTDNTFVSGNCDVVIGIVNNTVYDPLQPELDSGGGGSDIIKLLNEQVNKEMQSSNLYMSMSSWCYTHSLDGAGLFLFDHAAEEYEHAKKLIIFLNENNVPVQLTSISAPEHKFEGLTQIFQKAYEHEQHISESINNIVDHAIKSKDHATFNFLQWYVAEQHEEEVLFKDILDKIELIGNENHGLYLADQYVKGIAKSRKS

SEQ ID NO: 9222 - protein, 1315 aa, Artificial Sequence
  SARS-CoV-2/China/WF0028/2020__EPI_ISL_413791 spike protein (1-1147)(G889C_L1034C) Ferritin construct
MFVFLVLLPLVSSQCVNLTTRTQLPPAYTNSFTRGVYYPDKVFRSSVLHSTQDLFLPFFSNVTWFHAIHVSGTNGTKRFDNPVLPFNDGVYFASTEKSNIIRGWIFGTTLDSKTQSLLIVNNATNVVIKVCEFQFCNDPFLGVYYHKNNKSWMESEFRVYSSANNCTFEYVSQPFLMDLEGKQGNFKNLREFVFKNIDGYFKIYSKHTPINLVRDLPQGFSALEPLVDLPIGINITRFQTLLALHRSYLTPGDSSSGWTAGAAAYYVGYLQPRTFLLKYNENGTITDAVDCALDPLSETKCTLKSFTVEKGIYQTSNFRVQPTESIVRFPNITNLCPFGEVFNATRFASVYAWNRKRISNCVADYSVLYNSASFSTFKCYGVSPTKLNDLCFTNVYADSFVIRGDEVRQIAPGQTGKIADYNYKLPDDFTGCVIAWNSNNLDSKVGGNYNYLYRLFRKSNLKPFERDISTEIYQAGSTPCNGVEGFNCYFPLQSYGFQPTNGVGYQPYRVVVLSFELLHAPATVCGPKKSTNLVKNKCVNFNFNGLTGTGVLTESNKKFLPFQQFGRDIADTTDAVRDPQTLEILDITPCSFGGVSVITPGTNTSNQVAVLYQDVNCTEVPVAIHADQLTPTWRVYSTGSNVFQTRAGCLIGAEHVNNSYECDIPIGAGICASYQTQTNSPRRARSVASQSIIAYTMSLGAENSVAYSNNSIAIPTNFTISVTTEILPVSMTKTSVDCTMYICGDSTECSNLLLQYGSFCTQLNRALTGIAVEQDKNTQEVFAQVKQIYKTPPIKDFGGFNFSQILPDPSKPSKRSFIEDLLFNKVTLADAGFIKQYGDCLGDIAARDLICAQKFNGLTVLPPLLTDEMIAQYTSALLAGTITSGWTFCAGAALQIPFAMQMAYRFNGIGVTQNVLYENQKLIANQFNSAIGKIQDSLSSTASALGKLQDVVNQNAQALNTLVKQLSSNFGAISSVLNDILSRLDKVEAEVQIDRLITGRLQSLQTYVTQQLIRAAEIRASANLAATKMSECVCGQSKRVDFCGKGYHLMSFPQSAPHGVVFLHVTYVPAQEKNFTTAPAICHDGKAHFPREGVFVSNGTHWFVTQRNFYEPQIITTDNTFVSGNCDVVIGIVNNTVYDPLQPELESGGGGSDIIKLLNEQVNKEMQSSNLYMSMSSWCYTHSLDGAGLFLFDHAAEEYEHAKKLIIFLNENNVPVQLTSISAPEHKFEGLTQIFQKAYEHEQHISESINNIVDHAIKSKDHATFNFLQWYVAEQHEEEVLFKDILDKIELIGNENHGLYLADQYVKGIAKSRKS

SEQ ID NO: 9223 - protein, 1315 aa, Artificial Sequence
  SARS-CoV-2/2019-nCoV/USA-CruiseA-18/2020__MT159716.1 spike protein (1-1147)(G889C_L1034C) Ferritin construct
MFVFLVLLPLVSSQCVNLTTRTQLPPAYTNSFTRGVYYPDKVFRSSVLHSTQDLFLPFFSNVTWFHAIHVSGTNGTKRFDNPVLPFNDGVYFASTEKSNIIRGWIFGTTLDSKTQSLLIVNNATNVVIKVCEFQFCNDPFLGVYYHKNNKSWMESELRVYSSANNCTFEYVSQPFLMDLEGKQGNFKNLREFVFKNIDGYFKIYSKHTPINLVRDLPQGFSALEPLVDLPIGINITRFQTLLALHRSYLTPGDSSSGWTAGAAAYYVGYLQPRTFLLKYNENGTITDAVDCALDPLSETKCTLKSFTVEKGIYQTSNFRVQPTESIVRFPNITNLCPFGEVFNATRFASVYAWNRKRISNCVADYSVLYNSASFSTFKCYGVSPTKLNDLCFTNVYADSFVIRGDEVRQIAPGQTGKIADYNYKLPDDFTGCVIAWNSNNLDSKVGGNYNYLYRLFRKSNLKPFERDISTEIYQAGSTPCNGVEGFNCYFPLQSYGFQPTNGVGYQPYRVVVLSFELLHAPATVCGPKKSTNLVKNKCVNFNFNGLTGTGVLTESNKKFLPFQQFGRDIADTTDAVRDPQTLEILDITPCSFGGVSVITPGTNTSNQVAVLYQDVNCTEVPVAIHADQLTPTWRVYSTGSNVFQTRAGCLIGAEHVNNSYECDIPIGAGICASYQTQTNSPRRARSVASQSIIAYTMSLGAENSVAYSNNSIAIPTNFTISVTTEILPVSMTKTSVDCTMYICGDSTECSNLLLQYGSFCTQLNRALTGIAVEQDKNTQEVFAQVKQIYKTPPIKDFGGFNFSQILPDPSKPSKRSFIEDLLFNKVTLADAGFIKQYGDCLGDIAARDLICAQKFNGLTVLPPLLTDEMIAQYTSALLAGTITSGWTFCAGAALQIPFAMQMAYRFNGIGVTQNVLYENQKLIANQFNSAIGKIQDSLSSTASALGKLQDVVNQNAQALNTLVKQLSSNFGAISSVLNDILSRLDKVEAEVQIDRLITGRLQSLQTYVTQQLIRAAEIRASANLAATKMSECVCGQSKRVDFCGKGYHLMSFPQSAPHGVVFLHVTYVPAQEKNFTTAPAICHDGKAHFPREGVFVSNGTHWFVTQRNFYEPQIITTDNTFVSGNCDVVIGIVNNTVYDPLQPELDSGGGGSDIIKLLNEQVNKEMQSSNLYMSMSSWCYTHSLDGAGLFLFDHAAEEYEHAKKLIIFLNENNVPVQLTSISAPEHKFEGLTQIFQKAYEHEQHISESINNIVDHAIKSKDHATFNFLQWYVAEQHEEEVLFKDILDKIELIGNENHGLYLADQYVKGIAKSRKS

SEQ ID NO: 9224 - protein, 1315 aa, Artificial Sequence
  SARS-CoV-2/SARS-CoV-2/Yunnan-01/human/2020/CHN__MT049951.1 spike protein (1-1147)(G889C_L1034C) Ferritin construct
MFVFLVLLPLVSSQCVNLTTRTQLPPANTNSFTRGVYYPDKVFRSSVLHSTQDLFLPFFSNVTWFHAIHVSGTNGTKRFDNPVLPFNDGVYFASTEKSNIIRGWIFGTTLDSKTQSLLIVNNATNVVIKVCEFQFCNDPFLGVYYHKNNKSWMESEFRVYSSANNCTFEYVSQPFLMDLEGKQGNFKNLREFVFKNIDGYFKIYSKHTPINLVRDLPQGFSALEPLVDLPIGINITRFQTLLALHRSYLTPGDSSSGWTAGAAAYYVGYLQPRTFLLKYNENGTITDAVDCALDPLSETKCTLKSFTVEKGIYQTSNFRVQPTESIVRFPNITNLCPFGEVFNATRFASVYAWNRKRISNCVADYSVLYNSASFSTFKCYGVSPTKLNDLCFTNVYADSFVIRGDEVRQIAPGQTGKIADYNYKLPDDFTGCVIAWNSNNLDSKVGGNYNYLYRLFRKSNLKPFERDISTEIYQAGSTPCNGVEGFNCYFPLQSYGFQPTNGVGYQPYRVVVLSFELLHAPATVCGPKKSTNLVKNKCVNFNFNGLTGTGVLTESNKKFLPFQQFGRDIADTTDAVRDPQTLEILDITPCSFGGVSVITPGTNTSNQVAVLYQDVNCTEVPVAIHADQLTPTWRVYSTGSNVFQTRAGCLIGAEHVNNSYECDIPIGAGICASYQTQTNSPRRARSVASQSIIAYTMSLGAENSVAYSNNSIAIPTNFTISVTTEILPVSMTKTSVDCTMYICGDSTECSNLLLQYGSFCTQLNRALTGIAVEQDKNTQEVFAQVKQIYKTPPIKDFGGFNFSQILPDPSKPSKRSFIEDLLFNKVTLADAGFIKQYGDCLGDIAARDLICAQKFNGLTVLPPLLTDEMIAQYTSALLAGTITSGWTFCAGAALQIPFAMQMAYRFNGIGVTQNVLYENQKLIANQFNSAIGKIQDSLSSTASALGKLQDVVNQNAQALNTLVKQLSSNFGAISSVLNDILSRLDKVEAEVQIDRLITGRLQSLQTYVTQQLIRAAEIRASANLAATKMSECVCGQSKRVDFCGKGYHLMSFPQSAPHGVVFLHVTYVPAQEKNFTTAPAICHDGKAHFPREGVFVSNGTHWFVTQRNFYEPQIITTDNTFVSGNCDVVIGIVNNTVYDPLQPELDSGGGGSDIIKLLNEQVNKEMQSSNLYMSMSSWCYTHSLDGAGLFLFDHAAEEYEHAKKLIIFLNENNVPVQLTSISAPEHKFEGLTQIFQKAYEHEQHISESINNIVDHAIKSKDHATFNFLQWYVAEQHEEEVLFKDILDKIELIGNENHGLYLADQYVKGIAKSRKS

SEQ ID NO: 9225 - protein, 1315 aa, Artificial Sequence
  SARS-CoV-2/USA/WA-UW292/2020__EPI_ISL_418077 spike protein (1-1147)(G889C_L1034C) Ferritin construct
MFVFLVLLPLVSSQCVNLTTRTQLPPAYTNSFTRGVYYPDKVFRSSVLHSTQDLFLPFFSNVTWFHAIHVSGTNGTKRFDNPVLPFNDGVYFASTEKSNIIRGWIFGTTLDSKTQSLLIVNNATNVVIKVCEFQFCNDPFLGVYYHKNNKSWMESEFRVYSSANNCTFEYVSQPFLMDLEGKQGNFKNLREFVFKNIDGYFKIYSKHTPINLVRDLPQGFSALEPLVDLPIGINITRFQTLLALHRSYLTPGDSSSGWTAGAAAYYVGYLQPRTFLLKYNENGTITDAVDCALDPLSETKCTLKSFTVEKGIYQTSNFRVQPTESIVRFPNITNLCPFGEVFNATRFASVYAWNRKRISNCVADYSVLYNSASFSTFKCYGVSPTKLNDLCFTNVYADSFVIRGDEVRQIAPGQTGKIADYNYKLPDDFTGCVIAWNSNNLDSKVGGNYNYLYRLFRKSNLKPFERDISTEIYQASSTPCNGVEGFNCYFPLQSYGFQPTNGVGYQPYRVVVLSFELLHAPATVCGPKKSTNLVKNKCVNFNFNGLTGTGVLTESNKKFLPFQQFGRDIADTTDAVRDPQTLEILDITPCSFGGVSVITPGTNTSNQVAVLYQDVNCTEVPVAIHADQLTPTWRVYSTGSNVFQTRAGCLIGAEHVNNSYECDIPIGAGICASYQTQTNSPRRARSVASQSIIAYTMSLGAENSVAYSNNSIAIPTNFTISVTTEILPVSMTKTSVDCTMYICGDSTECSNLLLQYGSFCTQLNRALTGIAVEQDKNTQEVFAQVKQIYKTPPIKDFGGFNFSQILPDPSKPSKRSFIEDLLFNKVTLADAGFIKQYGDCLGDIAARDLICAQKFNGLTVLPPLLTDEMIAQYTSALLAGTITSGWTFCAGAALQIPFAMQMAYRFNGIGVTQNVLYENQKLIANQFNSAIGKIQDSLSSTASALGKLQDVVNQNAQALNTLVKQLSSNFGAISSVLNDILSRLDKVEAEVQIDRLITGRLQSLQTYVTQQLIRAAEIRASANLAATKMSECVCGQSKRVDFCGKGYHLMSFPQSAPHGVVFLHVTYVPAQEKNFTTAPAICHDGKAHFPREGVFVSNGTHWFVTQRNFYEPQIITTDNTFVSGNCDVVIGIVNNTVYDPLQPELDSGGGGSDIIKLLNEQVNKEMQSSNLYMSMSSWCYTHSLDGAGLFLFDHAAEEYEHAKKLIIFLNENNVPVQLTSISAPEHKFEGLTQIFQKAYEHEQHISESINNIVDHAIKSKDHATFNFLQWYVAEQHEEEVLFKDILDKIELIGNENHGLYLADQYVKGIAKSRKS

SEQ ID NO: 9226 - protein, 1315 aa, Artificial Sequence
  SARS-CoV-2/Iceland/192/2020__EPI_ISL_417819 spike protein (1-1147)(G889C_L1034C) Ferritin construct
MFVFFVLLPLVSSQCVNLTTRTQLPPAYTNSFTRGVYYPDKVFRSSVLHSTQDLFLPFFSNVTWFHAIHVSGTNGTKRFDNPVLPFNDGVYFASTEKSNIIRGWIFGTTLDSKTQSLLIVNNATNVVIKVCEFQFCNDPFLGVYYHKNNKSWMESEFRVYSSANNCTFEYVSQPFLMDLEGKQGNFKNLREFVFKNIDGYFKIYSKHTPINLVRDLPQGFSALEPLVDLPIGINITRFQTLLALHRSYLTPGDSSSGWTAGAAAYYVGYLQPRTFLLKYNENGTITDAVDCALDPLSETKCTLKSFTVEKGIYQTSNFRVQPTESIVRFPNITNLCPFGEVFNATRFASVYAWNRKRISNCVADYSVLYNSASFSTFKCYGVSPTKLNDLCFTNVYADSFVIRGDEVRQIAPGQTGKIADYNYKLPDDFTGCVIAWNSNNLDSKVGGNYNYLYRLFRKSNLKPFERDISTEIYQAGSTPCNGVEGFNCYFPLQSYGFQPTNGVGYQPYRVVVLSFELLHAPATVCGPKKSTNLVKNKCVNFNFNGLTGTGVLTESNKKFLPFQQFGRDIADTTDAVRDPQTLEILDITPCSFGGVSVITPGTNTSNQVAVLYQGVNCTEVPVAIHADQLTPTWRVYSTGSNVFQTRAGCLIGAEHVNNSYECDIPIGAGICASYQTQTNSPRRARSVASQSIIAYTMSLGAENSVAYSNNSIAIPTNFTISVTTEILPVSMTKTSVDCTMYICGDSTECSNLLLQYGSFCTQLNRALTGIAVEQDKNTQEVFAQVKQIYKTPPIKDFGGFNFSQILPDPSKPSKRSFIEDLLFNKVTLADAGFIKQYGDCLGDIAARDLICAQKFNGLTVLPPLLTDEMIAQYTSALLAGTITSGWTFCAGAALQIPFAMQMAYRFNGIGVTQNVLYENQKLIANQFNSAIGKIQDSLSSTASALGKLQDVVNQNAQALNTLVKQLSSNFGAISSVLNDILSRLDKVEAEVQIDRLITGRLQSLQTYVTQQLIRAAEIRASANLAATKMSECVCGQSKRVDFCGKGYHLMSFPQSAPHGVVFLHVTYVPAQEKNFTTAPAICHDGKAHFPREGVFVSNGTHWFVTQRNFYEPQIITTDNTFVSGNCDVVIGIVNNTVYDPLQPELDSGGGGSDIIKLLNEQVNKEMQSSNLYMSMSSWCYTHSLDGAGLFLFDHAAEEYEHAKKLIIFLNENNVPVQLTSISAPEHKFEGLTQIFQKAYEHEQHISESINNIVDHAIKSKDHATFNFLQWYVAEQHEEEVLFKDILDKIELIGNENHGLYLADQYVKGIAKSRKS

SEQ ID NO: 9227 - protein, 1315 aa, Artificial Sequence
  SARS-CoV-2/Belgium/ULG-6939/2020__EPI_ISL_417020 spike protein (1-1147)(G889C_L1034C) Ferritin construct
MFVFLVLLPLVSSQCVNLTTRTQLPPAYTNSFTRGVYYPDKVFRSSVLHSTQDLFLPFFSNVTWFHAIHVSGTNGTKRFDNPVLPFNDGVYFASTEKSNIIRGWIFGTTLDSKTQSLLIVNNATNVVIKVCEFQFCNDPFLGVYYHKNNKSWMESEFRVYSSANNCTFEYVSQPFLMDLEGKQGNFKNLREFVFKNIDGYFKIYSKHTPINLVRDLPQGFSALEPLVDLPIGINITRFQTLLALHRSYLTPGDSSSGWTAGAAAYYVGYLQPRTFLLKYNENGTITDAVDCALDPLSETKCTLKSFTVEKGIYQTSNFRVQPTESIVRFPNITNLCPFGEVFNATRFASVYAWNRKRISNCVADYSVLYNSASFSTFKCYGVSPTKLNDLCFTNVYADSFVIRGDEVRQIAPGQTGKIADYNYKLPDDFTGCVIAWNSNNLDSKVGGNYNYLYRLFRKSNLKPFERDISTEIYQAGSTPCNGVEGFNCYFPLQSYGFQPTNGVGYQPYRVVVLSFELLHAPATVCGPKKSTNLVKNKCVNFNFNGLTGTGVLTESNKKFLPFQQFGRDIADTTDAVRDPQTLEILDITPCSFGGVSVITPGTNTSNQVAVLYQGVNCTEVPVAIHADQLTPTWRVYSTGSNVFQTRAGCLIGAEHVNNSYECDIPIGAGICASYQTQTNSPRRARSVASQSIIAYTMSLGAENSVVYSNNSIAIPTNFTISVTTEILPVSMTKTSVDCTMYICGDSTECSNLLLQYGSFCTQLNRALTGIAVEQDKNTQEVFAQVKQIYKTPPIKDFGGFNFSQILPDPSKPSKRSFIEDLLFNKVTLADAGFIKQYGDCLGDIAARDLICAQKFNGLTVLPPLLTDEMIAQYTSALLAGTITSGWTFCAGAALQIPFAMQMAYRFNGIGVTQNVLYENQKLIANQFNSAIGKIQDSLSSTASALGKLQDVVNQNAQALNTLVKQLSSNFGAISSVLNDILSRLDKVEAEVQIDRLITGRLQSLQTYVTQQLIRAAEIRASANLAATKMSECVCGQSKRVDFCGKGYHLMSFPQSAPHGVVFLHVTYVPAQEKNFTTAPAICHDGKAHFPREGVFVSNGTHWFVTQRNFYEPQIITTDNTFVSGNCDVVIGIVNNTVYDPLQPELDSGGGGSDIIKLLNEQVNKEMQSSNLYMSMSSWCYTHSLDGAGLFLFDHAAEEYEHAKKLIIFLNENNVPVQLTSISAPEHKFEGLTQIFQKAYEHEQHISESINNIVDHAIKSKDHATFNFLQWYVAEQHEEEVLFKDILDKIELIGNENHGLYLADQYVKGIAKSRKS

SEQ ID NO: 9228 - protein, 1315 aa, Artificial Sequence
  SARS-CoV-2/France/HF2496/2020__EPI_ISL_418231 spike protein (1-1147)(G889C_L1034C) Ferritin construct
MFVFLVLLPLVSSQCVNLTTRTQLPPAYTNSFTRGVYYPDKVFRSSVLHSTQDLFLPFFSNVTWFHAIHVSGTNGTKRFDNPVLPFNDGVYFASTEKSNIIRGWIFGTTLDSKTQSLLIVNNATNVVIKVCEFQFCNDPFLGVYYHKNNKSWMESEFRVYSSANNCTFEYVSQPFLMDLEGKQGNFKNLREFVFKNIDGYFKIYSKHTPINLVRDLPQGFSALEPLVDLPIGINITRFQTLLALHRSYLTPGDSSSGWTAGAAAYYVGYLQPRTFLLKYNENGTITDAVDCALDPLSETKCTLKSFTVEKGIYQTSNFRVQPTESIVRFPNITNLCPFGEVFNATRFASVYAWNRKRISNCVADYSVLYNSASFSTFKCYGVSPTKLNDLCFTNVYADSFVIRGDEVRQIAPGQTGKIADYNYKLPDDFTGCVIAWNSNNLDSKVGGNYNYLYRLFRKSNLKPFERDISTEIYQAGSTPCNGVEGFNCYFPLQSYGFQPTNGVGYQPYRVVVLSFELLHAPATVCGPKKSTNLVKNKCVNFNFNGLTGTGVLTESNKKFLPFQQFGRDIADTTDAVRDPQTLEILDITPCSFGGVSVITPGTNTSNQVAVLYQGVNCTEVPVAIHADQLTPTWRVYSTGSNVFQTRAGCLIGAEHVNNSYECDIPIGAGICASYQTQTNSPRRARSVASQSIIAYTMSLGAENSVAYSNNSIAIPTNFTISVTTEILPVSMTKTSVDCTMYICGDSTECSNLLLQYGSFCTQLNRALTGIAVEQDKNTQEVFAQVKQIYKTPPIKDFGGFNFSQILPDPSKPSKRSFIEDLLFNKVTLADAGFIKQYGDCLGDIVARDLICAQKFNGLTVLPPLLTDEMIAQYTSALLAGTITSGWTFCAGAALQIPFAMQMAYRFNGIGVTQNVLYENQKLIANQFNSAIGKIQDSLSSTASALGKLQDVVNQNAQALNTLVKQLSSNFGAISSVLNDILSRLDKVEAEVQIDRLITGRLQSLQTYVTQQLIRAAEIRASANLAATKMSECVCGQSKRVDFCGKGYHLMSFPQSAPHGVVFLHVTYVPAQEKNFTTAPAICHDGKAHFPREGVFVSNGTHWFVTQRNFYEPQIITTDNTFVSGNCDVVIGIVNNTVYDPLQPELDSGGGGSDIIKLLNEQVNKEMQSSNLYMSMSSWCYTHSLDGAGLFLFDHAAEEYEHAKKLIIFLNENNVPVQLTSISAPEHKFEGLTQIFQKAYEHEQHISESINNIVDHAIKSKDHATFNFLQWYVAEQHEEEVLFKDILDKIELIGNENHGLYLADQYVKGIAKSRKS

SEQ ID NO: 9229 - protein, 1315 aa, Artificial Sequence
  SARS-CoV-2/USA/WA-UW291/2020__EPI_ISL_418076 spike protein (1-1147)(G889C_L1034C) Ferritin construct
MFVFLVLLPLVSSQCVNLTTRTQLPPAYTNSFTRGVYYPDKVFRSSVLHSTQDLFLPFFSNVTWFHAIHVSGTNGTKRFDNPVLPFNDGVYFASTEKSNIIRGWIFGTTLDSKTQSLLIVNNATNVVIKVCEFQFCNDPFLGVYYHKNNKSWMESEFRVYSSANNCTFEYVSQPFLMDLEGKQGNFKNLREFVFKNIDGYFKIYSKHTPINLVRDLPQGFSALEPLVDLPIGINITRFQTLLALHRSYLTPGDSSSGWTAGAAAYYVGYLQPRTFLLKYNENGTITDAVDCALDPLSETKCTLKSFTVEKGIYQTSNFRVQPTESIVRFPNITNLCPFGEVFNATRFASVYAWNRKRISNCVADYSVLYNSASFSTFKCYGVSPTKLNDLCFTNVYADSFVIRGDEVRQIAPGQTGKIADYNYKLPDDFTGCVIAWNSNNLDSKVGGNYNYLYRLFRKSNLKPFERDISTEIYQAGSTPCNGVEGFNCYFPLQSYGFQPTNGVGYQPYRVVVLSFELLHAPATVCGPKKSTNLVKNKCVNFNFNGLTGTGVLTESNKKFLPFQQFGRDIADTTDAVRDPQTLEILDITPCSFGGVSVITPGTNTSNQVAVLYQGVNCTEVPVAIHADQLTPTWRVYSTGSNVFQTRAGCLIGAEHVNNSYECDIPIGAGICASYQTQTNSPRRARSVASQSIIAYTMSLGAENSVAYSNNSIAIPTNFTISVTTEILPVSMTKTSVDCTMYICGDSTECSNLLLQYGSFCTQLNRALTGIAVEQDKNTQEVFAQVKQIYKTPPIKDFGGFNFSQILPDPSKPSKRSFIEDLLFNKVTLADAGFIKQYGDCLGDIAARDLICAQKFNGLTVLPPLLTDEMIAQYTSALLAGTITSGWTFCAGAALQIPFAMQMAYRFNGIGVTQNVLYENQKLIANQFNSAIGKIQYSLSSTASALGKLQDVVNQNAQALNTLVKQLSSNFGAISSVLNDILSRLDKVEAEVQIDRLITGRLQSLQTYVTQQLIRAAEIRASANLAATKMSECVCGQSKRVDFCGKGYHLMSFPQSAPHGVVFLHVTYVPAQEKNFTTAPAICHDGKAHFPREGVFVSNGTHWFVTQRNFYEPQIITTDNTFVSGNCDVVIGIVNNTVYDPLQPELDSGGGGSDIIKLLNEQVNKEMQSSNLYMSMSSWCYTHSLDGAGLFLFDHAAEEYEHAKKLIIFLNENNVPVQLTSISAPEHKFEGLTQIFQKAYEHEQHISESINNIVDHAIKSKDHATFNFLQWYVAEQHEEEVLFKDILDKIELIGNENHGLYLADQYVKGIAKSRKS

SEQ ID NO: 9230 - protein, 1315 aa, Artificial Sequence; identical to SEQ ID NO: 9193
  SARS-CoV-2/Portugal/PT0034/2020__EPI_ISL_418019 spike protein (1-1147)(G889C_L1034C) Ferritin construct

SEQ ID NO: 9231 - protein, 1315 aa, Artificial Sequence; identical to SEQ ID NO: 9185
  SARS-CoV-2/Iceland/202/2020__EPI_ISL_417750 spike protein (1-1147)(G889C_L1034C) Ferritin construct

SEQ ID NO: 9232 - protein, 1315 aa, Artificial Sequence
  SARS-CoV-2/USA/WA-UW261/2020__EPI_ISL_418046 spike protein (1-1147)(G889C_L1034C) Ferritin construct
MFVFLVLLPLVSSQCVNLTTRTQLPPAYTNSFTRGVYYPDKVFRSSVLHSTQDLFLPFFSNVTWFHAIHVSGTNGTKRFDNPVLPFNDGVYFASTEKSNIIRGWIFGTTLDSKTQSLLIVNNATNVVIKVCEFQFCNDPFLGVYYHKNNKSWMESEFRVYSSANNCTFEYVSQPFLMDLEGKQGNFKNLREFVFKNIDGYFKIYSKHTPINLVRDLPQGFSALEPLVDLPIGINITRFQTLLALHRSYLTPGDSSSGWTAGAAAYYVGYLQPRTFLLKYNENGTITDAVDCALDPLSETKCTLKSFTVEKGIYQTSNFRVQPTESIVRFPNITNLCPFGEVFNATRFTSVYAWNRKRISNCVADYSVLYNSASFSTFKCYGVSPTKLNDLCFTNVYADSFVIRGDEVRQIAPGQTGKIADYNYKLPDDFTGCVIAWNSNNLDSKVGGNYNYLYRLFRKSNLKPFERDISTEIYQAGSTPCNGVEGFNCYFPLQSYGFQPTNGVGYQPYRVVVLSFELLHAPATVCGPKKSTNLVKNKCVNFNFNGLTGTGVLTESNKKFLPFQQFGRDIADTTDAVRDPQTLEILDITPCSFGGVSVITPGTNTSNQVAVLYQDVNCTEVPVAIHADQLTPTWRVYSTGSNVFQTRAGCLIGAEHVNNSYECDIPIGAGICASYQTQTNSPRRARSVASQSIIAYTMSLGAENSVAYSNNSIAIPTNFTISVTTEILPVSMTKTSVDCTMYICGDSTECSNLLLQYGSFCTQLNRALTGIAVEQDKNTQEVFAQVKQIYKTPPIKDFGGFNFSQILPDPSKPSKRSFIEDLLFNKVTLADAGFIKQYGDCLGDIAARDLICAQKFNGLTVLPPLLTDEMIAQYTSALLAGTITSGWTFCAGAALQIPFAMQMAYRFNGIGVTQNVLYENQKLIANQFNSAIGKIQDSLSSTASALGKLQDVVNQNAQALNTLVKQLSSNFGAISSVLNDILSRLDKVEAEVQIDRLITGRLQSLQTYVTQQLIRAAEIRASANLAATKMSECVCGQSKRVDFCGKGYHLMSFPQSAPHGVVFLHVTYVPAQEKNFTTAPAICHDGKAHFPREGVFVSNGTHWFVTQRNFYEPQIITTDNTFVSGNCDVVIGIVNNTVYDPLQPELDSGGGGSDIIKLLNEQVNKEMQSSNLYMSMSSWCYTHSLDGAGLFLFDHAAEEYEHAKKLIIFLNENNVPVQLTSISAPEHKFEGLTQIFQKAYEHEQHISESINNIVDHAIKSKDHATFNFLQWYVAEQHEEEVLFKDILDKIELIGNENHGLYLADQYVKGIAKSRKS

SEQ ID NO: 9233 - protein, 1315 aa, Artificial Sequence
  SARS-CoV-2/Portugal/PT0035/2020__EPI_ISL_418020 spike protein (1-1147)(G889C_L1034C) Ferritin construct
MFVFLVLLPLVSSQCVNLTTRTQLPPAYTNSFTRGVYYPDKVFRSSVLHSTQDLFLPFFSNVTWFHAIHVSGTNGTKRFDNPVLPFNDGVYFASTEKSNIIRGWIFGTTLDSKTQSLLIVNNATNVVIKVCEFQFCNDPFLGVYYHKNNKSWMESEFRVYSSANNCTFEYVSQPFLMDLEGKQGNFKNLREFVFKNIDGYFKIYSKHTPINLVRDLPQGFSALEPLVDLPIGINITRFQTLLALHRSYLTPGDSSSGWTAGAAAYYVGYLQPRTFLLKYNENGTITDAVDCALDPLSETKCTLKSFTVEKGIYQTSNFRVQPTESIVRFPNITNLCPFGEVFNATRFASVYAWNRKRISNCVADYSVLYNSASFSTFKCYGVSPTKLNDLCFTNVYADSFVIRGDEVRQIAPGQTGKIADYNYKLPDDFTGCVIAWNSNNLDSKVGGNYNYLYRLFRKSNLKPFERDISTEIYQAGSTPCNGVEGFNCYFPLQSYGFQPTNGVGYQPYRVVVLSFELLHAPATVCGPKKSTNLVKNKCVNFNFNGLTGTGVLTESNKKFLPFQQFGRDIADTTDAVRDPQTLEILDITPCSFGGVSVITPGTNTSNQVAVLYQDVNCTEVPVAIHADQLTPTWRVYSTGSNVFQTRAGCLIGAEHVNNSYECDIPIGAGICASYQTQTNSPRRARSVASQSIIAYTMSLGAENSVAYSNNSIAIPTNFTISVTTEILPVSMTKTSVDCTMYICGDSTECSNLLLQYGSFCTQLNRALTGIAVEQDKNTQEVFAQVKQIYKTPPIKDFGGFNFSQILPDPSKPSKRSFIEDLLFNKVTLADAGFIKQYGDCLGDISARDLICAQKFNGLTVLPPLLTDEMIAQYTSALLAGTITSGWTFCAGAALQIPFAMQMAYRFNGIGVTQNVLYENQKLIANQFNSAIGKIQDSLSSTASALGKLQDVVNQNAQALNTLVKQLSSNFGAISSVLNDILSRLDKVEAEVQIDRLITGRLQSLQTYVTQQLIRAAEIRASANLAATKMSECVCGQSKRVDFCGKGYHLMSFPQSAPHGVVFLHVTYVPAQEKNFTTAPAICHDGKAHFPREGVFVSNGTHWFVTQRNFYEPQIITTDNTFVSGNCDVVIGIVNNTVYDPLQPELDSGGGGSDIIKLLNEQVNKEMQSSNLYMSMSSWCYTHSLDGAGLFLFDHAAEEYEHAKKLIIFLNENNVPVQLTSISAPEHKFEGLTQIFQKAYEHEQHISESINNIVDHAIKSKDHATFNFLQWYVAEQHEEEVLFKDILDKIELIGNENHGLYLADQYVKGIAKSRKS

SEQ ID NO: 9234 - protein, 1315 aa, Artificial Sequence
  SARS-CoV-2/USA/NY-NYUMC7/2020__EPI_ISL_418192 spike protein (1-1147)(G889C_L1034C) Ferritin construct
MFVFLVLLPLVSSQCVNLTTRTQLPPAYTNSFTRGVYYPDKVFRSSVLHSTQDLFLPFFSNVTWFHAIHVSGTNGTKRFDNPVLPFNDGVYFASTEKSNIIRGWIFGTTLDSKTQSLLIVNNATNVVIKVCEFQFCNDPFLGVYHHKNNKSWMESEFRVYSSANNCTFEYVSQPFLMDLEGKQGNFKNLREFVFKNIDGYFKIYSKHTPINLVRDLPQGFSALEPLVDLPIGINITRFQTLLALHRSYLTPGDSSSGWTAGAAAYYVGYLQPRTFLLKYNENGTITDAVDCALDPLSETKCTLKSFTVEKGIYQTSNFRVQPTESIVRFPNITNLCPFGEVFNATRFASVYAWNRKRISNCVADYSVLYNSASFSTFKCYGVSPTKLNDLCFTNVYADSFVIRGDEVRQIAPGQTGKIADYNYKLPDDFTGCVIAWNSNNLDSKVGGNYNYLYRLFRKSNLKPFERDISTEIYQAGSTPCNGVEGFNCYFPLQSYGFQPTNGVGYQPYRVVVLSFELLHAPATVCGPKKSTNLVKNKCVNFNFNGLTGTGVLTESNKKFLPFQQFGRDIADTTDAVRDPQTLEILDITPCSFGGVSVITPGTNTSNQVAVLYQGVNCTEVPVAIHADQLTPTWRVYSTGSNVFQTRAGCLIGAEHVNNSYECDIPIGAGICASYQTQTNSPRRARSVASQSIIAYTMSLGAENSVAYSNNSIAIPTNFTISVTTEILPVSMTKTSVDCTMYICGDSTECSNLLLQYGSFCTQLNRALTGIAVEQDKNTQEVFAQVKQIYKTPPIKDFGGFNFSQILPDPSKPSKRSFIEDLLFNKVTLADAGFIKQYGDCLGDIAARDLICAQKFNGLTVLPPLLTDEMIAQYTSALLAGTITSGWTFCAGAALQIPFAMQMAYRFNGIGVTQNVLYENQKLIANQFNSAIGKIQDSLSSTASALGKLQDVVNQNAQALNTLVKQLSSNFGAISSVLNDILSRLDKVEAEVQIDRLITGRLQSLQTYVTQQLIRAAEIRASANLAATKMSECVCGQSKRVDFCGKGYHLMSFPQSAPHGVVFLHVTYVPAQEKNFTTAPAICHDGKAHFPREGVFVSNGTHWFVTQRNFYEPQIITTDNTFVSGNCDVVIGIVNNTVYDPLQPELDSGGGGSDIIKLLNEQVNKEMQSSNLYMSMSSWCYTHSLDGAGLFLFDHAAEEYEHAKKLIIFLNENNVPVQLTSISAPEHKFEGLTQIFQKAYEHEQHISESINNIVDHAIKSKDHATFNFLQWYVAEQHEEEVLFKDILDKIELIGNENHGLYLADQYVKGIAKSRKS

SEQ ID NO: 9235 - protein, 1315 aa, Artificial Sequence
  SARS-CoV-2/Iceland/189/2020__EPI_ISL_417709 spike protein (1-1147)(G889C_L1034C) Ferritin construct
MFVFLVLLPLVSSQCVNLTTRTQLPPAYTNSFTRGVYYPDKVFRSSVLHSTQDLFLPFFSNVTWFHAIHVSGTNGTKRFDNPVLPFNDGVYFASTEKSNIIRGWIFGTTLDSKTQSLLIVNNATNVVIKVCEFQFCNDPFLGVYYHKNNKSWMESEFRVYSSANNCTFEYVSQPFLMDLEGKQGNFKNLREFVFKNIDGYFKIYSKHTPINLVRDLPQGFSALEPLVDLPIGINITRFQTLLALHRSYLTPGDSSSGWTAGAAAYYVGYLQPRTFLLKYNENGTITDAVDCALDPLSETKCTLKSFTVEKGIYQTSNFRVQPTESIVRFPNITNLCPFGEVFNATRFASVYAWNRKRISNCVADYSVLYNSASFSTFKCYGVSPTKLNDLCFTNVYADSFVIRGDEVRQIAPGQTGKIADYNYKLPDDFTGCVIAWNSNNLDSKVGGNYNYLYRLFRKSNLKPFERDISTEIYQAGSTPCNGVEGFNCYFPLQSYGFQPTNGVGYQPYRVVVLSFELLHAPATVCGPKKSTNLVKNKCVNFNFNGLTGTGVLTESNKKFLPFQQFGRDIADTTDAVRDPQTLEILDITPCSFGGVSVITPGTNTSNQVAVLYQGVNCTEVPVAIHADQLTPTWRVYSTGSNVFQTRAGCLIGAEHVNNSYECDIPIGAGICASYQTQTNSPRRARSVASQSIIAYTMSLGAENSVAYSNNSIAIPTNFTISVTTEILPVSMTKTSVDCTMYICGDSTECSNLLLQYGSFCTQLNRALTGIAVEQDKNTQEVFAQVKQIYKTPPIKDFGGFNFSQILPDPSKPSKRSFIEDLLFNKVTLADAGFTKQYGDCLGDIAARDLICAQKFNGLTVLPPLLTDEMIAQYTSALLAGTITSGWTFCAGAALQIPFAMQMAYRFNGIGVTQNVLYENQKLIANQFNSAIGKIQDSLSSTASALGKLQDVVNQNAQALNTLVKQLSSNFGAISSVLNDILSRLDKVEAEVQIDRLITGRLQSLQTYVTQQLIRAAEIRASANLAATKMSECVCGQSKRVDFCGKGYHLMSFPQSAPHGVVFLHVTYVPAQEKNFTTAPAICHDGKAHFPREGVFVSNGTHWFVTQRNFYEPQIITTDNTFVSGNCDVVIGIVNNTVYDPLQPELDSGGGGSDIIKLLNEQVNKEMQSSNLYMSMSSWCYTHSLDGAGLFLFDHAAEEYEHAKKLIIFLNENNVPVQLTSISAPEHKFEGLTQIFQKAYEHEQHISESINNIVDHAIKSKDHATFNFLQWYVAEQHEEEVLFKDILDKIELIGNENHGLYLADQYVKGIAKSRKS

SEQ ID NO: 9236 - protein, 1315 aa, Artificial Sequence
  SARS-CoV-2/Australia/NSW56/2020__EPI_ISL_417408 spike protein (1-1147)(G889C_L1034C) Ferritin construct
MFVFLVLLPLVSSQCVNLTTRTQLPPAYTNSFTRGVYYPDKVFRSSVLHSTQDLFLPFFSNVTWFHAIHVSGTNGTKRFDNPVLPFNDGVYFASTEKSNIIRGWIFGTTLDSKTQSLLIVNNATNVVIKVCEFQFCNDPFLGVYYHKNNKSWMESEFRVYSSANNCTFEYVSQPFLMDLEGKQGNFKNLREFVFKNIDGYFKIYSKHTPINLVRDLPQGFSALEPLVDLPIGINITRFQTLLALHRSYLTPGDSSSGWTAGAAAYYVGYLQPRTFLLKYNENGTITDAVDCALDPLSETKCTLKSFTVEKGIYQTSNFRVQPTESIVRFPNITNLCPFGEVFNATRFASVYAWNRKRISNCVADYSVLYNSASFSTFKCYGVSPTKLNDLCFTNVYADSFVIRGDEVRQIAPGQTGKIADYNYKLPDDFTGCVIAWNSNNLDSKVGGNYNYLYRLFRKSNLKPFERDISTEIYQAGSTPCNGVEGFNCYFPLQSYGFQPTNGVGYQPYRVVVLSFELLHAPATVCGPKKSTNLVKNKCVNFNFNGLTGTGVLTESNKKFLPFQQFGRDIADTTDAVRDPQTLEILDITPCSFGGVSVITPGTNTSNQVAVLYQDVNCTEVPVAIHADQLTPTWRVYSTGSNVFQTRAGCLIGAEHVNNSYECDIPIGAGICASYQTQTNSPRRARSVASQSIIAYTMSLGAENSVAYSNNSIAIPTNFTISVTTEILPVSMTKTSVDCTMYICGDSTECSNLLLQYGSFCTQLNRALTGIAVEQDKNTQEVFAQVKQIYKTPPIKDFGGFNFSQILPDSSKPSKRSFIEDLLFNKVTLADAGFIKQYGDCLGDIAARDLICAQKFNGLTVLPPLLTDEMIAQYTSALLAGTITSGWTFCAGAALQIPFAMQMAYRFNGIGVTQNVLYENQKLIANQFNSAIGKIQDSLSSTASALGKLQDVVNQNAQALNTLVKQLSSNFGAISSVLNDILSRLDKVEAEVQIDRLITGRLQSLQTYVTQQLIRAAEIRASANLAATKMSECVCGQSKRVDFCGKGYHLMSFPQSAPHGVVFLHVTYVPAQEKNFTTAPAICHDGKAHFPREGVFVSNGTHWFVTQRNFYEPQIITTDNTFVSGNCDVVIGIVNNTVYDPLQPELDSGGGGSDIIKLLNEQVNKEMQSSNLYMSMSSWCYTHSLDGAGLFLFDHAAEEYEHAKKLIIFLNENNVPVQLTSISAPEHKFEGLTQIFQKAYEHEQHISESINNIVDHAIKSKDHATFNFLQWYVAEQHEEEVLFKDILDKIELIGNENHGLYLADQYVKGIAKSRKS

SEQ ID NO: 9237 - protein, 1315 aa, Artificial Sequence
  SARS-CoV-2/Iceland/280/2020__EPI_ISL_417608 spike protein (1-1147)(G889C_L1034C) Ferritin construct
MFVFLVLLPLVSSQCVNLTTRTQLPPAYTNSFTRGVYYPDKVFRSSVLHSTQDLFLPFFSNVTWFHAIHVSGTNGTKRFDNPVLPFNDGVYFASTEKSNIIRGWIFGTTLDSKTQSLLIVNNATNVVIKVCEFQFCNDPFLGVYYHKNNKSWMESEFRVYSSANNCTFEYVSQPFLMDLEGKQGNFKNLREFVFKNIDGYFKIYSKHTPINLVRDLPQGFSALEPLVDLPIGINITRFQTLLALHRSYLTPGDSSSGWTAGAAAYYVGYLQPRTFLLKYNENGTITDAVDCALDPLSETKCTLKSFTVEKGIYQTSNFRVQPTESIVRFPNITNLCPFGEVFNATRFASVYAWNRKRISNCVADYSVLYNSASFSTFKCYGVSPTKLNDLCFTNVYADSFVIRGDEVRQIAPGQTGKIADYNYKLPDDFTGCVIAWNSNNLDSKVGGNYNYLYRLFRKSNLKPFERDISTEIYQAGSTPCNGVEGFNCYFPLQSYGFQPTNGVGYQPYRVVVLSFELLHAPATVCGPKKSTNLVKNKCVNFNFNGLTGTGVLTESNKKFLPFQQFGRDIADTTDAVRDPQTLEILDITPCSFGGVSVITPGTNTSNQVAVLYQGVNCTEVPVAIHADQLTPTWRVYSTGSNVFQTRAGCLIGAEHVNNSYECDIPIGAGICASYHTQTNSPRRARSVASQSIIAYTMSLGAENSVAYSNNSIAIPTNFTISVTTEILPVSMTKTSVDCTMYICGDSTECSNLLLQYGSFCTQLNRALTGIAVEQDKNTQEVFAQVKQIYKTPPIKDFGGFNFSQILPDPSKPSKRSFIEDLLFNKVTLADAGFIKQYGDCLGDIAARDLICAQKFNGLTVLPPLLTDEMIAQYTSALLAGTITSGWTFCAGAALQIPFAMQMAYRFNGIGVTQNVLYENQKLIANQFNSAIGKIQDSLSSTASALGKLQDVVNQNAQALNTLVKQLSSNFGAISSVLNDILSRLDKVEAEVQIDRLITGRLQSLQTYVTQQLIRAAEIRASANLAATKMSECVCGQSKRVDFCGKGYHLMSFPQSAPHGVVFLHVTYVPAQEKNFTTAPAICHDGKAHFPREGVFVSNGTHWFVTQRNFYEPQIITTDNTFVSGNCDVVIGIVNNTVYDPLQPELDSGGGGSDIIKLLNEQVNKEMQSSNLYMSMSSWCYTHSLDGAGLFLFDHAAEEYEHAKKLIIFLNENNVPVQLTSISAPEHKFEGLTQIFQKAYEHEQHISESINNIVDHAIKSKDHATFNFLQWYVAEQHEEEVLFKDILDKIELIGNENHGLYLADQYVKGIAKSRKS

SEQ ID NO: 9238 - protein, 1315 aa, Artificial Sequence; identical to SEQ ID NO: 9193
  SARS-CoV-2/Iceland/247/2020__EPI_ISL_417575 spike protein (1-1147)(G889C_L1034C) Ferritin construct

SEQ ID NO: 9239 - protein, 1315 aa, Artificial Sequence
  SARS-CoV-2/Iceland/238/2020__EPI_ISL_417566 spike protein (1-1147)(G889C_L1034C) Ferritin construct
MFVFLVLLPLVSSQCVNLTTRTQLPPAYTNSFTRGVYYPDKVFRSSVLHSTQDLFLPFFSNVTWFHAIHVSGTNGTKRFDNPVLPFNDGVYFASTEKSNIIRGWIFGTTLDSKTQSLLIVNNATNVVIKVCEFQFCNDPFLGVYYHKNNKSWMESEFRVYSSANNCTFEYVSQPFLMDLEGKQGNFKNLREFVFKNIDGYFKIYSKHTPINLVRDLPQGFSALEPLVDLPIGINITRFQTLLALHRSYLTPGDSSSGWTAGAAAYYVGYLQPRTFLLKYNENGTITDAVDCALDPLSETKCTLKSFTVEKGIYQTSNFRVQPTESIVRFPNITNLCPFGEVFNATRFASVYAWNRKRISNCVADYSVLYNSASFSTFKCYGVSPTKLNDLCFTNVYADSFVIRGDEVRQIAPGQTGKIADYNYKLPDDFTGCVIAWNSNNLDSKVGGNYNYLYRLFRKSNLKPFERDISTEIYQAGSTPCNGVEGFNCYFPLQSYGFQPTNGVGYQPYRVVVLSFELLHAPATVCGPKKSTNLVKNKCVNFNFNGLTGTGVLTESNKKFLPFQQFGRDIADTTDAVRDPQTLEILDITPCSFGGVSVITPGTNTSNQVAVLYQGVNCTEVPVAIHADQLTPTWRVYSTGSNVFQTRAGCLIGAEHVNNSYECDIPIGAGICASYQTQTNSPRRARSVASQSIIAYTMSLGAENSVAYSNNSIAIPTNFTISVTTEILPVSMTKTSVDCTMYICGDSTECSNLLLQYGSFCTQLNRALTGIAVEQDKNTQEVFAQVKQIYKTPPIKDFGGFNFSQILPDPSKPSKRSFIEDLLFNKVTLADVGFIKQYGDCLGDIAARDLICAQKFNGLTVLPPLLTDEMIAQYTSALLAGTITSGWTFCAGAALQIPFAMQMAYRFNGIGVTQNVLYENQKLIANQFNSAIGKIQDSLSSTASALGKLQDVVNQNAQALNTLVKQLSSNFGAISSVLNDILSRLDKVEAEVQIDRLITGRLQSLQTYVTQQLIRAAEIRASANLAATKMSECVCGQSKRVDFCGKGYHLMSFPQSAPHGVVFLHVTYVPAQEKNFTTAPAICHDGKAHFPREGVFVSNGTHWFVTQRNFYEPQIITTDNTFVSGNCDVVIGIVNNTVYDPLQPELDSGGGGSDIIKLLNEQVNKEMQSSNLYMSMSSWCYTHSLDGAGLFLFDHAAEEYEHAKKLIIFLNENNVPVQLTSISAPEHKFEGLTQIFQKAYEHEQHISESINNIVDHAIKSKDHATFNFLQWYVAEQHEEEVLFKDILDKIELIGNENHGLYLADQYVKGIAKSRKS

SEQ ID NO: 9240 - protein, 1315 aa, Artificial Sequence
  SARS-CoV-2/Greece/16/2020__EPI_ISL_418265 spike protein (1-1147)(G889C_L1034C) Ferritin construct
MFVFLVLLPLVSSQCVNLTTRTQLPPAYTNSFTRGVYYPDKVFRSSVLHSTQDLFLPFFSNVTWFHAIHVSGTNGTKRFDNPVLPFNDGVYFASTEKSNIIRGWIFGTTLDSKTQSLLIVNNATNVVIKVCEFQFCNDPFLGVYYHKNNKSWMESEFRVYSSANNCTFEYVSQPFLMDLEGKQGNFKNLREFVFKNVDGYFKIYSKHTPINLVRDLPQGFSALEPLVDLPIGINITRFQTLLALHRSYLTPGDSSSGWTAGAAAYYVGYLQPRTFLLKYNENGTITDAVDCALDPLSETKCTLKSFTVEKGIYQTSNFRVQPTESIVRFPNITNLCPFGEVFNATRFASVYAWNRKRISNCVADYSVLYNSASFSTFKCYGVSPTKLNDLCFTNVYADSFVIRGDEVRQIAPGQTGKIADYNYKLPDDFTGCVIAWNSNNLDSKVGGNYNYLYRLFRKSNLKPFERDISTEIYQAGSTPCNGVEGFNCYFPLQSYGFQPTNGVGYQPYRVVVLSFELLHAPATVCGPKKSTNLVKNKCVNFNFNGLTGTGVLTESNKKFLPFQQFGRDIADTTDAVRDPQTLEILDITPCSFGGVSVITPGTNTSNQVAVLYQDVNCTEVPVAIHADQLTPTWRVYSTGSNVFQTRAGCLIGAEHVNNSYECDIPIGAGICASYQTQTNSPRRARSVASQSIIAYTMSLGAENSVAYSNNSIAIPTNFTISVTTEILPVSMTKTSVDCTMYICGDSTECSNLLLQYGSFCTQLNRALTGIAVEQDKNTQEVFAQVKQIYKTPPIKDFGGFNFSQILPDPSKPSKRSFIEDLLFNKVTLADAGFIKQYGDCLGDIAARDLICAQKFNGLTVLPPLLTDEMIAQYTSALLAGTITSGWTFCAGAALQIPFAMQMAYRFNGIGVTQNVLYENQKLIANQFNSAIGKIQDSLSSTASALGKLQDVVNQNAQALNTLVKQLSSNFGAISSVLNDILSRLDKVEAEVQIDRLITGRLQSLQTYVTQQLIRAAEIRASANLAATKMSECVCGQSKRVDFCGKGYHLMSFPQSAPHGVVFLHVTYVPAQEKNFTTAPAICHDGKAHFPREGVFVSNGTHWFVTQRNFYEPQIITTDNTFVSGNCDVVIGIVNNTVYDPLQPELDSGGGGSDIIKLLNEQVNKEMQSSNLYMSMSSWCYTHSLDGAGLFLFDHAAEEYEHAKKLIIFLNENNVPVQLTSISAPEHKFEGLTQIFQKAYEHEQHISESINNIVDHAIKSKDHATFNFLQWYVAEQHEEEVLFKDILDKIELIGNENHGLYLADQYVKGIAKSRKS

SEQ ID NO: 9241 - protein, 1315 aa, Artificial Sequence
  SARS-CoV-2/Iceland/319/2020__EPI_ISL_417648 spike protein (1-1147)(G889C_L1034C) Ferritin construct
MFVFLVLLPLVSSQCVNLTTRTQLPPAYTNSFTRGVYYPDKVFRSSVLHSTQDLFLPFFSNVTWFHAIHVSGTNGTKRFDNPVLPFNDGVYFASTEKSNIIRGWIFGTTLDSKTQSLLIVNNATNVVIKVCEFQFCNDPFLGVYYHKNNKSWMESEFRVYSSANNCTFEYVSQPFLIDLEGKQGNFKNLREFVFKNIDGYFKIYSKHTPINLVRDLPQGFSALEPLVDLPIGINITRFQTLLALHRSYLTPGDSSSGWTAGAAAYYVGYLQPRTFLLKYNENGTITDAVDCALDPLSETKCTLKSFTVEKGIYQTSNFRVQPTESIVRFPNITNLCPFGEVFNATRFASVYAWNRKRISNCVADYSVLYNSASFSTFKCYGVSPTKLNDLCFTNVYADSFVIRGDEVRQIAPGQTGKIADYNYKLPDDFTGCVIAWNSNNLDSKVGGNYNYLYRLFRKSNLKPFERDISTEIYQAGSTPCNGVEGFNCYFPLQSYGFQPTNGVGYQPYRVVVLSFELLHAPATVCGPKKSTNLVKNKCVNFNFNGLTGTGVLTESNKKFLPFQQFGRDIADTTDAVRDPQTLEILDITPCSFGGVSVITPGTNTSNQVAVLYQGVNCTEVPVAIHADQLTPTWRVYSTGSNVFQTRAGCLIGAEHVNNSYECDIPIGAGICASYQTQTNSPRRARSVASQSIIAYTMSLGAENSVAYSNNSIAIPTNFTISVTTEILPVSMTKTSVDCTMYICGDSTECSNLLLQYGSFCTQLNRALTGIAVEQDKNTQEVFAQVKQIYKTPPIKDFGGFNFSQILPDPSKPSKRSFIEDLLFNKVTLADAGFIKQYGDCLGDIAARDLICAQKFNGLTVLPPLLTDEMIAQYTSALLAGTITSGWTFCAGAALQIPFAMQMAYRFNGIGVTQNVLYENQKLIANQFNSAIGKIQDSLSSTASALGKLQDVVNQNAQALNTLVKQLSSNFGAISSVLNDILSRLDKVEAEVQIDRLITGRLQSLQTYVTQQLIRAAEIRASANLAATKMSECVCGQSKRVDFCGKGYHLMSFPQSAPHGVVFLHVTYVPAQEKNFTTAPAICHDGKAHFPREGVFVSNGTHWFVTQRNFYEPQIITTDNTFVSGNCDVVIGIVNNTVYDPLQPELDSGGGGSDIIKLLNEQVNKEMQSSNLYMSMSSWCYTHSLDGAGLFLFDHAAEEYEHAKKLIIFLNENNVPVQLTSISAPEHKFEGLTQIFQKAYEHEQHISESINNIVDHAIKSKDHATFNFLQWYVAEQHEEEVLFKDILDKIELIGNENHGLYLADQYVKGIAKSRKS

SEQ ID NO: 9242 - protein, 1315 aa, Artificial Sequence
  SARS-CoV-2/Congo/94/2020__EPI_ISL_417947 spike protein (1-1147)(G889C_L1034C) Ferritin construct
MFVFLVLLPLVSSQCVNLTTRTQLPPAYTNSFTRGVYYPDKVFRSSVLHSTQDLFLPFFSNVTWFHAIHVSGTNGTKRFDNPVLPFNDGVYFASTEKSNIIRGWIFGTTLDSKTQSLLIVNNATNVVIKVCEFQFCNDPFLGVYYHKNNKSWMESEFRVYSSANNCTFEYVSQPFLMDLEGKQGNFKNLREFVFKNIDGYFKIYSKHTPINLVRDLPQGFSALEPLVDLPIGINITRFQTLLALHRSYLTPGDSSSGWTAGAAAYYVGYLQPRTFLLKYNENGTITDAVDCALDPLSETKCTLKSFTVEKGIYQTSNFRVQPTESIVRFPNITNLCPFGEVFNATRFASVYAWNRKRISNCVADYSVLYNSASFSTFKCYGVSPTKLNDLCFTNVYADSFVIRGDEVRQIAPGQTGKIADYNYKLPDDFTGCVIAWNSNNLDSKVGGNYNYLYRLFRKSNLKPFERDISTEIYQAGSTPCNGVEGFNCYFPLQSYGFQPTNGVGYQPYRVVVLSFELLHAPATVCGPKKSTNLVKNKCVNFNFNGLTGTGVLTESNKKFLPFQQFGRDIADTTDAVRDPQTLEILDITPCSFGGVSVITPGTNTSNQVAVLYQGVNCTEVPVAIHADQLTPTWRVYSTGSNVFQTRAGCLIGAEHVNNSYECDIPIGAGICASYQTQTNSPRRARSVASQSIIAYTMSLGAENSVAYSNNSIAIPTNFTISVTTEILPVSMTKTSVDCTMYICGDSTECSNLLLQYGSFCTQLNRALTGIAVEQDKNTQEVFAQVKQIYKTPPIKDFGGFNFSQILPDPSKPSKRSFIEDILFNKVTLADAGFIKQYGDCLGDIAARDLICAQKFNGLTVLPPLLTDEMIAQYTSALLAGTITSGWTFCAGAALQIPFAMQMAYRFNGIGVTQNVLYENQKLIANQFNSAIGKIQDSLSSTASALGKLQDVVNQNAQALNTLVKQLSSNFGAISSVLNDILSRLDKVEAEVQIDRLITGRLQSLQTYVTQQLIRAAEIRASANLAATKMSECVCGQSKRVDFCGKGYHLMSFPQSAPHGVVFLHVTYVPAQEKNFTTAPAICHDGKAHFPREGVFVSNGTHWFVTQRNFYEPQIITTDNTFVSGNCDVVIGIVNNTVYDPLQPELDSGGGGSDIIKLLNEQVNKEMQSSNLYMSMSSWCYTHSLDGAGLFLFDHAAEEYEHAKKLIIFLNENNVPVQLTSISAPEHKFEGLTQIFQKAYEHEQHISESINNIVDHAIKSKDHATFNFLQWYVAEQHEEEVLFKDILDKIELIGNENHGLYLADQYVKGIAKSRKS

SEQ ID NO: 9243 - protein, 1315 aa, Artificial Sequence
  SARS-CoV-2/Congo/158/2020__EPI_ISL_417950 spike protein (1-1147)(G889C_L1034C) Ferritin construct
MFVFLVLLPLVSSQCVNLTTRTQLPPAYTNSFTRGVYYPDKVFRSSVLHSTQDLFLPFFSNVTWFHAIHVSGTNGTKRFDNPVLPFNDGVYFASTEKSNIIRGWIFGTTLDSKTQSLLIVNNATNVVIKVCEFQFCNDPFLGVYYHKNNKSWMESEFRVYSSANNCTFEYVSQPFLMDLEGKQGNFKNLREFVFKNIDGYFKIYSKHTPINLVRDLPQGFSALEPLVDLPIGINITRFQTLLALHRSYLTPGDSSSGWTAGAAAYYVGYLQPRTFLLKYNENGTITDAVDCALDPLSETKCTLKSFTVEKGIYQTSNFRVQPTESIVRFPNITNLCPFGEVFNATRFASVYAWNRKRISNCVADYSVLYNSASFSTFKCYGVSPTKLNDLCFTNVYADSFVIRGDEVRQIAPGQTGKIADYNYKLPDDFTGCVIAWNSNNLDSKVGGNYNYLYRLFRKSNLKPFERDISTEIYQAGSTPCNGVEGFNCYFPLQSYGFQPTNGVGYQPYRVVVLSFELLHAPATVCGPKKSTNLVKNKCVNFNFNGLTGTGVLTESNKKFLPFQQFGRDIADTTDAVRDPQTLEILDITPCSFGGVSVITPGTNTSNQVAVLYQDVNCTEVPVAIHADQLTPTWRVYSTGSNVFQTRAGCLIGAEHVNNSYECDIPIGAGICASYQTQTNSPRRARSVASQSIIAYTMSLGAENSVAYSNNSIAIPTNFTISVTTEILPVSMTKTSVDCTMYICGDSTECSNLLLQYGSFCTQLNRALTGIAVEQDKNTQEVFAQVKQIYKTPPIKDFGGFNFSQILPDPSKPSKRSFIEDLLFNKVTLADAGFIKQYGDCLGDIAARDLICAQKFNGLTVLPPLLTDEMIAQYTSALLAGTITSGWTFCAGAALQIPFAMQMAYRFNGIGVTQNVLYENQKLIANQFNSAIGKIQDSLSSTASALGKLQDVVNQNAQALNTLVKQLSSNFGAISSVLNDILSRLDKVEAEVQIDRLITGRLQSLQTYVTQQLIRAAEIRASANLAATKMSECVCGQSKRVDFCGKGYHLMSFPQSAPHGVVFLHVTYVPAQEKNFTTAPAICHDGKAHFPREGVFVSNGTHWFVTQRNFYEPQIITTDNTFLSGNCDVVIGIVNNTVYDPLQPELDSGGGGSDIIKLLNEQVNKEMQSSNLYMSMSSWCYTHSLDGAGLFLFDHAAEEYEHAKKLIIFLNENNVPVQLTSISAPEHKFEGLTQIFQKAYEHEQHISESINNIVDHAIKSKDHATFNFLQWYVAEQHEEEVLFKDILDKIELIGNENHGLYLADQYVKGIAKSRKS

SEQ ID NO: 9244 - protein, 1315 aa, Artificial Sequence
  SARS-CoV-2/USA/UT-00034/2020__EPI_ISL_417977 spike protein (1-1147)(G889C_L1034C) Ferritin construct
MFVFLVLLPLVSSQCVNLTTRTQLPPAYTNSFTRGVYYPDKVFRSSVLHSTQDLFLPFFSNVTWFHAIHVSGTNGTKRFDNPVLPFNDGVYFASTEKSNIIRGWIFGTTLDSKTQSLLIVNNATNVVIKVCEFQFCNDPFLGVYYYKNNKSWMESEFRVYSSANNCTFEYVSQPFLMDLEGKQGNFKNLREFVFKNIDGYFKIYSKHTPINLVRDLPQGFSALEPLVDLPIGINITRFQTLLALHRSYLTPGDSSSGWTAGAAAYYVGYLQPRTFLLKYNENGTITDAVDCALDPLSETKCTLKSFTVEKGIYQTSNFRVQPTESIVRFPNITNLCPFGEVFNATRFASVYAWNRKRISNCVADYSVLYNSASFSTFKCYGVSPTKLNDLCFTNVYADSFVIRGDEVRQIAPGQTGKIADYNYKLPDDFTGCVIAWNSNNLDSKVGGNYNYLYRLFRKSNLKPFERDISTEIYQAGSTPCNGVEGFNCYFPLQSYGFQPTNGVGYQPYRVVVLSFELLHAPATVCGPKKSTNLVKNKCVNFNFNGLTGTGVLTESNKKFLPFQQFGRDIADTTDAVRDPQTLEILDITPCSFGGVSVITPGTNTSNQVAVLYQGVNCTEVPVAIHADQLTPTWRVYSTGSNVFQTRAGCLIGAEHVNNSYECDIPIGAGICASYQTQTNSPRRARSVASQSIIAYTMSLGAENSVAYSNNSIAIPTNFTISVTTEILPVSMTKTSVDCTMYICGDSTECSNLLLQYGSFCTQLNRALTGIAVEQDKNTQEVFAQVKQIYKTPPIKDFGGFNFSQILPDPSKPSKRSFIEDLLFNKVTLADAGFIKQYGDCLGDIAARDLICAQKFNGLTVLPPLLTDEMIAQYTSALLAGTITSGWTFCAGAALQIPFAMQMAYRFNGIGVTQNVLYENQKLIANQFNSAIGKIQDSLSSTASALGKLQDVVNQNAQALNTLVKQLSSNFGAISSVLNDILSRLDKVEAEVQIDRLITGRLQSLQTYVTQQLIRAAEIRASANLAATKMSECVCGQSKRVDFCGKGYHLMSFPQSAPHGVVFLHVTYVPAQEKNFTTAPAICHDGKAHFPREGVFVSNGTHWFVTQRNFYEPQIITTDNTFVSGNCDVVIGIVNNTVYDPLQPELDSGGGGSDIIKLLNEQVNKEMQSSNLYMSMSSWCYTHSLDGAGLFLFDHAAEEYEHAKKLIIFLNENNVPVQLTSISAPEHKFEGLTQIFQKAYEHEQHISESINNIVDHAIKSKDHATFNFLQWYVAEQHEEEVLFKDILDKIELIGNENHGLYLADQYVKGIAKSRKS

SEQ ID NO: 9245 - protein, 1315 aa, Artificial Sequence
  SARS-CoV-2/USA/UT-00033/2020__EPI_ISL_417976 spike protein (1-1147)(G889C_L1034C) Ferritin construct
MFVFLVLLPLVSSQCVNLTTRTQLPPAYTNSFTRGVYYPDKVFRSSVLHSTQDLFLPFFSNVTWFHAIHVSGTNGTKRFDNPVLPFNDGVYFASTEKSNIIRGWIFGTTLDSKTQSLLIVNNATNVVIKVCEFQFCNDPFLGVYYHKNNKSWMESEFRVYSSANNCTFEYVSQPFLMDLEGKQGNFKNLREFVFKNIDGYFKIYSKHTPINLVRDLPQGFSALEPLVDLPIGINITRFQTLLALHRSYLTPGDSSSGLTAGAAAYYVGYLQPRTFLLKYNENGTITDAVDCALDPLSETKCTLKSFTVEKGIYQTSNFRVQPTESIVRFPNITNLCPFGEVFNATRFASVYAWNRKRISNCVADYSVLYNSASFSTFKCYGVSPTKLNDLCFTNVYADSFVIRGDEVRQIAPGQTGKIADYNYKLPDDFTGCVIAWNSNNLDSKVGGNYNYLYRLFRKSNLKPFERDISTEIYQAGSTPCNGVEGFNCYFPLQSYGFQPTNGVGYQPYRVVVLSFELLHAPATVCGPKKSTNLVKNKCVNFNFNGLTGTGVLTESNKKFLPFQQFGRDIADTTDAVRDPQTLEILDITPCSFGGVSVITPGTNTSNQVAVLYQGVNCTEVPVAIHADQLTPTWRVYSTGSNVFQTRAGCLIGAEHVNNSYECDIPIGAGICASYQTQTNSPRRARSVASQSIIAYTMSLGAENSVAYSNNSIAIPTNFTISVTTEILPVSMTKTSVDCTMYICGDSTECSNLLLQYGSFCTQLNRALTGIAVEQDKNTQEVFAQVKQIYKTPPIKDFGGFNFSQILPDPSKPSKRSFIEDLLFNKVTLADAGFIKQYGDCLGDIAARDLICAQKFNGLTVLPPLLTDEMIAQYTSALLAGTITSGWTFCAGAALQIPFAMQMAYRFNGIGVTQNVLYENQKLIANQFNSAIGKIQDSLSSTASALGKLQDVVNQNAQALNTLVKQLSSNFGAISSVLNDILSRLDKVEAEVQIDRLITGRLQSLQTYVTQQLIRAAEIRASANLAATKMSECVCGQSKRVDFCGKGYHLMSFPQSAPHGVVFLHVTYVPAQEKNFTTAPAICHDGKAHFPREGVFVSNGTHWFVTQRNFYEPQIITTDNTFVSGNCDVVIGIVNNTVYDPLQPELDSGGGGSDIIKLLNEQVNKEMQSSNLYMSMSSWCYTHSLDGAGLFLFDHAAEEYEHAKKLIIFLNENNVPVQLTSISAPEHKFEGLTQIFQKAYEHEQHISESINNIVDHAIKSKDHATFNFLQWYVAEQHEEEVLFKDILDKIELIGNENHGLYLADQYVKGIAKSRKS

SEQ ID NO: 9246 - protein, 1315 aa, Artificial Sequence
  SARS-CoV-2/USA/WI-13/2020__EPI_ISL_417516 spike protein (1-1147)(G889C_L1034C) Ferritin construct
MFVFLVLLPLVSSQCVNLTTRTQLPPAYTNSFTRGVYYPDKVFRSSVLHSTQDLFLPFFSNVTWFHAIHVSGTNGTKRFDNPVLPFNDGVYFASTEKSNIIRGWIFGTTLDSKTQSLLIVNNATNVVIKVCEFQFCNDPFLGVYYHKNNKSWMESEFRVYSSANNCTFEYVSQPFLMDLEGKQGNFKNLREFVFKNIDGYFKIYSKHTPINLVRDLPQGFSALEPLVDLPIGINITRFQTLLALHRSYLTPGDSSSGWTAGAAAYYVGYLQPRTFLLKYNENGTITDAVDCALDPLSETKCTLKSFTVEKGIYQTSNFRVLPTESIVRFPNITNLCPFGEVFNATRFASVYAWNRKRISNCVADYSVLYNSASFSTFKCYGVSPTKLNDLCFTNVYADSFVIRGDEVRQIAPGQTGKIADYNYKLPDDFTGCVIAWNSNNLDSKVGGNYNYLYRLFRKSNLKPFERDISTEIYQAGSTPCNGVEGFNCYFPLQSYGFQPTNGVGYQPYRVVVLSFELLHAPATVCGPKKSTNLVKNKCVNFNFNGLTGTGVLTESNKKFLPFQQFGRDIADTTDAVRDPQTLEILDITPCSFGGVSVITPGTNTSNQVAVLYQGVNCTEVPVAIHADQLTPTWRVYSTGSNVFQTRAGCLIGAEHVNNSYECDIPIGAGICASYQTQTNSPRRARSVASQSIIAYTMSLGAENSVAYSNNSIAIPTNFTISVTTEILPVSMTKTSVDCTMYICGDSTECSNLLLQYGSFCTQLNRALTGIAVEQDKNTQEVFAQVKQIYKTPPIKDFGGFNFSQILPDPSKPSKRSFIEDLLFNKVTLADAGFIKQYGDCLGDIAARDLICAQKFNGLTVLPPLLTDEMIAQYTSALLAGTITSGWTFCAGAALQIPFAMQMAYRFNGIGVTQNVLYENQKLIANQFNSAIGKIQDSLSSTASALGKLQDVVNQNAQALNTLVKQLSSNFGAISSVLNDILSRLDKVEAEVQIDRLITGRLQSLQTYVTQQLIRAAEIRASANLAATKMSECVCGQSKRVDFCGKGYHLMSFPQSAPHGVVFLHVTYVPAQEKNFTTAPAICHDGKAHFPREGVFVSNGTHWFVTQRNFYEPQIITTDNTFVSGNCDVVIGIVNNTVYDPLQPELDSGGGGSDIIKLLNEQVNKEMQSSNLYMSMSSWCYTHSLDGAGLFLFDHAAEEYEHAKKLIIFLNENNVPVQLTSISAPEHKFEGLTQIFQKAYEHEQHISESINNIVDHAIKSKDHATFNFLQWYVAEQHEEEVLFKDILDKIELIGNENHGLYLADQYVKGIAKSRKS

SEQ ID NO: 9247 - protein, 1314 aa, Artificial Sequence
  SARS-CoV-2/India/1-27/2020__EPI_ISL_413522 spike protein (1-1146)(G888C_L1033C) Ferritin construct
MFVFLVLLPLVSSQCVNLTTRTQLPPAYTNSFTRGVYYPDKVFRSSVLHSTQDLFLPFFSNVTWFHAIHVSGTNGTKRFDNPVLPFNDGVYFASTEKSNIIRGWIFGTTLDSKTQSLLIVNNATNVVIKVCEFQFCNDPFLGVYHKNNKSWMESEFRVYSSANNCTFEYVSQPFLMDLEGKQGNFKNLREFVFKNIDGYFKIYSKHTPINLVRDLPQGFSALEPLVDLPIGINITRFQTLLALHRSYLTPGDSSSGWTAGAAAYYVGYLQPRTFLLKYNENGTITDAVDCALDPLSETKCTLKSFTVEKGIYQTSNFRVQPTESIVRFPNITNLCPFGEVFNATRFASVYAWNRKRISNCVADYSVLYNSASFSTFKCYGVSPTKLNDLCFTNVYADSFVIRGDEVIQIAPGQTGKIADYNYKLPDDFTGCVIAWNSNNLDSKVGGNYNYLYRLFRKSNLKPFERDISTEIYQAGSTPCNGVEGFNCYFPLQSYGFQPTNGVGYQPYRVVVLSFELLHAPATVCGPKKSTNLVKNKCVNFNFNGLTGTGVLTESNKKFLPFQQFGRDIADTTDAVRDPQTLEILDITPCSFGGVSVITPGTNTSNQVAVLYQDVNCTEVPVAIHADQLTPTWRVYSTGSNVFQTRAGCLIGAEHVNNSYECDIPIGAGICASYQTQTNSPRRARSVASQSIIAYTMSLGAENSVAYSNNSIAIPTNFTISVTTEILPVSMTKTSVDCTMYICGDSTECSNLLLQYGSFCTQLNRALTGIAVEQDKNTQEVFAQVKQIYKTPPIKDFGGFNFSQILPDPSKPSKRSFIEDLLFNKVTLADAGFIKQYGDCLGDIAARDLICAQKFNGLTVLPPLLTDEMIAQYTSALLAGTITSGWTFCAGAALQIPFAMQMAYRFNGIGVTQNVLYENQKLIANQFNSAIGKIQDSLSSTASALGKLQDVVNQNAQALNTLVKQLSSNFGAISSVLNDILSRLDKVEAEVQIDRLITGRLQSLQTYVTQQLIRAAEIRASANLAATKMSECVCGQSKRVDFCGKGYHLMSFPQSAPHGVVFLHVTYVPAQEKNFTTAPAICHDGKAHFPREGVFVSNGTHWFVTQRNFYEPQIITTDNTFVSGNCDVVIGIVNNTVYDPLQPELDSGGGGSDIIKLLNEQVNKEMQSSNLYMSMSSWCYTHSLDGAGLFLFDHAAEEYEHAKKLIIFLNENNVPVQLTSISAPEHKFEGLTQIFQKAYEHEQHISESINNIVDHAIKSKDHATFNFLQWYVAEQHEEEVLFKDILDKIELIGNENHGLYLADQYVKGIAKSRKS

SEQ ID NO: 9248 - protein, 1309 aa, Artificial Sequence
  SARS-CoV-2/pangolin/Guangxi/P4L/2017__EPI_ISL_410538 spike protein (1-1141)(G883C_L1028C) Ferritin construct
MFVFLFVLPLVSSQCVNLTTRTGIPPGYTNSSTRGVYYPDKVFRSSILHLTQDLFLPFFSNVTWFNTINYQGGFKKFDNPVLPFNDGVYFASTEKSNIIRGWIFGTTLDARTQSLLIVNNATNVVIKVCEFQFCTDPFLGVYYHNNNKTWVENEFRVYSSANNCTFEYISQPFLMDLEGKQGNFKNLREFVFKNVDGYFKIYSKHTPIDLVRDLPRGFAALEPLVDLPIGINITRFQTLLALHRSYLTPGNLESGWTTGAAAYYVGYLQQRTFLLSYNQNGTITDAVDCSLDPLSETKCTLKSLTVEKGIYQTSNFRVQPTISIVRFPNITNLCPFGEVFNASKFASVYAWNRKRISNCVADYSVLYNSTSFSTFKCYGVSPTKLNDLCFTNVYADSFVVKGDEVRQIAPGQTGVIADYNYKLPDDFTGCVIAWNSVKQDALTGGNYGYLYRLFRKSKLKPFERDISTEIYQAGSTPCNGQVGLNCYYPLERYGFHPTTGVNYQPFRVVVLSFELLNGPATVCGPKLSTTLVKDKCVNFNFNGLTGTGVLTTSKKQFLPFQQFGRDISDTTDAVRDPQTLEILDITPCSFGGVSVITPGTNTSNQVAVLYQDVNCTEVPMAIHAEQLTPAWRVYSAGANVFQTRAGCLVGAEHVNNSYECDIPVGAGICASYHSMSSLRSVNQRSIIAYTMSLGAENSVAYSNNSIAIPTNFTISVTTEILPVSMTKTSVDCTMYICGDSIECSNLLLQYGSFCTQLNRALTGIAVEQDKNTQEVFAQVKQIYKTPPIKDFGGFNFSQILPDPSKPSKRSFIEDLLFNKVTLADAGFIKQYGDCLGDIAARDLICAQKFNGLTVLPPLLTDEMIAQYTSALLAGTITSGWTFCAGAALQIPFAMQMAYRFNGIGVTQNVLYENQKLIANQFNSAIGKIQDSLSSTASALGKLQDVVNQNAQALNTLVKQLSSNFGAISSVLNDILSRLDKVEAEVQIDRLITGRLQSLQTYVTQQLIRAAEIRASANLAATKMSECVCGQSKRVDFCGKGYHLMSFPQSAPHGVVFLHVTYVPAQEKNFTTAPAICHEGKAHFPREGVFVSNGTHWFITQRNFYEPQIITTDNTFVSGSCDVVIGIVNNTVYDPLQPELDSGGGGSDIIKLLNEQVNKEMQSSNLYMSMSSWCYTHSLDGAGLFLFDHAAEEYEHAKKLIIFLNENNVPVQLTSISAPEHKFEGLTQIFQKAYEHEQHISESINNIVDHAIKSKDHATFNFLQWYVAEQHEEEVLFKDILDKIELIGNENHGLYLADQYVKGIAKSRKS

SEQ ID NO: 9249 - protein, 1309 aa, Artificial Sequence
  SARS-CoV-2/pangolin/Guangxi/P5L/2017__EPI_ISL_410540 spike protein (1-1141)(G883C_L1028C) Ferritin construct
MFVFLFVLPLVSSQCVNLTTRTGIPPGYTNSSTRGVYYPDKVFRSSILHLTQDLFLPFFSNVTWFNTINYQGGFKKFDNPVLPFNDGVYFASTEKSNIIRGWIFGTTLDARTQSLLIVNNATNVVIKVCEFQFCTDPFLGVYYHNNNKTWVENEFRVYSSANNCTFEYISQPFLMDLEGKQGNFKNLREFVFKNVDGYFKIYSKHTPIDLVRDLPRGFAALEPLVDLPIGINITRFQTLLALHRSYLTPGKLESGWTTGAAAYYVGYLQQRTFLLSYNQNGTITDAVDCSLDPLSETKCTLKSLTVEKGIYQTSNFRVQPTISIVRFPNITNLCPFGEVFNASKFASVYAWNRKRISNCVADYSVLYNSTSFSTFKCYGVSPTKLNDLCFTNVYADSFVVKGDEVRQIAPGQTGVIADYNYKLPDDFTGCVIAWNSVKQDALTGGNYGYLYRLFRKSKLKPFERDISTEIYQAGSTPCNGQVGLNCYYPLERYGFHPTTGVNYQPFRVVVLSFELLNGPATVCGPKLSTTLVKDKCVNFNFNGLTGTGVLTTSKKQFLPFQQFGRDISDTTDAVRDPQTLEILDITPCSFGGVSVITPGTNTSNQVAVLYQDVNCTEVPMAIHAEQLTPAWRVYSAGANVFQTRAGCLVGAEHVNNSYECDIPVGAGICASYHSMSSFRSVNQRSIIAYTMSLGAENSVAYSNNSIAIPTNFTISVTTEILPVSMTKTSVDCTMYICGDSIECSNLLLQYGSFCTQLNRALTGIAVEQDKNTQEVFAQVKQIYKTPPIKDFGGFNFSQILPDPSKPSKRSFIEDLLFNKVTLADAGFIKQYGDCLGDIAARDLICAQKFNGLTVLPPLLTDEMIAQYTSALLAGTITSGWTFCAGAALQIPFAMQMAYRFNGIGVTQNVLYENQKLIANQFNSAIGKIQDSLSSTASALGKLQDVVNQNAQALNTLVKQLSSNFGAISSVLNDILSRLDKVEAEVQIDRLITGRLQSLQTYVTQQLIRAAEIRASANLAATKMSECVCGQSKRVDFCGKGYHLMSFPQSAPHGVVFLHVTYVPAQEKNFTTAPAICHEGKAHFPREGVFVSNGTHWFITQRNFYEPQIITTDNTFVSGSCDVVIGIVNNTVYDPLQPELDSGGGGSDIIKLLNEQVNKEMQSSNLYMSMSSWCYTHSLDGAGLFLFDHAAEEYEHAKKLIIFLNENNVPVQLTSISAPEHKFEGLTQIFQKAYEHEQHISESINNIVDHAIKSKDHATFNFLQWYVAEQHEEEVLFKDILDKIELIGNENHGLYLADQYVKGIAKSRKS

SEQ ID NO: 9250 - protein, 1309 aa, Artificial Sequence
  SARS-CoV-2/pangolin/Guangxi/P5E/2017__EPI_ISL_410541 spike protein (1-1141)(G883C_L1028C) Ferritin construct
MFVFLFVLPLVSSQCVNLTTRTGIPPGYTNSSTRGVYYPDKVFRSSILHLTQDLFLPFFSNVTWFNTITYQGGSKKFDNPVLPFNDGVYFASTEKSNIIRGWIFGTTLDARTQSLLIVNNATNVVIKVCEFQFCTDPFLGVYYHNNNKTWVENEFRVYSSANNCTFEYISQPFLMDLEGKQGNFKNLREFVFKNVDGYFKIYSKHTPIDLVRDLPRGFAALEPLVDLPIGINITRFQTLLALHRSYLTPGKLESGWTTGAAAYYVGYLQQRTFLLSYNQNGTITDAVDCSLDPLSETKCTLKSLTVEKGIYQTSNFRVQPTISIVRFPNITNLCPFGEVFNASKFASVYAWNRKRISNCVADYSVLYNSTSFSTFKCYGVSPTKLNDLCFTNVYADSFVVKGDEVRQIAPGQTGVIADYNYKLPDDFTGCVIAWNSVKQDALTGDNYGYLYRLFRKSKLKPFERDISTEIYQAGSTPCNGQVGLNCYYPLERYGFHPTTGVNYQPFRVVVLSFELLNGPATVCGPKLSTTLVKDKCVNFNFNGLTGTGVLTTSKKQFLPFQQFGRDISDTTDAVRDPQTLEILDITPCSFGGVSVITPGTNTSNQVAVLYQDVNCTEVPMAIHAEQLTPAWRVYSAGANVFQTRAGCLVGAEHVNNSYECDIPVGAGICASYHSMSSFRSVNQRSIIAYTMSLGAENSVAYSNNSIAIPTNFTISVTTEILPVSMTKTSVDCTMYICGDSIECSNLLLQYGSFCTQLNRALTGIAVEQDKNTQEVFAQVKQIYKTPPIKDFGGFNFSQILPDPSKPSKRSFIEDLLFNKVTLADAGFIKQYGDCLGDIAARDLICAQKFNGLTVLPPLLTDEMIAQYTSALLAGTITSGWTFCAGAALQIPFAMQMAYRFNGIGVTQNVLYENQKLIANQFNSAIGKIQDSLSSTASALGKLQDVVNQNAQALNTLVKQLSSNFGAISSVLNDILSRLDKVEAEVQIDRLITGRLQSLQTYVTQQLIRAAEIRASANLAATKMSECVCGQSKRVDFCGKGYHLMSFPQSAPHGVVFLHVTYVPAQEKNFTTAPAICHEGKAHFPREGVFVSNGTHWFITQRNFYEPQIITTDNTFVSGSCDVVIGIVNNTVYDPLQPELDSGGGGSDIIKLLNEQVNKEMQSSNLYMSMSSWCYTHSLDGAGLFLFDHAAEEYEHAKKLIIFLNENNVPVQLTSISAPEHKFEGLTQIFQKAYEHEQHISESINNIVDHAIKSKDHATFNFLQWYVAEQHEEEVLFKDILDKIELIGNENHGLYLADQYVKGIAKSRKS

SEQ ID NO: 9251 - protein, 1307 aa, Artificial Sequence
  SARS-CoV-2/pangolin/Guangxi/P1E/2017__EPI_ISL_410539 spike protein (1-1139)(G881C_L1026C) Ferritin construct
MFVFLFVLPLVSSQCVNLTTRTGIQPGYTNSSTRGVYYPDKVFRSSILHLTQDLFLPFFSNVTWFNTINYQGGFKKFDNPVLPFNDGVYFASTEKSNIIRGWIFGTTLDARTQSLLIVNNATNVVIKVCEFQFCTDPFLGVYYHNNNKTWVENEFRVYSSANNCTFEYISQPFLMDLEGKQGNFKNLREFVFKNVDGYFKIYSKHTPIDLVRDLPRGFAALEPLVDLPIGINITRFQTLLALHRSYLTPGKLESGWTTGAAAYYVGYLQQRTFLLSYNQNGTITDAVDCSLDPLSETKCTLKSLTVEKGIYQTSNFRVQPTISIVRFPNITNLCPFGEVFNASKFASVYAWNRKRISNCVADYSVLYNSTSFSTFKCYGVSPTKLNDLCFTNVYADSFVVKGDEVRQIAPGQTGVIADYNYKLPDDFTGCVIAWNSVKQDALTGGNYLYRLFRKSKLKPFERDISTEIYQAGSTPCNGQVGLNCYYPLERYGFHPTTGVNYQPFRVVVLSFELLNGPATVCGPKLSTTLVKDKCVNFNFNGLTGTGVLTTSKKQFLPFQQFGRDISDTTDAVRDPQTLEILDITPCSFGGVSVITPGTNTSNQVAVLYQDVNCTEVPMAIHAEQLTPAWRVYSAGANVFQTRAGCLVGAEHVNNSYECDIPVGAGICASYHSMSSLRSVNQRSIIAYTMSLGAENSVAYSNNSIAIPTNFTISVTTEILPVSMTKTSVDCTMYICGDSIECSNLLLQYGSFCTQLNRALTGIAVEQDKNTQEVFAQVKQIYKTPPIKDFGGFNFSQILPDPSKPSKRSFIEDLLFNKVTLADAGFIKQYGDCLGDIAARDLICAQKFNGLTVLPPLLTDEMIAQYTSALLAGTITSGWTFCAGAALQIPFAMQMAYRFNGIGVTQNVLYENQKLIANQFNSAIGKIQDSLSSTASALGKLQDVVNQNAQALNTLVKQLSSNFGAISSVLNDILSRLDKVEAEVQIDRLITGRLQSLQTYVTQQLIRAAEIRASANLAATKMSECVCGQSKRVDFCGKGYHLMSFPQSAPHGVVFLHVTYVPAQEKNFTTAPAICHEGKAHFPREGVFVSNGTHWFITQRNFYEPQIITTDNTFVSGSCDVVIGIVNNTVYDPLQPELDSGGGGSDIIKLLNEQVNKEMQSSNLYMSMSSWCYTHSLDGAGLFLFDHAAEEYEHAKKLIIFLNENNVPVQLTSISAPEHKFEGLTQIFQKAYEHEQHISESINNIVDHAIKSKDHATFNFLQWYVAEQHEEEVLFKDILDKIELIGNENHGLYLADQYVKGIAKSRKS

SEQ ID NO: 9252 - protein, 1315 aa, Artificial Sequence
  SARS-CoV-2/Wuhan/WIV05/2019__EPI_ISL_402128 spike protein (1-1147)(I909C_Y1047C) Ferritin construct
MFVFLVLLPLVSSQCVNLTTRTQLPPAYTNSFTRGVYYPDKVFRSSVLHSTQDLFLPFFSNVTWFHAIHVSGTNGTKRFDNPVLPFNDGVYFASTEKSNIIRGWIFGTTLDSKTQSLLIVNNATNVVIKVCEFQFCNDPFLGVYYHKNNKSWMESEFRVYSSANNCTFEYVSQPFLMDLEGKQGNFKNLREFVFKNIDGYFKIYSKHTPINLVRDLPQGFSALEPLVDLPIGINITRFQTLLALHRSYLTPGDSSSGWTAGAAAYYVGYLQPRTFLLKYNENGTITDAVDCALDPLSETKCTLKSFTVEKGIYQTSNFRVQPTESIVRFPNITNLCPFGEVFNATRFASVYAWNRKRISNCVADYSVLYNSASFSTFKCYGVSPTKLNDLCFTNVYADSFVIRGDEVRQIAPGQTGKIADYNYKLPDDFTGCVIAWNSNNLDSKVGGNYNYLYRLFRKSNLKPFERDISTEIYQAGSTPCNGVEGFNCYFPLQSYGFQPTNGVGYQPYRVVVLSFELLHAPATVCGPKKSTNLVKNKCVNFNFNGLTGTGVLTESNKKFLPFQQFGRDIADTTDAVRDPQTLEILDITPCSFGGVSVITPGTNTSNQVAVLYQDVNCTEVPVAIHADQLTPTWRVYSTGSNVFQTRAGCLIGAEHVNNSYECDIPIGAGICASYQTQTNSPRRARSVASQSIIAYTMSLGAENSVAYSNNSIAIPTNFTISVTTEILPVSMTKTSVDCTMYICGDSTECSNLLLQYGSFCTQLNRALTGIAVEQDKNTQEVFAQVKQIYKTPPIKDFGGFNFSQILPDPSKPSKRSFIEDLLFNKVTLADAGFIKQYGDCLGDIAARDLICAQKFNGLTVLPPLLTDEMIAQYTSALLAGTITSGWTFGAGAALQIPFAMQMAYRFNGCGVTQNVLYENQKLIANQFNSAIGKIQDSLSSTASALGKLQDVVNQNAQALNTLVKQLSSNFGAISSVLNDILSRLDKVEAEVQIDRLITGRLQSLQTYVTQQLIRAAEIRASANLAATKMSECVLGQSKRVDFCGKGCHLMSFPQSAPHGVVFLHVTYVPAQEKNFTTAPAICHDGKAHFPREGVFVSNGTHWFVTQRNFYEPQIITTDNTFVSGNCDVVIGIVNNTVYDPLQPELDSGGGGSDIIKLLNEQVNKEMQSSNLYMSMSSWCYTHSLDGAGLFLFDHAAEEYEHAKKLIIFLNENNVPVQLTSISAPEHKFEGLTQIFQKAYEHEQHISESINNIVDHAIKSKDHATFNFLQWYVAEQHEEEVLFKDILDKIELIGNENHGLYLADQYVKGIAKSRKS

SEQ ID NO: 9253 - protein, 1311 aa, Artificial Sequence
  SARS-CoV-2/bat/Yunnan/RaTG13/2013__EPI_ISL_402131 spike protein (1-1143)(I905C_Y1043C) Ferritin construct
MFVFLVLLPLVSSQCVNLTTRTQLPPAYTNSSTRGVYYPDKVFRSSVLHLTQDLFLPFFSNVTWFHAIHVSGTNGIKRFDNPVLPFNDGVYFASTEKSNIIRGWIFGTTLDSKTQSLLIVNNATNVVIKVCEFQFCNDPFLGVYYHKNNKSWMESEFRVYSSANNCTFEYVSQPFLMDLEGKQGNFKNLREFVFKNIDGYFKIYSKHTPINLVRDLPPGFSALEPLVDLPIGINITRFQTLLALHRSYLTPGDSSSGWTAGAAAYYVGYLQPRTFLLKYNENGTITDAVDCALDPLSETKCTLKSFTVEKGIYQTSNFRVQPTDSIVRFPNITNLCPFGEVFNATTFASVYAWNRKRISNCVADYSVLYNSTSFSTFKCYGVSPTKLNDLCFTNVYADSFVITGDEVRQIAPGQTGKIADYNYKLPDDFTGCVIAWNSKHIDAKEGGNFNYLYRLFRKANLKPFERDISTEIYQAGSKPCNGQTGLNCYYPLYRYGFYPTDGVGHQPYRVVVLSFELLNAPATVCGPKKSTNLVKNKCVNFNFNGLTGTGVLTESNKKFLPFQQFGRDIADTTDAVRDPQTLEILDITPCSFGGVSVITPGTNASNQVAVLYQDVNCTEVPVAIHADQLTPTWRVYSTGSNVFQTRAGCLIGAEHVNNSYECDIPIGAGICASYQTQTNSRSVASQSIIAYTMSLGAENSVAYSNNSIAIPTNFTISVTTEILPVSMTKTSVDCTMYICGDSTECSNLLLQYGSFCTQLNRALTGIAVEQDKNTQEVFAQVKQIYKTPPIKDFGGFNFSQILPDPSKPSKRSFIEDLLFNKVTLADAGFIKQYGDCLGDIAARDLICAQKFNGLTVLPPLLTDEMIAQYTSALLAGTITSGWTFGAGAALQIPFAMQMAYRFNGCGVTQNVLYENQKLIANQFNSAIGKIQDSLSSTASALGKLQDVVNQNAQALNTLVKQLSSNFGAISSVLNDILSRLDKVEAEVQIDRLITGRLQSLQTYVTQQLIRAAEIRASANLAATKMSECVLGQSKRVDFCGKGCHLMSFPQSAPHGVVFLHVTYVPAQEKNFTTAPAICHDGKAHFPREGVFVSNGTHWFVTQRNFYEPQIITTDNTFVSGSCDVVIGIVNNTVYDPLQPELDSGGGGSDIIKLLNEQVNKEMQSSNLYMSMSSWCYTHSLDGAGLFLFDHAAEEYEHAKKLIIFLNENNVPVQLTSISAPEHKFEGLTQIFQKAYEHEQHISESINNIVDHAIKSKDHATFNFLQWYVAEQHEEEVLFKDILDKIELIGNENHGLYLADQYVKGIAKSRKS

SEQ ID NO: 9254 - protein, 1315 aa, Artificial Sequence
  SARS-CoV-2/Wuhan/HBCDC-HB-01/2019__EPI_ISL_402132 spike protein (1-1147)(I909C_Y1047C) Ferritin construct
MFVFLVLLPLVSSQCVNLTTRTQLPPAYTNSITRGVYYPDKVFRSSVLHSTQDLFLPFFSNVTWFHAIHVSGTNGTKRFDNPVLPFNDGVYFASTEKSNIIRGWIFGTTLDSKTQSLLIVNNATNVVIKVCEFQFCNDPFLGVYYHKNNKSWMESEFRVYSSANNCTFEYVSQPFLMDLEGKQGNFKNLREFVFKNIDGYFKIYSKHTPINLVRDLPQGFSALEPLVDLPIGINITRFQTLLALHRSYLTPGDSSSGWTAGAAAYYVGYLQPRTFLLKYNENGTITDAVDCALDPLSETKCTLKSFTVEKGIYQTSNFRVQPTESIVRFPNITNLCPFGEVFNATRFASVYAWNRKRISNCVADYSVLYNSASFSTFKCYGVSPTKLNDLCFTNVYADSFVIRGDEVRQIAPGQTGKIADYNYKLPDDFTGCVIAWNSNNLDSKVGGNYNYLYRLFRKSNLKPFERDISTEIYQAGSTPCNGVEGFNCYFPLQSYGFQPTNGVGYQPYRVVVLSFELLHAPATVCGPKKSTNLVKNKCVNFNFNGLTGTGVLTESNKKFLPFQQFGRDIADTTDAVRDPQTLEILDITPCSFGGVSVITPGTNTSNQVAVLYQDVNCTEVPVAIHADQLTPTWRVYSTGSNVFQTRAGCLIGAEHVNNSYECDIPIGAGICASYQTQTNSPRRARSVASQSIIAYTMSLGAENSVAYSNNSIAIPTNFTISVTTEILPVSMTKTSVDCTMYICGDSTECSNLLLQYGSFCTQLNRALTGIAVEQDKNTQEVFAQVKQIYKTPPIKDFGGFNFSQILPDPSKPSKRSFIEDLLFNKVTLADAGFIKQYGDCLGDIAARDLICAQKFNGLTVLPPLLTDEMIAQYTSALLAGTITSGWTFGAGAALQIPFAMQMAYRFNGCGVTQNVLYENQKLIANQFNSAIGKIQDSLSSTASALGKLQDVVNQNAQALNTLVKQLSSNFGAISSVLNDILSRLDKVEAEVQIDRLITGRLQSLQTYVTQQLIRAAEIRASANLAATKMSECVLGQSKRVDFCGKGCHLMSFPQSAPHGVVFLHVTYVPAQEKNFTTAPAICHDGKAHFPREGVFVSNGTHWFVTQRNFYEPQIITTDNTFVSGNCDVVIGIVNNTVYDPLQPELDSGGGGSDIIKLLNEQVNKEMQSSNLYMSMSSWCYTHSLDGAGLFLFDHAAEEYEHAKKLIIFLNENNVPVQLTSISAPEHKFEGLTQIFQKAYEHEQHISESINNIVDHAIKSKDHATFNFLQWYVAEQHEEEVLFKDILDKIELIGNENHGLYLADQYVKGIAKSRKS

SEQ ID NO: 9255 - protein, 1315 aa, Artificial Sequence
  SARS-CoV-2/Guangdong/20SF028/2020__EPI_ISL_403936 spike protein (1-1147)(I909C_Y1047C) Ferritin construct
MFVFLVLLPLVSSQCVNLTTRTQLPPAYTNSFTRGVYYPDKVFRSSVLYSTQDLFLPFFSNVTWFHAIHVSGTNGTKRFDNPVLPFNDGVYFASTEKSNIIRGWIFGTTLDSKTQSLLIVNNATNVVIKVCEFQFCNDPFLGVYYHKNNKSWMESEFRVYSSANNCTFEYVSQPFLMDLEGKQGNFKNLREFVFKNIDGYFKIYSKHTPINLVRDLPQGFSALEPLVDLPIGINITRFQTLLALHRSYLTPGDSSSGWTAGAAAYYVGYLQPRTFLLKYNENGTITDAVDCALDPLSETKCTLKSFTVEKGIYQTSNFRVQPTESIVRFPNITNLCPFGEVFNATRFASVYAWNRKRISNCVADYSVLYNSASFSTFKCYGVSPTKLNDLCFTNVYADSFVIRGDEVRQIAPGQTGKIADYNYKLPDDFTGCVIAWNSNNLDSKVGGNYNYLYRLFRKSNLKPFERDISTEIYQAGSTPCNGVEGFNCYFPLQSYGFQPTNGVGYQPYRVVVLSFELLHAPATVCGPKKSTNLVKNKCVNFNFNGLTGTGVLTESNKKFLPFQQFGRDIADTTDAVRDPQTLEILDITPCSFGGVSVITPGTNTSNQVAVLYQDVNCTEVPVAIHADQLTPTWRVYSTGSNVFQTRAGCLIGAEHVNNSYECDIPIGAGICASYQTQTNSPRRARSVASQSIIAYTMSLGAENSVAYSNNSIAIPTNFTISVTTEILPVSMTKTSVDCTMYICGDSTECSNLLLQYGSFCTQLNRALTGIAVEQDKNTQEVFAQVKQIYKTPPIKDFGGFNFSQILPDPSKPSKRSFIEDLLFNKVTLADAGFIKQYGDCLGDIAARDLICAQKFNGLTVLPPLLTDEMIAQYTSALLAGTITSGWTFGAGAALQIPFAMQMAYRFNGCGVTQNVLYENQKLIANQFNSAIGKIQDSLSSTASALGKLQDVVNQNAQALNTLVKQLSSNFGAISSVLNDILSRLDKVEAEVQIDRLITGRLQSLQTYVTQQLIRAAEIRASANLAATKMSECVLGQSKRVDFCGKGCHLMSFPQSAPHGVVFLHVTYVPAQEKNFTTAPAICHDGKAHFPREGVFVSNGTHWFVTQRNFYEPQIITTDNTFVSGNCDVVIGIVNNTVYDPLQPELDSGGGGSDIIKLLNEQVNKEMQSSNLYMSMSSWCYTHSLDGAGLFLFDHAAEEYEHAKKLIIFLNENNVPVQLTSISAPEHKFEGLTQIFQKAYEHEQHISESINNIVDHAIKSKDHATFNFLQWYVAEQHEEEVLFKDILDKIELIGNENHGLYLADQYVKGIAKSRKS

SEQ ID NO: 9256 - protein, 1315 aa, Artificial Sequence
  SARS-CoV-2/Shenzhen/SZTH-001/2020__EPI_ISL_406592 spike protein (1-1147)(I909C_Y1047C) Ferritin construct
MFVFLVLLPLVSSQCVNLTTRTQLPPAYTNSFTRGVYYPDKVFRSSVLHSTQDLFLPFFSNVTWFHAIHVSGTNGTKRFDNPVLPFNDGVYFASTEKSNIIRGWIFGTTLDSKTQSLLIVNNATNVVIKVCEFQFCNDPFLGVYYHKNNKSWMESEFRVYSSANNCTFEYVSQPFLMDLEGKQGNFKNLREFVFKNIDGYFKIYSKHTPINLVRDLPQGFSALEPLVDLPIGINITRFQTLLALHRSYLTPGDSSSGWTAGAAAYYVGYLQPRTFLLKYNENGTITDAVDCALDPLSETKCTLKSFTVEKGIYQTSNFRVQPTESIVRFPNITNLCPFGEVFNATRFASVYAWNRKRISNCVADYSVLYNSASFSTFKCYGVSPTKLNDLCFTNVYADSFVIRGDEVRQIAPGQTGKIADYNYKLPDDFTGCVIAWNSNNLDSKVGGNYNYLYRLFRKSNLKPFERDISTEIYQAGSTPCNGVEGFNCYFPLQSYGFQPTNGVGYQPYRVVVLSFELLHAPATVCGPKKSTNLVKNKCVNFNFNGLTGTGVLTESNKKFLPFQQFGRDIADTTDAVRDPQTLEILDITPCSFGGVSVITPGTNTSNQVAVLYQDVNCTEVPVAIHADQLTPTWRVYSTGSNVFQTRAGCLIGAEHVNNSYECDIPIGAGICASYQTQTNSPRRARSVASQSIIAYTMSLGAENSVAYSNNSIAIPTNFTISVTTEILPVSMTKTSVDCTMYICGDSTECSNLLLQYGSFCTQLNRALTGIAVEQDKNTQEVFAQVKQIYKTPPIKDFGGFNFSQILPDPSKPSKRSFIEDLLFNKVTLADAGFIKQYGDCLGDIAARDLICAQKFNGLTVLPPLLTDEMIAQYTSALLAGTITSGWTFGAGAALQIPFAMQMAYRFNGCGVTQNVLYENQKLIANQFNSAIGKIQDSLSSTASALGKLQDVVNQNAQALNTLVKQLSSNFGAISSVLNDILSRLDKVEAEVQIDRLITGRLQSLQTYVTQQLIRAAEIRASANLAATKMSECVLGQSKRVDFCGKGCHLMSFPQSAPHGVVFLHVTYVPAQEKNFTTAPAICHDGKAHFPREGVFVSNGTHWFVTQRNFYEPQIITTDNTFVSGNCDVLIGIVNNTVYDPLQPELDSGGGGSDIIKLLNEQVNKEMQSSNLYMSMSSWCYTHSLDGAGLFLFDHAAEEYEHAKKLIIFLNENNVPVQLTSISAPEHKFEGLTQIFQKAYEHEQHISESINNIVDHAIKSKDHATFNFLQWYVAEQHEEEVLFKDILDKIELIGNENHGLYLADQYVKGIAKSRKS

SEQ ID NO: 9257 - protein, 1315 aa, Artificial Sequence
  SARS-CoV-2/Shenzhen/SZTH-004/2020__EPI_ISL_406595 spike protein (1-1147)(I909C_Y1047C) Ferritin construct
MFVFLVLLPLVSSQCVNLTTRTQLPPAYTNSFTRGVYYPDKVFRSSVLHSTQDLFLPFFSNVTWFHAIHVSGTNGTKRFDNPVLPFNDGVYFASTEKSNIIRGWIFGTTLDSKTQSLLIVNNATNVVIKVCEFQFCNDPFLGVYYHKNNKSWMESEFRVYSSANNCTFEYVSQPFLMDLEGKQGNFKNLREFVFKNIDGYFKIYSKHTPINLVRDLPQGFSALEPLVDLPIGINITRFQTLLALHRSYLTPGDSSSGWTAGAAAYYVGYLQPRTFLLKYNENGTITDAVDCALDPLSETKCTLKSFTVEKGIYQTSNFRVQPTESIVRFPNITNLCPFGEVFNATRFASVYAWDRKRISNCVAYYSVLYNSASFSTFKCYGVSPTKLNDLCFTNVYADSFVIRGDEVRQIAPGQTGKIADYNYKLPDDFTGCVIAWNSNNLDSKVGGNYNYLYRLFRKSNLKPFERDISTEIYQAGSTPCNGVEGFNCYFPLQSYGFQPTNGVGYQPYRVVVLSFELLHAPATVCGPKKSTNLVKNKCVNFNFNGLTGTGVLTESNKKFLPFQQFGRDIADTTDAVRDPQTLEILDITPCSFGGVSVITPGTNTSNQVAVLYQDVNCTEVPVAIHADQLTPTWRVYSTGSNVFQTRAGCLIGAEHVNNSYECDIPIGAGICASYQTQTNSPRRARSVASQSIIAYTMSLGAENSVAYSNNSIAIPTNFTISVTTEILPVSMTKTSVDCTMYICGDSTECSNLLLQYGSFCTQLNRALTGIAVEQDKNTQEVFAQVKQIYKTPPIKDFGGFNFSQILPDPSKPSKRSFIEDLLFNKVTLADAGFIKQYGDCLGDIAARDLICAQKFNGLTVLPPLLTDEMIAQYTSALLAGTITSGWTFGAGAALQIPFAMQMAYRFNGCGVTQNVLYENQKLIANQFNSAIGKIQDSLSSTASALGKLQDVVNQNAQALNTLVKQLSSNFGAISSVLNDILSRLDKVEAEVQIDRLITGRLQSLQTYVTQQLIRAAEIRASANLAATKMSECVLGQSKRVDFCGKGCHLMSFPQSAPHGVVFLHVTYVPAQEKNFTTAPAICHDGKAHFPREGVFVSNGTHWFVTQRNFYEPQIITTDNTFVSGNCDVVIGIVNNTVYDPLQPELDSGGGGSDIIKLLNEQVNKEMQSSNLYMSMSSWCYTHSLDGAGLFLFDHAAEEYEHAKKLIIFLNENNVPVQLTSISAPEHKFEGLTQIFQKAYEHEQHISESINNIVDHAIKSKDHATFNFLQWYVAEQHEEEVLFKDILDKIELIGNENHGLYLADQYVKGIAKSRKS

SEQ ID NO: 9258 - protein, 1315 aa, Artificial Sequence
  SARS-CoV-2/France/IDF0372/2020__EPI_ISL_406596 spike protein (1-1147)(I909C_Y1047C) Ferritin construct
MFVFLVLLPLVSSQCVNLTTRTQLPPAYTNSFTRGVYYPDKVFRSSVLHSTQDLFLPFFSNVTWFHAIHVSGTNGTKRFDNPVLPFNDGVYFASTEKSNIIRGWIFGTTLDSKTQSLLIVNNATNVVIKVCEFQFCNDPFLGVYYHKNNKSWMESEFRVYSSANNCTFEYVSQPFLMDLEGKQGNFKNLREFVFKNIDGYFKIYSKHTPINLVRDLPQGFSALEPLVDLPIGINITRFQTLLALHRSYLTPGDSSSGWTAGAAAYYVGYLQPRTFLLKYNENGTITDAVDCALDPLSETKCTLKSFTVEKGIYQTSNFRVQPTESIVRFPNITNLCPFGEVFNATRFASVYAWNRKRISNCVADYSFLYNSASFSTFKCYGVSPTKLNDLCFTNVYADSFVIRGDEVRQIAPGQTGKIADYNYKLPDDFTGCVIAWNSNNLDSKVGGNYNYLYRLFRKSNLKPFERDISTEIYQAGSTPCNGVEGFNCYFPLQSYGFQPTNGVGYQPYRVVVLSFELLHAPATVCGPKKSTNLVKNKCVNFNFNGLTGTGVLTESNKKFLPFQQFGRDIADTTDAVRDPQTLEILDITPCSFGGVSVITPGTNTSNQVAVLYQDVNCTEVPVAIHADQLTPTWRVYSTGSNVFQTRAGCLIGAEHVNNSYECDIPIGAGICASYQTQTNSPRRARSVASQSIIAYTMSLGAENSVAYSNNSIAIPTNFTISVTTEILPVSMTKTSVDCTMYICGDSTECSNLLLQYGSFCTQLNRALTGIAVEQDKNTQEVFAQVKQIYKTPPIKDFGGFNFSQILPDPSKPSKRSFIEDLLFNKVTLADAGFIKQYGDCLGDIAARDLICAQKFNGLTVLPPLLTDEMIAQYTSALLAGTITSGWTFGAGAALQIPFAMQMAYRFNGCGVTQNVLYENQKLIANQFNSAIGKIQDSLSSTASALGKLQDVVNQNAQALNTLVKQLSSNFGAISSVLNDILSRLDKVEAEVQIDRLITGRLQSLQTYVTQQLIRAAEIRASANLAATKMSECVLGQSKRVDFCGKGCHLMSFPQSAPHGVVFLHVTYVPAQEKNFTTAPAICHDGKAHFPREGVFVSNGTHWFVTQRNFYEPQIITTDNTFVSGNCDVVIGIVNNTVYDPLQPELDSGGGGSDIIKLLNEQVNKEMQSSNLYMSMSSWCYTHSLDGAGLFLFDHAAEEYEHAKKLIIFLNENNVPVQLTSISAPEHKFEGLTQIFQKAYEHEQHISESINNIVDHAIKSKDHATFNFLQWYVAEQHEEEVLFKDILDKIELIGNENHGLYLADQYVKGIAKSRKS

SEQ ID NO: 9259 - protein, 1315 aa, Artificial Sequence
  SARS-CoV-2/Australia/VIC01/2020__EPI_ISL_406844 spike protein (1-1147)(I909C_Y1047C) Ferritin construct
MFVFLVLLPLVSSQCVNLTTRTQLPPAYTNSFTRGVYYPDKVFRSSVLHSTQDLFLPFFSNVTWFHAIHVSGTNGTKRFDNPVLPFNDGVYFASTEKSNIIRGWIFGTTLDSKTQSLLIVNNATNVVIKVCEFQFCNDPFLGVYYHKNNKSWMESEFRVYSSANNCTFEYVSQPFLMDLEGKQGNFKNLREFVFKNIDGYFKIYSKHTPINLVRDLPQGFSALEPLVDLPIGINITRFQTLLALHRRYLTPGDSSSGWTAGAAAYYVGYLQPRTFLLKYNENGTITDAVDCALDPLSETKCTLKSFTVEKGIYQTSNFRVQPTESIVRFPNITNLCPFGEVFNATRFASVYAWNRKRISNCVADYSVLYNSASFSTFKCYGVSPTKLNDLCFTNVYADSFVIRGDEVRQIAPGQTGKIADYNYKLPDDFTGCVIAWNSNNLDSKVGGNYNYLYRLFRKSNLKPFERDISTEIYQAGSTPCNGVEGFNCYFPLQSYGFQPTNGVGYQPYRVVVLSFELLHAPATVCGPKKSTNLVKNKCVNFNFNGLTGTGVLTESNKKFLPFQQFGRDIADTTDAVRDPQTLEILDITPCSFGGVSVITPGTNTSNQVAVLYQDVNCTEVPVAIHADQLTPTWRVYSTGSNVFQTRAGCLIGAEHVNNSYECDIPIGAGICASYQTQTNSPRRARSVASQSIIAYTMSLGAENSVAYSNNSIAIPTNFTISVTTEILPVSMTKTSVDCTMYICGDSTECSNLLLQYGSFCTQLNRALTGIAVEQDKNTQEVFAQVKQIYKTPPIKDFGGFNFSQILPDPSKPSKRSFIEDLLFNKVTLADAGFIKQYGDCLGDIAARDLICAQKFNGLTVLPPLLTDEMIAQYTSALLAGTITSGWTFGAGAALQIPFAMQMAYRFNGCGVTQNVLYENQKLIANQFNSAIGKIQDSLSSTASALGKLQDVVNQNAQALNTLVKQLSSNFGAISSVLNDILSRLDKVEAEVQIDRLITGRLQSLQTYVTQQLIRAAEIRASANLAATKMSECVLGQSKRVDFCGKGCHLMSFPQSAPHGVVFLHVTYVPAQEKNFTTAPAICHDGKAHFPREGVFVSNGTHWFVTQRNFYEPQIITTDNTFVSGNCDVVIGIVNNTVYDPLQPELDSGGGGSDIIKLLNEQVNKEMQSSNLYMSMSSWCYTHSLDGAGLFLFDHAAEEYEHAKKLIIFLNENNVPVQLTSISAPEHKFEGLTQIFQKAYEHEQHISESINNIVDHAIKSKDHATFNFLQWYVAEQHEEEVLFKDILDKIELIGNENHGLYLADQYVKGIAKSRKS

SEQ ID NO: 9260 - protein, 1315 aa, Artificial Sequence
  SARS-CoV-2/Germany/BavPat1/2020__EPI_ISL_406862 spike protein (1-1147)(I909C_Y1047C) Ferritin construct
MFVFLVLLPLVSSQCVNLTTRTQLPPAYTNSFTRGVYYPDKVFRSSVLHSTQDLFLPFFSNVTWFHAIHVSGTNGTKRFDNPVLPFNDGVYFASTEKSNIIRGWIFGTTLDSKTQSLLIVNNATNVVIKVCEFQFCNDPFLGVYYHKNNKSWMESEFRVYSSANNCTFEYVSQPFLMDLEGKQGNFKNLREFVFKNIDGYFKIYSKHTPINLVRDLPQGFSALEPLVDLPIGINITRFQTLLALHRSYLTPGDSSSGWTAGAAAYYVGYLQPRTFLLKYNENGTITDAVDCALDPLSETKCTLKSFTVEKGIYQTSNFRVQPTESIVRFPNITNLCPFGEVFNATRFASVYAWNRKRISNCVADYSVLYNSASFSTFKCYGVSPTKLNDLCFTNVYADSFVIRGDEVRQIAPGQTGKIADYNYKLPDDFTGCVIAWNSNNLDSKVGGNYNYLYRLFRKSNLKPFERDISTEIYQAGSTPCNGVEGFNCYFPLQSYGFQPTNGVGYQPYRVVVLSFELLHAPATVCGPKKSTNLVKNKCVNFNFNGLTGTGVLTESNKKFLPFQQFGRDIADTTDAVRDPQTLEILDITPCSFGGVSVITPGTNTSNQVAVLYQGVNCTEVPVAIHADQLTPTWRVYSTGSNVFQTRAGCLIGAEHVNNSYECDIPIGAGICASYQTQTNSPRRARSVASQSIIAYTMSLGAENSVAYSNNSIAIPTNFTISVTTEILPVSMTKTSVDCTMYICGDSTECSNLLLQYGSFCTQLNRALTGIAVEQDKNTQEVFAQVKQIYKTPPIKDFGGFNFSQILPDPSKPSKRSFIEDLLFNKVTLADAGFIKQYGDCLGDIAARDLICAQKFNGLTVLPPLLTDEMIAQYTSALLAGTITSGWTFGAGAALQIPFAMQMAYRFNGCGVTQNVLYENQKLIANQFNSAIGKIQDSLSSTASALGKLQDVVNQNAQALNTLVKQLSSNFGAISSVLNDILSRLDKVEAEVQIDRLITGRLQSLQTYVTQQLIRAAEIRASANLAATKMSECVLGQSKRVDFCGKGCHLMSFPQSAPHGVVFLHVTYVPAQEKNFTTAPAICHDGKAHFPREGVFVSNGTHWFVTQRNFYEPQIITTDNTFVSGNCDVVIGIVNNTVYDPLQPELDSGGGGSDIIKLLNEQVNKEMQSSNLYMSMSSWCYTHSLDGAGLFLFDHAAEEYEHAKKLIIFLNENNVPVQLTSISAPEHKFEGLTQIFQKAYEHEQHISESINNIVDHAIKSKDHATFNFLQWYVAEQHEEEVLFKDILDKIELIGNENHGLYLADQYVKGIAKSRKS

SEQ ID NO: 9261 - protein, 1315 aa, Artificial Sequence
  SARS-CoV-2/Wuhan/HBCDC-HB-02/2020__EPI_ISL_412978 spike protein (1-1147)(I909C_Y1047C) Ferritin construct
MFVFLVLLPLVSSQCVNLTTRTQLPPAYTNSFTRGVYYPDKVFRSSVLHSTQDLFLPFFSNVTWFHAIHVSGTNGTKRFDNPVLPFNDGVYFASTEKSNIIRGWIFGTTLDSKTQSLLIVNNATNVVIKVCEFQFCNDPFLGVYYHKNNKSWMESEFRVYSSANNCTFEYVSQPFLMDLEGKQGNFKNLREFVFKNIDGYFKIYSKHTPINLVRDLPQGFSALEPLVDLPIGINITRFQTLLALHRSYLTPGDSSSGWTAGAAAYYVGYLQPRTFLLKYNENGTITDAVDCALDPLSETKCTLKSFTVEKGIYQTSNFRVQPTESIVRFPNITNLCPFGEVFNATRFASVYAWNRKRISNCVADYSVLYNSASFSTFKCYGVSPTKLNDLCFTNVYADSFVIRGDEVRQIAPGQTGKIADYNYKLPDDFTGCVIAWNSNNLDSKVGGNYNYLYRLFRKSNLKPFERDISTEIYQAGSTPCNGVEGFNCYFPLQSYGFQPTNGVGYQPYRVVVLSFELLHAPATVCGPKKSTNLVKNKCVNFNFNGLTGTGVLTESNKKFLPFQQFGRDIADTTDAVRDPQTLEILDITPCSFGGVSVITPGTNTSNQVAVLYQDVNCTEVPVAIHADQLTPTWRVYSTGSNVFQTRAGCLIGAEHVNNSYECDIPIGAGICASYQTQTNSPRRARSVASQSIIAYTMSLGAENSVAYSNNSIAIPTNFTISVTTEILPVSMTKTSVDCTMYICGDSTECSNFLLQYGSFCTQLNRALTGIAVEQDKNTQEVFAQVKQIYKTPPIKDFGGFNFSQILPDPSKPSKRSFIEDLLFNKVTLADAGFIKQYGDCLGDIAARDLICAQKFNGLTVLPPLLTDEMIAQYTSALLAGTITSGWTFGAGAALQIPFAMQMAYRFNGCGVTQNVLYENQKLIANQFNSAIGKIQDSLSSTASALGKLQDVVNQNAQALNTLVKQLSSNFGAISSVLNDILSRLDKVEAEVQIDRLITGRLQSLQTYVTQQLIRAAEIRASANLAATKMSECVLGQSKRVDFCGKGCHLMSFPQSAPHGVVFLHVTYVPAQEKNFTTAPAICHDGKAHFPREGVFVSNGTHWFVTQRNFYEPQIITTDNTFVSGNCDVVIGIVNNTVYDPLQPELDSGGGGSDIIKLLNEQVNKEMQSSNLYMSMSSWCYTHSLDGAGLFLFDHAAEEYEHAKKLIIFLNENNVPVQLTSISAPEHKFEGLTQIFQKAYEHEQHISESINNIVDHAIKSKDHATFNFLQWYVAEQHEEEVLFKDILDKIELIGNENHGLYLADQYVKGIAKSRKS

SEQ ID NO: 9262 - protein, 1315 aa, Artificial Sequence
  SARS-CoV-2/Australia/QLD02/2020__EPI_ISL_407896 spike protein (1-1147)(I909C_Y1047C) Ferritin construct
MFVFLVLLPLVSSQCVNLTTRTQLPPAYTNSFTRGVYYPDKVFRSSVLHSTQDLFLPFFSNVTWFHAIHVSGTNGTKRFDNPVLPFNDGVYFASTEKSNIIRGWIFGTTLDSKTQSLLIVNNATNVVIKVCEFQFCNDPFLGVYYHKNNKSWMESEFRVYSSANNCTFEYVSQPFLMDLEGKQGNFKNLREFVFKNIDGYFKIYSKHTPINLVRDLPQGFSALEPLVDLPIGINITRFQTLLALHRSYLTPGDSSSGWTAGAAAYYVGYLQPRTFLLKYNENGTITDAVDCALDPLSETKCTLKSFTVEKGIYQTSNFRVQPTESIVRFPNITNLCPFGEVFNATRFASVYAWNRKRISNCVADYSVLYNSASFSTFKCYGVSPTKLNDLCFTNVYADSFVIRGDEVRQIAPGQTGKIADYNYKLPDDFTGCVIAWNSNNLDSKVGGNYNYLYRLFRKSNLKPFERDISTEIYQAGSTPCNGVEGFNCYFPLQSYGFQPTNGVGYQPYRVVVLSFELLHAPATVCGPKKSTNLVKNKCVNFNFNGLTGTGVLTESNKKFLPFQQFGRDIADTTDAVRDPQTLEILDITPCSFGGVSVITPGTNTSNQVAVLYQDVNCTEVPVAIHADQLTPTWRVYSTGSNVFQTRAGCLIGAEHVNNSYECDIPIGAGICASYQTQTNSPRRARSVASQSIIAYTMSLGAENSVAYSNNSIAIPTNFTISVTTEILPVSMTKTSVDCTMYICGDSTECSNLLLQYGSFCTQLNRALTGIAVEQDKNTQEVFAQVKQIYKTPPIKDFGGFNFSQILPDPSKPSKRSFIEDLLFNKVTLADAGFIKQYGDCLGDIAARDLICAQKFNGLTVLPPLLTDEMIAQYTSALLAGTITSGWTFGAGAALQIPFAMQMAYRFNGCGVTQNVLYENQKLIANQFNSAIGKIQDSLSSTASALGKLQDVVNQNAQALNTLVKQLSSNFGAISSVLNDILSRLDKVEAEVQIDRLITGRLQSLQTYVTQQLIRAAEIRASANLAATKMSECVLGQSKRVDFCGKGCHLMSFPQSAPHGVVFLHVTYVPAQEKNFTTAPAICHDGKAHFPREGVFVSNGTHWFVTQRNFYEPQIITTDNTFVSGNCDVVIGIVNNTVYDPLQLELDSGGGGSDIIKLLNEQVNKEMQSSNLYMSMSSWCYTHSLDGAGLFLFDHAAEEYEHAKKLIIFLNENNVPVQLTSISAPEHKFEGLTQIFQKAYEHEQHISESINNIVDHAIKSKDHATFNFLQWYVAEQHEEEVLFKDILDKIELIGNENHGLYLADQYVKGIAKSRKS

SEQ ID NO: 9263 - protein, 1315 aa, Artificial Sequence
  SARS-CoV-2/India/1-31/2020__EPI_ISL_413523 spike protein (1-1147)(I909C_Y1047C) Ferritin construct
MFVFLVLLPLVSSQCVNLTTRTQLPPAYTNSFTRGVYYPDKVFRSSVLHSTQDLFLPFFSNVTWFHAIHVSGTNGTKRFDNPVLPFNDGVYFASTEKSNIIRGWIFGTTLDSKTQSLLIVNNATNVVIKVCEFQFCNDPFLGVYYHKNNKSWMESEFRVYSSANNCTFEYVSQPFLMDLEGKQGNFKNLREFVFKNIDGYFKIYSKHTPINLVRDLPQGFSALEPLVDLPIGINITRFQTLLALHRSYLTPGDSSSGWTAGAAAYYVGYLQPRTFLLKYNENGTITDAVDCALDPLSETKCTLKSFTVEKGIYQTSNFRVQPTESIVRFPNITNLCPFGEVFNATRFASVYAWNRKRISNCVADYSVLYNSASFSTFKCYGVSPTKLNDLCFTNVYADSFVIRGDEVRQIAPGQTGKIADYNYKLPDDFTGCVIAWNSNNLDSKVGGNYNYLYRLFRKSNLKPFERDISTEIYQAGSTPCNGVEGFNCYFPLQSYGFQPTNGVGYQPYRVVVLSFELLHAPATVCGPKKSTNLVKNKCVNFNFNGLTGTGVLTESNKKFLPFQQFGRDIADTTDAVRDPQTLEILDITPCSFGGVSVITPGTNTSNQVAVLYQDVNCTEVPVAIHADQLTPTWRVYSTGSNVFQTRAGCLIGAEHVNNSYECDIPIGAGICASYQTQTNSPRRARSVASQSIIAYTMSLGAENSVAYSNNSIAIPTNFTISVTTEILPVSMTKTSVDCTMYICGDSTECSNLLLQYGSFCTQLNRALTGIAVEQDKNTQEVFAQVKQIYKTPPIKDFGGFNFSQILPDPSKPSKRSFIEDLLFNKVTLADAGFIKQYGDCLGDIAARDLICAQKFNGLTVLPPLLTDEMIAQYTSALLAGTITSGWTFGAGAALQIPFAMQMAYRFNGCGVTQNVLYENQKLIANQFNSVIGKIQDSLSSTASALGKLQDVVNQNAQALNTLVKQLSSNFGAISSVLNDILSRLDKVEAEVQIDRLITGRLQSLQTYVTQQLIRAAEIRASANLAATKMSECVLGQSKRVDFCGKGCHLMSFPQSAPHGVVFLHVTYVPAQEKNFTTAPAICHDGKAHFPREGVFVSNGTHWFVTQRNFYEPQIITTDNTFVSGNCDVVIGIVNNTVYDPLQPELDSGGGGSDIIKLLNEQVNKEMQSSNLYMSMSSWCYTHSLDGAGLFLFDHAAEEYEHAKKLIIFLNENNVPVQLTSISAPEHKFEGLTQIFQKAYEHEQHISESINNIVDHAIKSKDHATFNFLQWYVAEQHEEEVLFKDILDKIELIGNENHGLYLADQYVKGIAKSRKS

SEQ ID NO: 9264 - protein, 1315 aa, Artificial Sequence
  SARS-CoV-2/Guangdong/GD2020087-P0008/2020__EPI_ISL_413863 spike protein (1-1147)(I909C_Y1047C) Ferritin construct
MFVFLVLLPLVSSQCVNLTTRTQLPPAYTNSFTRGVYYPDKVFRSSVLHSTQDLFLPFFSNVTWFHAIHVSGTNGTKRFDNPVLPFNDGVYFASTEKSNIIRGWIFGTTLDSKTQSLLIVNNATNVVIKVCEFQFCNDPFLGVYYHKNNKSWMESEFRVYSSANNCTFEYVSQPFLMDLEGKQGNFKNLREFVFKNIDGYFKIYSKHTPINLVRDLPQGFSALEPLVDLPIGINITRFQTLLALHRSYLTPGDSSSGWTAGAAAYYVGYLQPRTFLLKYNENGTITDAVDCALDPLSETKCTLKSFTVEKGIYQTSNFRVQPTESIVRFPNITNLCPFGEVFNATRFASVYAWNRKRISNCVADYSVLYNSASFSTFKCYGVSPTKLNDLCFTNVYADSFVIRGDEVREIAPGQTGKIADYNYKLPDDFTGCVIAWNSNNLDSKVGGNYNYLYRLFRKSNLKPFERDISTEIYQAGSTPCNGVEGFNCYFPLQSYGFQPTNGVGYQPYRVVVLSFELLHAPATVCGPKKSTNLVKNKCVNFNFNGLTGTGVLTESNKKFLPFQQFGRDIADTTDAVRDPQTLEILDITPCSFGGVSVITPGTNTSNQVAVLYQDVNCTEVPVAIHADQLTPTWRVYSTGSNVFQTRAGCLIGAEHVNNSYECDIPIGAGICASYQTQTNSPRRARSVASQSIIAYTMSLGAENSVAYSNNSIAIPTNFTISVTTEILPVSMTKTSVDCTMYICGDSTECSNLLLQYGSFCTQLNRALTGIAVEQDKNTQEVFAQVKQIYKTPPIKDFGGFNFSQILPDPSKPSKRSFIEDLLFNKVTLADAGFIKQYGDCLGDIAARDLICAQKFNGLTVLPPLLTDEMIAQYTSALLAGTITSGWTFGAGAALQIPFAMQMAYRFNGCGVTQNVLYENQKLIANQFNSAIGKIQDSLSSTASALGKLQDVVNQNAQALNTLVKQLSSNFGAISSVLNDILSRLDKVEAEVQIDRLITGRLQSLQTYVTQQLIRAAEIRASANLAATKMSECVLGQSKRVDFCGKGCHLMSFPQSAPHGVVFLHVTYVPAQEKNFTTAPAICHDGKAHFPREGVFVSNGTHWFVTQRNFYEPQIITTDNTFVSGNCDVVIGIVNNTVYDPLQPELDSGGGGSDIIKLLNEQVNKEMQSSNLYMSMSSWCYTHSLDGAGLFLFDHAAEEYEHAKKLIIFLNENNVPVQLTSISAPEHKFEGLTQIFQKAYEHEQHISESINNIVDHAIKSKDHATFNFLQWYVAEQHEEEVLFKDILDKIELIGNENHGLYLADQYVKGIAKSRKS

SEQ ID NO: 9265 - protein, 1315 aa, Artificial Sequence
  SARS-CoV-2/Sweden/01/2020__EPI_ISL_411951 spike protein (1-1147)(I909C_Y1047C) Ferritin construct
MFVFLVLLPLVSSQCVNLTTRTQLPPAYTNSFTRGVYYPDKVFRSSVLHSTQDLFLPFFSNVTWFHAIHVSGTNGTKRFDNPVLPFNDGVYFASTEKSNIIRGWIFGTTLDSKTQSLLIVNNATNVVIKVCEFQFCNDPFLGVYYHKNNKSWMESEFRVYSSANNCTFEYVSQPFLMDLEGKQGNFKNLREFVFKNIDGYFKIYSKHTPINLVRDLPQGFSALEPLVDLPIGINITRFQTLLALHRSYLTPGDSSSGWTAGAAAYYVGYLQPRTFLLKYNENGTITDAVDCALDPLSETKCTLKSFTVEKGIYQTSNFRVQPTESIVRFPNITNLCPFGEVFNATRFASVYAWNRKRISNCVADYSVLYNSASFSTFKCYGVSPTKLNDLCFTNVYADSFVIRGDEVRQIAPGQTGKIADYNYKLPDDFTGCVIAWNSNNLDSKVGGNYNYLYRLFRKSNLKPFERDISTEIYQAGSTPCNGVEGFNCYFPLQSYGFQPTNGVGYQPYRVVVLSFELLHAPATVCGPKKSTNLVKNKCVNFNFNGLTGTGVLTESNKKFLPFQQFGRDIADTTDAVRDPQTLEILDITPCSFGGVSVITPGTNTSNQVAVLYQDVNCTEVPVAIHADQLTPTWRVYSTGSNVFQTRAGCLIGAEHVNNSYECDIPIGAGICASYQTQTNSPRRARSVASQSIIAYTMSLGAENSVAYSNNSIAIPTNFTISVTTEILPVSMTKTSVDCTMYICGDSTECSNLLLQYGSFCTQLNRALTGIAVEQDKNTQEVFAQVKQIYKTPPIKDCGGFNFSQILPDPSKPSKRSFIEDLLFNKVTLADAGFIKQYGDCLGDIAARDLICAQKFNGLTVLPPLLTDEMIAQYTSALLAGTITSGWTFGAGAALQIPFAMQMAYRFNGCGVTQNVLYENQKLIANQFNSAIGKIQDSLSSTASALGKLQDVVNQNAQALNTLVKQLSSNFGAISSVLNDILSRLDKVEAEVQIDRLITGRLQSLQTYVTQQLIRAAEIRASANLAATKMSECVLGQSKRVDFCGKGCHLMSFPQSAPHGVVFLHVTYVPAQEKNFTTAPAICHDGKAHFPREGVFVSNGTHWFVTQRNFYEPQIITTDNTFVSGNCDVVIGIVNNTVYDPLQPELDSGGGGSDIIKLLNEQVNKEMQSSNLYMSMSSWCYTHSLDGAGLFLFDHAAEEYEHAKKLIIFLNENNVPVQLTSISAPEHKFEGLTQIFQKAYEHEQHISESINNIVDHAIKSKDHATFNFLQWYVAEQHEEEVLFKDILDKIELIGNENHGLYLADQYVKGIAKSRKS

SEQ ID NO: 9266 - protein, 1315 aa, Artificial Sequence
  SARS-CoV-2/Tianmen/HBCDC-HB-07/2020__EPI_ISL_412983 spike protein (1-1147)(I909C_Y1047C) Ferritin construct
MFVFLVLLPLVSSQCVNLTTRTQLPPAYTNSFTRGVYYPDKVFRSSVLHSTQDLFLPFFSNVTWFHAIHVSGTNGTKRFDNPVLPFNDGVYFASTEKSNIIRGWIFGTTLDSKTQSLLIVNNATNVVIKVCEFQFCNDPFLGVYYHKNNKSWMESEFRVYSSANNCTFEYVSQPFLMDLEGKQGNFKNLREFVFKNIDGYFKIYSKHTPINLVRDLPQGFSALEPLVDLPIGINITRFQTLLALHRSYLTPGDSSSGWTAGAAAYYVGYLQPRTFLLKYNENGTITDAVDCALDPLSETKCTLKSFTVEKGIYQTSNFRVQPTESIVRFPNITNLCPFGEVFNATRFASVYAWNRKRISNCVADYSVLYNSASFSTFKCYGVSPTKLNDLCFTNVYADSFVIRGDEVRQIAPGQTGKIADYNYKLPDDFTGCVIAWNSNNLDSKVGGNYNYLYRLFRKSNLKPFERDISTEIYQAGSTPCNGVEGFNCYFPLQSYGFQPTNGVGYQPYRVVVLSFELLHAPATVCGPKKSTNLVKNKCVNFNFNGLTGTGVLTESNKKFLPFQQFGRDIADTTDAVRDPQTLEILDITPCSFGGVSVITPGTNTSNQVAVLYQDLNCTEVPVAIHADQLTPTWRVYSTGSNVFQTRAGCLIGAEHVNNSYECDIPIGAGICASYQTQTNSPRRARSVASQSIIAYTMSLGAENSVAYSNNSIAIPTNFTISVTTEILPVSMTKTSVDCTMYICGDSTECSNLLLQYGSFCTQLNRALTGIAVEQDKNTQEVFAQVKQIYKTPPIKDFGGFNFSQILPDPSKPSKRSFIEDLLFNKVTLADAGFIKQYGDCLGDIAARDLICAQKFNGLTVLPPLLTDEMIAQYTSALLAGTITSGWTFGAGAALQIPFAMQMAYRFNGCGVTQNVLYENQKLIANQFNSAIGKIQDSLSSTASALGKLQDVVNQNAQALNTLVKQLSSNFGAISSVLNDILSRLDKVEAEVQIDRLITGRLQSLQTYVTQQLIRAAEIRASANLAATKMSECVLGQSKRVDFCGKGCHLMSFPQSAPHGVVFLHVTYVPAQEKNFTTAPAICHDGKAHFPREGVFVSNGTHWFVTQRNFYEPQIITTDNTFVSGNCDVVIGIVNNTVYDPLQPELDSGGGGSDIIKLLNEQVNKEMQSSNLYMSMSSWCYTHSLDGAGLFLFDHAAEEYEHAKKLIIFLNENNVPVQLTSISAPEHKFEGLTQIFQKAYEHEQHISESINNIVDHAIKSKDHATFNFLQWYVAEQHEEEVLFKDILDKIELIGNENHGLYLADQYVKGIAKSRKS

SEQ ID NO: 9267 - protein, 1315 aa, Artificial Sequence
  SARS-CoV-2/Hong Kong/case42_VM20002493/2020__EPI_ISL_414527 spike protein (1-1147)(I909C_Y1047C) Ferritin construct
MFVFLVLLPLVSSQCVNLTTRTQLPPAYTNSFTRGVYYPDKVFRSSVLHSTQDLFLPFFSNVTWFHAIHVSGTNGTKRFDNPVLPFNDGVYFASTEKSNIIRGWIFGTTLDSKTQSLLIVNNATNVVIKVCEFQFCNDPFLGVYYHKNNKSWMESEFRVYSSANNCTFEYVSQPFLMDLEGKQGNFKNLREFVFKNIDGYFKIYSKHTPINLVRDLPQGFSALEPLVDLPIGINITRFQTLLALHRSYLTPGDSSSGWTAGAAAYYVGYLQPRTFLLKYNENGTITDAVDCALDPLSETKCTLKSFTVEKGIYQTSNFRVQPTESIVRFPNITNLCPFGEVFNATRFASVYAWNRKRISNCVADYSVLYNSASFSTFKCYGVSPTKLNDLCFTNVYADSFVIRGDEVRQIAPGQTGKIADYNYKLPDDFTGCVIAWNSNNLDSKVGGNYNYLYRLFRKSNLKPFERDISTEIYQAGSTPCNGVEGFNCYFPLQSYGFQPTNGVGYQPYRVVVLSFELLHAPATVCGPKKSTNLVKNKCVNFNFNGLTGTGVLTESNKKFLPFQQFGRDIADTTDAVRDPQTLEILDITPCSFGGVSVITPGTNTSNQVAVLYQDVNCTEVPVAIHADQLTPTWRVYSTGSNVFQTRAGCLIGAEHVNNSYECDIPIGAGICASYQTQTNSPRRARSVASQSIIAYTMSLGAENSVAYSNNSIAIPTNFAISVTTEILPVSMTKTSVDCTMYICGDSTECSNLLLQYGSFCTQLNRALTGIAVEQDKNTQEVFAQVKQIYKTPPIKDFGGFNFSQILPDPSKPSKRSFIEDLLFNKVTLADAGFIKQYGDCLGDIAARDLICAQKFNGLTVLPPLLTDEMIAQYTSALLAGTITSGWTFGAGAALQIPFAMQMAYRFNGCGVTQNVLYENQKLIANQFNSAIGKIQDSLSSTASALGKLQDVVNQNAQALNTLVKQLSSNFGAISSVLNDILSRLDKVEAEVQIDRLITGRLQSLQTYVTQQLIRAAEIRASANLAATKMSECVLGQSKRVDFCGKGCHLMSFPQSAPHGVVFLHVTYVPAQEKNFTTAPAICHDGKAHFPREGVFVSNGTHWFVTQRNFYEPQIITTDNTFVSGNCDVVIGIVNNTVYDPLQPELDSGGGGSDIIKLLNEQVNKEMQSSNLYMSMSSWCYTHSLDGAGLFLFDHAAEEYEHAKKLIIFLNENNVPVQLTSISAPEHKFEGLTQIFQKAYEHEQHISESINNIVDHAIKSKDHATFNFLQWYVAEQHEEEVLFKDILDKIELIGNENHGLYLADQYVKGIAKSRKS

SEQ ID NO: 9268 - protein, 1315 aa, Artificial Sequence
  SARS-CoV-2/USA/CruiseA-23/2020__EPI_ISL_414482 spike protein (1-1147)(I909C_Y1047C) Ferritin construct
MFVFLVLLPLVSSQCVNLTTRTQLPPAYTNSFTRGVYYPDKVFRSSVLHSTQDLFLPFFSNVTWFHAIHVSGTNGTKRFDNPVLPFNDGVYFASTEKSNIIRGWIFGTTLDSKTQSLLIVNNATNVVIKVCEFQFCNDPFLGVYYHKNNKSWMESEFRVYSSANNCTFEYVSQPFLMDLEVKQGNFKNLREFVFKNIDGYFKIYSKHTPINLVRDLPQGFSALEPLVDLPIGINITRFQTLLALHRSYLTPGDSSSGWTAGAAAYYVGYLQPRTFLLKYNENGTITDAVDCALDPLSETKCTLKSFTVEKGIYQTSNFRVQPTESIVRFPNITNLCPFGEVFNATRFASVYAWNRKRISNCVADYSVLYNSASFSTFKCYGVSPTKLNDLCFTNVYADSFVIRGDEVRQIAPGQTGKIADYNYKLPDDFTGCVIAWNSNNLDSKVGGNYNYLYRLFRKSNLKPFERDISTEIYQAGSTPCNGVEGFNCYFPLQSYGFQPTNGVGYQPYRVVVLSFELLHAPATVCGPKKSTNLVKNKCVNFNFNGLTGTGVLTESNKKFLPFQQFGRDIADTTDAVRDPQTLEILDITPCSFGGVSVITPGTNTSNQVAVLYQDVNCTEVPVAIHADQLTPTWRVYSTGSNVFQTRAGCLIGAEHVNNSYECDIPIGAGICASYQTQTNSPRRARSVASQSIIAYTMSLGAENSVAYSNNSIAIPTNFTISVTTEILPVSMTKTSVDCTMYICGDSTECSNLLLQYGSFCTQLNRALTGIAVEQDKNTQEVFAQVKQIYKTPPIKDFGGFNFSQILPDPSKPSKRSFIEDLLFNKVTLADAGFIKQYGDCLGDIAARDLICAQKFNGLTVLPPLLTDEMIAQYTSALLAGTITSGWTFGAGAALQIPFAMQMAYRFNGCGVTQNVLYENQKLIANQFNSAIGKIQDSLSSTASALGKLQDVVNQNAQALNTLVKQLSSNFGAISSVLNDILSRLDKVEAEVQIDRLITGRLQSLQTYVTQQLIRAAEIRASANLAATKMSECVLGQSKRVDFCGKGCHLMSFPQSAPHGVVFLHVTYVPAQEKNFTTAPAICHDGKAHFPREGVFVSNGTHWFVTQRNFYEPQIITTDNTFVSGNCDVVIGIVNNTVYDPLQPELDSGGGGSDIIKLLNEQVNKEMQSSNLYMSMSSWCYTHSLDGAGLFLFDHAAEEYEHAKKLIIFLNENNVPVQLTSISAPEHKFEGLTQIFQKAYEHEQHISESINNIVDHAIKSKDHATFNFLQWYVAEQHEEEVLFKDILDKIELIGNENHGLYLADQYVKGIAKSRKS

SEQ ID NO: 9269 - protein, 1315 aa, Artificial Sequence
  SARS-CoV-2/Hong Kong/case85_VM20002868/2020__EPI_ISL_414519 spike protein (1-1147)(I909C_Y1047C) Ferritin construct
MFVFLVLVPLVSSQCVNLTTRTQLPPAYTNSFTRGVYYPDKVFRSSVLHSTQDLFLPFFSNVTWFHAIHVSGTNGTKRFDNPVLPFNDGVYFASTEKSNIIRGWIFGTTLDSKTQSLLIVNNATNVVIKVCEFQFCNDPFLGVYYHKNNKSWMESEFRVYSSANNCTFEYVSQPFLMDLEGKQGNFKNLREFVFKNIDGYFKIYSKHTPINLVRDLPQGFSALEPLVDLPIGINITRFQTLLALHRSYLTPGDSSSGWTAGAAAYYVGYLQPRTFLLKYNENGTITDAVDCALDPLSETKCTLKSFTVEKGIYQTSNFRVQPTESIVRFPNITNLCPFGEVFNATRFASVYAWNRKRISNCVADYSVLYNSASFSTFKCYGVSPTKLNDLCFTNVYADSFVIRGDEVRQIAPGQTGKIADYNYKLPDDFTGCVIAWNSNNLDSKVGGNYNYLYRLFRKSNLKPFERDISTEIYQAGSTPCNGVEGFNCYFPLQSYGFQPTNGVGYQPYRVVVLSFELLHAPATVCGPKKSTNLVKNKCVNFNFNGLTGTGVLTESNKKFLPFQQFGRDIADTTDAVRDPQTLEILDITPCSFGGVSVITPGTNTSNQVAVLYQDVNCTEVPVAIHADQLTPTWRVYSTGSNVFQTRAGCLIGAEHVNNSYECDIPIGAGICASYQTQTNSPRRARSVASQSIIAYTMSLGAENSVAYSNNSIAIPTNFTISVTTEILPVSMTKTSVDCTMYICGDSTECSNLLLQYGSFCTQLNRALTGIAVEQDKNTQEVFAQVKQIYKTPPIKDFGGFNFSQILPDPSKPSKRSFIEDLLFNKVTLADAGFIKQYGDCLGDIAARDLICAQKFNGLTVLPPLLTDEMIAQYTSALLAGTITSGWTFGAGAALQIPFAMQMAYRFNGCGVTQNVLYENQKLIANQFNSAIGKIQDSLSSTASALGKLQDVVNQNAQALNTLVKQLSSNFGAISSVLNDILSRLDKVEAEVQIDRLITGRLQSLQTYVTQQLIRAAEIRASANLAATKMSECVLGQSKRVDFCGKGCHLMSFPQSAPHGVVFLHVTYVPAQEKNFTTAPAICHDGKAHFPREGVFVSNGTHWFVTQRNFYEPQIITTDNTFVSGNCDVVIGIVNNTVYDPLQPELDSGGGGSDIIKLLNEQVNKEMQSSNLYMSMSSWCYTHSLDGAGLFLFDHAAEEYEHAKKLIIFLNENNVPVQLTSISAPEHKFEGLTQIFQKAYEHEQHISESINNIVDHAIKSKDHATFNFLQWYVAEQHEEEVLFKDILDKIELIGNENHGLYLADQYVKGIAKSRKS

SEQ ID NO: 9270 - protein, 1315 aa, Artificial Sequence; identical to SEQ ID NO: 9260
  SARS-CoV-2/England/200990660/2020__EPI_ISL_414523 spike protein (1-1147)(I909C_Y1047C) Ferritin construct

SEQ ID NO: 9271 - protein, 1315 aa, Artificial Sequence
  SARS-CoV-2/Australia/NSW09/2020__EPI_ISL_413595 spike protein (1-1147)(I909C_Y1047C) Ferritin construct
MFVFLVLLPLVSSQCVNLTTRTQLPPAYTNSFTRGVYYPDKVFRSSVLHSTQDLFLPFFSNVTWFHAIHVSGTNGTKRFDNPVLPFNDGVYFASTEKSNIIRGWIFGTTLDSKTQSLLIVNNATNVVIKVCEFQFCNDPFLGVYYHKNNKSWMESEFRVYSSANNCTFEYVSQPFLMDLEGKQGNFKNLREFVFKNIDGYFKIYSKHTPINLVRDLPQGFSALEPLVDLPIGINITRFQTLLALHRSYLTPGDSSSGWTAGAAAYYVGYLQPRTFLLKYNENGTITDAVDCALDPLSETKCTLKSFTVEKGIYQTSNFRVQPTESIVRFPNITNLCPFGEVFNATRFASVYAWNRKRISNCVADYSVLYNSASFSTFKCYGVSPTKLNDLCFTNVYADSFVIRGDEVRQIAPGQTGKIADYNYKLPDDFTGCVIAWNSNNLDSKVGGNYNYLYRLFRKSNLKPFERDISTEIYQAGSTPCNGVEGFNCYFPLQSYGFQPTNGVGYQPYRVVVLSFELLHAPATVCGPKKSTNLVKNKCVNFNFNGLTGTGVLTESNKKFLPFQQFGRDIADTTDAVRDPQTLEILDITPCSFGGVSVITPGTNTSNQVAVLYQDVNCTEVPVAIHADQLTPTWRVYSTGSNVFQTRAGCLIGAEHVNNSYECDIPIGAGICASYQTQTNSPRRARSVASQSIIAYTMSLGAENSVAYSNNSIAIPTNFTISVTTEILPVSMTKTSVDCTMYICGDSTECSNLLLQYGSFCTQLNRALTGIAVEQDKNTQEVFAQVKQIYKTPPIKDFGGFNFSQILPDPSKPSKRSFIEDLLFNKVTLADAGFIKQYGDCLGDIAARDLICAQKFNGLTVLPPLLTDEMIAQYTSALLAGTITSGWTFGAGAALQIPFAMQMAYRFNGCGVTQNVLYENQKLIANQFNSAIGKIQDSLSFTASALGKLQDVVNQNAQALNTLVKQLSSNFGAISSVLNDILSRLDKVEAEVQIDRLITGRLQSLQTYVTQQLIRAAEIRASANLAATKMSECVLGQSKRVDFCGKGCHLMSFPQSAPHGVVFLHVTYVPAQEKNFTTAPAICHDGKAHFPREGVFVSNGTHWFVTQRNFYEPQIITTDNTFVSGNCDVVIGIVNNTVYDPLQPELDSGGGGSDIIKLLNEQVNKEMQSSNLYMSMSSWCYTHSLDGAGLFLFDHAAEEYEHAKKLIIFLNENNVPVQLTSISAPEHKFEGLTQIFQKAYEHEQHISESINNIVDHAIKSKDHATFNFLQWYVAEQHEEEVLFKDILDKIELIGNENHGLYLADQYVKGIAKSRKS

SEQ ID NO: 9272 - protein, 1315 aa, Artificial Sequence; identical to SEQ ID NO: 9252
  SARS-CoV-2/Australia/NSW10/2020__EPI_ISL_413596 spike protein (1-1147)(I909C_Y1047C) Ferritin construct

SEQ ID NO: 9273 - protein, 1315 aa, Artificial Sequence
  SARS-CoV-2/Switzerland/1000477797/2020__EPI_ISL_413023 spike protein (1-1147)(I909C_Y1047C) Ferritin construct
MFVFLVLLPLVSSQCVNLTTRTQLPPAYTNSFTRGVYYPDKVFRSSVLHSTQDLFLPFFSNVTWFHAIHVSGTNGTKRFDNPVLPFNDGVYFASTEKSNIIRGWIFGTTLDSKTQSLLIVNNATNVVIKVCEFQFCNDPFLGVYYHKNNKSWMESEFRVYSSANNCTFEYVSQPFLMDLEGKQGNFKNLREFVFKNIDGYFNIYSKHTPINLVRDLPQGFSALEPLVDLPIGINITRFQTLLALHRSYLTPGDSSSGWTAGAAAYYVGYLQPRTFLLKYNENGTITDAVDCALDPLSETKCTLKSFTVEKGIYQTSNFRVQPTESIVRFPNITNLCPFGEVFNATRFASVYAWNRKRISNCVADYSVLYNSASFSTFKCYGVSPTKLNDLCFTNVYADSFVIRGDEVRQIAPGQTGKIADYNYKLPDDFTGCVIAWNSNNLDSKVGGNYNYLYRLFRKSNLKPFERDISTEIYQAGSTPCNGVEGFNCYFPLQSYGFQPTNGVGYQPYRVVVLSFELLHAPATVCGPKKSTNLVKNKCVNFNFNGLTGTGVLTESNKKFLPFQQFGRDIADTTDAVRDPQTLEILDITPCSFGGVSVITPGTNTSNQVAVLYQGVNCTEVPVAIHADQLTPTWRVYSTGSNVFQTRAGCLIGAEHVNNSYECDIPIGAGICASYQTQTNSPRRARSVASQSIIAYTMSLGAENSVAYSNNSIAIPTNFTISVTTEILPVSMTKTSVDCTMYICGDSTECSNLLLQYGSFCTQLNRALTGIAVEQDKNTQEVFAQVKQIYKTPPIKDFGGFNFSQILPDPSKPSKRSFIEDLLFNKVTLADAGFIKQYGDCLGDIAARDLICAQKFNGLTVLPPLLTDEMIAQYTSALLAGTITSGWTFGAGAALQIPFAMQMAYRFNGCGVTQNVLYENQKLIANQFNSAIGKIQDSLSSTASALGKLQDVVNQNAQALNTLVKQLSSNFGAISSVLNDILSRLDKVEAEVQIDRLITGRLQSLQTYVTQQLIRAAEIRASANLAATKMSECVLGQSKRVDFCGKGCHLMSFPQSAPHGVVFLHVTYVPAQEKNFTTAPAICHDGKAHFPREGVFVSNGTHWFVTQRNFYEPQIITTDNTFVSGNCDVVIGIVNNTVYDPLQPELDSGGGGSDIIKLLNEQVNKEMQSSNLYMSMSSWCYTHSLDGAGLFLFDHAAEEYEHAKKLIIFLNENNVPVQLTSISAPEHKFEGLTQIFQKAYEHEQHISESINNIVDHAIKSKDHATFNFLQWYVAEQHEEEVLFKDILDKIELIGNENHGLYLADQYVKGIAKSRKS

SEQ ID NO: 9274 - protein, 1315 aa, Artificial Sequence
  SARS-CoV-2/Belgium/BA-02291/2020__EPI_ISL_415159 spike protein (1-1147)(I909C_Y1047C) Ferritin construct
MFVFLVLLPLVSSQCVNLTTRTQLPPAYTNSFTRGVYYPDKVFRSSVLHSTQDLFLPFFSNVTWFHAIHVSGTNGTKRFDNPVLPFNDGVYFASTEKSNIIRGWIFGTTLDSKTQSLLIVNNATNVVIKVCEFQFCNDPFLGVYYHKNNKSWMESEFRVYSSANNCTFEYVSQPFLMDLEGKQGNFKNLREFVFKNIDGYFKIYSKHTPINLVRDLPQGFSALEPLVDLPIGINITRFQTLLALHRSYLTPGDSSSGWTAGAAAYYVGYLQPRTFLLKYNENGTITDAVDCALDPLSETKCTLKSFTVEKGIYQTSNFRVQPTESIVRFPNITNLCPFGEVFNATRFASVYAWNRKRISNCVADYSVLYNSASFSTFKCYGVSPTKLNDLCFTNVYADSFVIRGDEVRQIAPGQTGKIADYNYKLPDDFTGCVIAWNSNNLDSKVGGNYNYLYRLFRRSNLKPFERDISTEIYQAGSTPCNGVEGFNCYFPLQSYGFQPTNGVGYQPYRVVVLSFELLPAPATVCGPKKSTNLVKNKCVNFNFNGLTGTGVLTESNKKFLPFQQFGRDIADTTDAVRDPQTLEILDITPCSFGGVSVITPGTNTSNQVAVLYQGVNCTEVPVAIHADQLTPTWRVYSTGSNVFQTRAGCLIGAEHVNNSYECDIPIGAGICASYQTQTNSPRRARSVASQSIIAYTMSLGAENSVAYSNNSIAIPTNFTISVTTEILPVSMTKTSVDCTMYICGDSTECSNLLLQYGSFCTQLNRALTGIAVEQDKNTQEVFAQVKQIYKTPPIKDFGGFNFSQILPDPSKPSKRSFIEDLLFNKVTLADAGFIKQYGDCLGDIAARDLICAQKFNGLTVLPPLLTDEMIAQYTSALLAGTITSGWTFGAGAALQIPFAMQMAYRFNGCGVTQNVLYENQKLIANQFNSAIGKIQDSLSSAAPALGKLQDVVNQNAQALNTLVKQLSSNFGAISSVLNDILSRLDKVEAEVQIDRLITGRLQSLQTYVTQQLIRAAEIRASANLAATKMSECVLGQSKRVDFCGKGCHLMSFPQSAPHGVVFLHVTYVPAQEKNFTTAPAICHDGKAHFPREGVFVSNGTHWFVTQRNFYEPQIITTDNTFVSGNCDVVIGIVNNTVYDPLQPELDSGGGGSDIIKLLNEQVNKEMQSSNLYMSMSSWCYTHSLDGAGLFLFDHAAEEYEHAKKLIIFLNENNVPVQLTSISAPEHKFEGLTQIFQKAYEHEQHISESINNIVDHAIKSKDHATFNFLQWYVAEQHEEEVLFKDILDKIELIGNENHGLYLADQYVKGIAKSRKS

SEQ ID NO: 9275 - protein, 1315 aa, Artificial Sequence
  SARS-CoV-2/USA/WA8-UW5/2020__EPI_ISL_413486 spike protein (1-1147)(I909C_Y1047C) Ferritin construct
MFVFLVLLPLVSSQCVNLTTRTQLPPAYTNSFTRGVYYPDKVFRSSVLHSTQDLFLPFFSNVTWFHAIHVSGTNGTKRFDNPVLPFNDGVYFASTEKSNIIRGWIFGTTLDSKTQSLLIVNNATNVVIKVCEFQFCNDPFLGVYYHKNNKSWMESEFRVYSSANNCTFEYVSQPFLMDLEGKQGNFKNLREFVFKNIDGYFKIYSKHTPINLVRDLPQGFSALEPLVDLPIGINITRFQTLLALHRSYLTPGDSSSGWTAGAAAYYVGYLQPRTFLLKYNENGTITDAVDCALDPLSETKCTLKSFTVEKGIYQTSNFRVQPTESIVRFPNITNLCPFGEVFNATRFASVYAWNRKRISNCVADYSVLYNSASFSTFKCYGVSPTKLNDLCFTNVYADSFVIRGDEVRQIAPGQTGKIADYNYKLPDDFTGCVIAWNSNNLDSKVGGNYNYLYRLFRKSNLKPFERDISTEIYQAGSTPCNGVEGFNCYFPLQSYGFQPTNGVGYQPYRVVVLSFELLHAPATVCGPKKSTNLVKNKCVNFNFNGLTGTGVLTESNKKFLPFQQFGRDIADTTDAVRDPQTLEILDITPCSFGGVSVITPGTNTSNQVAVLYQDVNCTEVPVAIHADQLTPTWRVYSTGSNVFQTRAGCLIGAEYVNNSYECDIPIGAGICASYQTQTNSPRRARSVASQSIIAYTMSLGAENSVAYSNNSIAIPTNFTISVTTEILPVSMTKTSVDCTMYICGDSTECSNLLLQYGSFCTQLNRALTGIAVEQDKNTQEVFAQVKQIYKTPPIKDFGGFNFSQILPDPSKPSKRSFIEDLLFNKVTLADAGFIKQYGDCLGDIAARDLICAQKFNGLTVLPPLLTDEMIAQYTSALLAGTITSGWTFGAGAALQIPFAMQMAYRFNGCGVTQNVLYENQKLIANQFNSAIGKIQDSLSSTASALGKLQDVVNQNAQALNTLVKQLSSNFGAISSVLNDILSRLDKVEAEVQIDRLITGRLQSLQTYVTQQLIRAAEIRASANLAATKMSECVLGQSKRVDFCGKGCHLMSFPQSAPHGVVFLHVTYVPAQEKNFTTAPAICHDGKAHFPREGVFVSNGTHWFVTQRNFYEPQIITTDNTFVSGNCDVVIGIVNNTVYDPLQPELDSGGGGSDIIKLLNEQVNKEMQSSNLYMSMSSWCYTHSLDGAGLFLFDHAAEEYEHAKKLIIFLNENNVPVQLTSISAPEHKFEGLTQIFQKAYEHEQHISESINNIVDHAIKSKDHATFNFLQWYVAEQHEEEVLFKDILDKIELIGNENHGLYLADQYVKGIAKSRKS

SEQ ID NO: 9276 - protein, 1315 aa, Artificial Sequence
  SARS-CoV-2/England/20102000506/2020__EPI_ISL_415147 spike protein (1-1147)(I909C_Y1047C) Ferritin construct
MFVFLVLLPLVSSQCVNLTTRTQLPPAYTNSFTRGVYYPDKVFRSSVLHSTQDLFLPFFSNVTWFHAIHVSGTNGTKRFDNPVLPFNDGVYFASTEKSNIIRGWIFGTTLDSKTQSLLIVNNATNVVIKVCEFQFCNDPFLGVYYHKNNKSWMESEFRVYSSANNCTFEYVSQPFLMDLEGKQGNFKNLREFVFKNIDGYFKIYSKHTPINLVRDLPQGFSALEPLVDLPIGINITRFQTLLALHRSYLTPGDSSSGWTAGAAAYYVGYLQPRTFLLKYNENGTITDAVDCALDPLSETKCTLKSFTVEKGIYQTSNFRVQPTESIVRFPNITNLCPFGEVFNATRFASVYAWNRKRISNCVADYSVLYNSASFSTFKCYGVSPTKLNDLCFTNVYADSFVIRGDEVRQIAPGQTGKIADYNYKLPDDFTGCVIAWNSNNLDSKVGGNYNYLYRLFRKSNLKPFERDISTEIYQAGSTPCNGVEGFNCYFPLQSYGFQPTNGVGYQPYRVVVLSFELLHAPATVCGPKKSTNLVKNKCVNFNFNGLTGTGVLTESNKKFLPFQQFGRDIADTTDAVRDPQTLEILDITPCSFGGVSVITPGTNTSNQVAVLYQGVNCTEVPVAIHADQLTPTWRVYSTGSNVFQTRAGCLIGAEHVNNSYECDIPIGAGICASYQTQTNSPRRARSVASQSIIAYTMSLGAENSVAYSNNSIAIPTNFTISVTTEILPVSMTKTSVDCTMYICGDSTECSNLLLQYGSFCTQLNRALTGIAVEQDKNTQEVFAQVKQIYKTPPIKDFGGFNFSQILPDPSKPSKRSFIEDLLFNKVTLADAGFIKQYGYCLGDIAARDLICAQKFNGLTVLPPLLTDEMIAQYTSALLAGTITSGWTFGAGAALQIPFAMQMAYRFNGCGVTQNVLYENQKLIANQFNSAIGKIQDSLSSTASALGKLQDVVNQNAQALNTLVKQLSSNFGAISSVLNDILSRLDKVEAEVQIDRLITGRLQSLQTYVTQQLIRAAEIRASANLAATKMSECVLGQSKRVDFCGKGCHLMSFPQSAPHGVVFLHVTYVPAQEKNFTTAPAICHDGKAHFPREGVFVSNGTHWFVTQRNFYEPQIITTDNTFVSGNCDVVIGIVNNTVYDPLQPELDSGGGGSDIIKLLNEQVNKEMQSSNLYMSMSSWCYTHSLDGAGLFLFDHAAEEYEHAKKLIIFLNENNVPVQLTSISAPEHKFEGLTQIFQKAYEHEQHISESINNIVDHAIKSKDHATFNFLQWYVAEQHEEEVLFKDILDKIELIGNENHGLYLADQYVKGIAKSRKS

SEQ ID NO: 9277 - protein, 1315 aa, Artificial Sequence
  SARS-CoV-2/Belgium/VAG-03013/2020__EPI_ISL_415155 spike protein (1-1147)(I909C_Y1047C) Ferritin construct
MFVFLVLLPLVSSQCVNLTTRTQLPPAYTNSFTRGVYYPDKVFRSSVLHSTQDLFLPFFSNVTWFHAIHVSGTNGTKRFDNPVLPFNDGVYFASTEKSNIIRGWIFGTTLDSKTQSLLIVNNATNVVIKVCEFQFCNDPFLGVYYHKNNKSWMESEFRVYSSANNCTFEYVSQPFLMDLEGKQGNFKNLREFVFKNIDGYFKIYSKHTPINLVRDLPQGFSALEPLVDLPIGINITRFQTLLALHRSYLTPGDSSSGWTAGAAAYYVGYLQPRTFLLKYNENGTITDAVDCALDPLSETKCTLKSFTVEKGIYQTSNFRVQPTESIVRFPNITNLCPFGEVFNATRFASVYAWNRKRISNCVADYSVLYNSASFSTFKCYGVSPTKLNDLCFTNVYADSFVIRGDEVRQIAPGQTGKIADYNYKLPDDFTGCVIAWNSNNLDSKVGGNYNYLYRLFRKSNLKPFERDISTEIYQAGSTPCNGVEGFNCYFPLQSYGFQPTNGVGYQPYRVVVLSFELLHAPATVCGPKKSTNLVKNKCVNFNFNGLTGTGVLTESNKKFLPFQQFGRDIADTTDAVRDPQTLEILDITPCSFGGVSVITPGTNTSNQVAVLYQGVNCTEVPVAIHADQLTPTWRVYSTGSNVFQTRAGCLIGAEHVNNSYECDIPIGAGICASYQTQTNSPRRARSVASQSIIAYTMSLGAENSVAYSNNSIAIPTNFTISVTTEILPVSMTKTSVDCTMYICGDSTECSNLLLQYGSFCTQLNRALTGIAVEQDKNTQEVFAQVKQIYKTPPIKDFGGFNFSQILPDPSKPSKRSFIEDLLFNKVTLADAGFIKQYGDCLGDIAARDLICAQKFNGLTVLPPLLTDEMIAQYTSALLAGTITSGWTFGAGAALQIPFAMQMAYRFNGCGVTQNVLYENQKLIANQFNSAIGKIQDSLSSTATALGKLQDVVNQNAQALNTLVKQLSSNFGAISSVLNDILSRLDKVEAEVQIDRLITGRLQSLQTYVTQQLIRAAEIRASANLAATKMSECVLGQSKRVDFCGKGCHLMSFPQSAPHGVVFLHVTYVPAQEKNFTTAPAICHDGKAHFPREGVFVSNGTHWFVTQRNFYEPQIITTDNTFVSGNCDVVIGIVNNTVYDPLQPELDSGGGGSDIIKLLNEQVNKEMQSSNLYMSMSSWCYTHSLDGAGLFLFDHAAEEYEHAKKLIIFLNENNVPVQLTSISAPEHKFEGLTQIFQKAYEHEQHISESINNIVDHAIKSKDHATFNFLQWYVAEQHEEEVLFKDILDKIELIGNENHGLYLADQYVKGIAKSRKS

SEQ ID NO: 9278 - protein, 1315 aa, Artificial Sequence
  SARS-CoV-2/Belgium/BC-03016/2020__EPI_ISL_415157 spike protein (1-1147)(I909C_Y1047C) Ferritin construct
MFVFLVLLPLVSSQCVNLTTRTQLPPAYTNSFTRGVYYPDKVFRSSVLHSTQDLFLPFFSNVTWFHAIHVSGTNGTKRFDNPVLPFNDGVYFASTEKSNIIRGWIFGTTLDSKTQSLLIVNNATNVVIKVCEFQFCNDPFLGVYYHKNNKSWMESEFRVYSSANNCTFEYVSQPFLMDLEGKQGNFKNLREFVFKNIDGYFKIYSKHTPINLVRDLPQGFSALEPLVDLPIGINITRFQTLLALHRSYLTPGDSSSGWTAGAAAYYVGYLQPRTFLLKYNENGTITDAVDCALDPLSETKCTLKSFTVEKGIYQTSNFRVQPTESIVRFPNITNLCPFGEVFNATRFASVYAWNRKRISNCVADYSVLYNSASFSTFKCYGVSPTKLNDLCFTNVYADSFVIRGDEVRQIAPGQTGKIADYNYKLPDDFTGCVIAWNSNNLDSKVGGNYNYLYRLFRKSNLKPFERDISTEIYQAGSTPCNGVEGFNCYFPLQSYGFQPTNGVGYQPYRVVVLSFELLHAPATVCGPKKSTNLVKNKCVNFNFNGLTGTGVLTESNKKFLPFQQFGRDIADTTDAVRDPQTLEILDITPCSFGGVSVITPGTNTSNQVAVLYQGVNCTEVPVAIHADQLTPTWRVYSTGSNVFQTRAGCLIGAEHVNNSYECDIPIGAGICASYQTQTNSPRRARSVASQSIIAYTMSLGAENSVAYSNNSIAIPTNFTISVTTEILPVSMTKTSVDCTMYICGDSTECSNLLLQYGSFCTQLNRALTGIAVEQDKNTQEVFAQVKQIYKTPPIKDFGGFNFSQILPDPSKPSKRSFIEDLLFNKVTLADAGFIKQYGDCLGDIAARDLICAQKFNGLTVLPPLLTDEMIAQYTSALLAGTITSGWTFGAGAALQIPFAMQMAYRFNGCGVTQNVLYENQKLIANQFNSAIGKIQDSLSSTAPALGKLQDVVNQNAQALNTLVKQLSSNFGAISSVLNDILSRLDKVEAEVQIDRLITGRLQSLQTYVTQQLIRAAEIRASANLAATKMSECVLGQSKRVDFCGKGCHLMSFPQSAPHGVVFLHVTYVPAQEKNFTTAPAICHDGKAHFPREGVFVSNGTHWFVTQRNFYEPQIITTDNTFVSGNCDVVIGIVNNTVYDPLQPELDSGGGGSDIIKLLNEQVNKEMQSSNLYMSMSSWCYTHSLDGAGLFLFDHAAEEYEHAKKLIIFLNENNVPVQLTSISAPEHKFEGLTQIFQKAYEHEQHISESINNIVDHAIKSKDHATFNFLQWYVAEQHEEEVLFKDILDKIELIGNENHGLYLADQYVKGIAKSRKS

SEQ ID NO: 9279 - protein, 1315 aa, Artificial Sequence
  SARS-CoV-2/Germany/BavPat3/2020__EPI_ISL_414521 spike protein (1-1147)(I909C_Y1047C) Ferritin construct
MFVFLVLLPLVSSQCVNLTTRTQLPPAYTNSFTRGVYYPDKVFRSSVLHSTQDLFLPFFSNVTWFHAIHVSGTNGTKRFDNPVLPFNDGVYFASTEKSNIIRGWIFGTTLDSKTQSLLIVNNATNVVIKVCEFQFCNDPFLGVYYHKNNKSWMESEFRVYSSANNCTFEYVSQPFLMDLEGKQGNFKNLREFVFKNIDGYFKIYSKHTPINLVRDLPQGFSALEPLVDLPIGINITRFQTLLALHRSYLTPGDSSSGWTAGAAAYYVGYLQPRTFLLKYNENGTITDAVDCALDPLSETKCTLKSFTVEKGIYQTSNFRVQPTESIVRFPNITNLCPFGEVFNATRFASVYAWNRKRISNCVADYSVLYNSASFSTFKCYGVSPTKLNDLCFTNVYADSFVIRGDEVRQIAPGQTGKIADYNYKLPDDFTGCVIAWNSNNLDSKVGGNYNYLYRLFRKSNLKPFERDISTEIYQAGSTPCNGVEGFNCYFPLQSYGFQPTNGVGYQPYRVVVLSFELLHAPATVCGPKKSTNLVKNKCVNFNFNGLTGTGVLTESNKKFLPFQQFGRDIADTTDAVRDPQTLEILDITPCSFGGVSVITPGTNTSNQVAVLYQDVNCTEVPVAIHADQLTPTWRVYSTGSNVFQTRAGCLIGAEHVNNSYECDIPIGAGICASYQTQTNSPRRARSVASQSIIAYTMSLGAENSVAYSNNSIAIPTNFTISVTTEILPVSMTKTSVDCTMYICGDSTECSNLLLQYGSFCTQLNRALTGIAVEQDKNTQQVFAQVKQIYKTPPIKDFGGFNFSQILPDPSKPSKRSFIEDLLFNKVTLADAGFIKQYGDCLGDIAARDLICAQKFNGLTVLPPLLTDEMIAQYTSALLAGTITSGWTFGAGAALQIPFAMQMAYRFNGCGVTQNVLYENQKLIANQFNSAIGKIQDSLSSTASALGKLQDVVNQNAQALNTLVKQLSSNFGAISSVLNDILSRLDKVEAEVQIDRLITGRLQSLQTYVTQQLIRAAEIRASANLAATKMSECVLGQSKRVDFCGKGCHLMSFPQSAPHGVVFLHVTYVPAQEKNFTTAPAICHDGKAHFPREGVFVSNGTHWFVTQRNFYEPQIITTDNTFVSGNCDVVIGIVNNTVYDPLQPELDSGGGGSDIIKLLNEQVNKEMQSSNLYMSMSSWCYTHSLDGAGLFLFDHAAEEYEHAKKLIIFLNENNVPVQLTSISAPEHKFEGLTQIFQKAYEHEQHISESINNIVDHAIKSKDHATFNFLQWYVAEQHEEEVLFKDILDKIELIGNENHGLYLADQYVKGIAKSRKS

SEQ ID NO: 9280 - protein, 1315 aa, Artificial Sequence
  SARS-CoV-2/France/HF1805/2020__EPI_ISL_414628 spike protein (1-1147)(I909C_Y1047C) Ferritin construct
MFVFLVLLPLVSSQCVNLTTRTQLPPAYTNSFTRGVYYPDKVFRSSVLHSTQDLFLPFFSNVTWFHAIHVSGTNGTKRFDNPVLPFNDGVYFASTEKSNIIRGWIFGTTLDSKTQSLLIVNNATNVVIKVCEFQFCNDPFLGVYYHKNNKSWMESEFRVYSSANNCTFEYVSQPFLMDLEGKQGNFKNLREFVFKNIDGYFKIYSKHTPINLVRDLPQGFSALEPLVDLPIGINITRFQTLLALHRSYLTPGDSSSGWTAGAAAYYVGYLQPRTFLLKYNENGTITDAVDCALDPLSETKCTLKSFTVEKGIYQTSNFRVQPTESIVRFPNITNLCPFGEVFNATRFASVYAWNRKRISNCVADYSVLYNSASFSTFKCYGVSPTKLNDLCFTNVYADSFVIRGDEVRQIAPGQTGKIADYNYKLPDDFTGCVIAWNSNNLDSKVGGNYNYLYRLFRKSNLKPFERDISTEIYQAGSTPCNGVEGFNCYFPLQSYGFQPTNGVGYQPYRVVVLSFELLHAPATVCGPKKSTNLVKNKCVNFNFNGLTGTGVLTESNKKFLPFQQFGRDIADTTDAVRDPQTLEILDITPCSFGGVSVITPGTNTSNQVAVLYQGVNCTEVPVAIHADQLTPTWRVYSTGSNVFQTRAGCLIGAEHVNNSYECDIPIGAGICASYQTQTNSPRRARSVASQSIIAYTMSLGAENSVAYSNNSIAIPTNFTISVTTEILPVSMTKTSVDCTMYICGDSTECSNLLLQYGSFCTQLNRALTGIAVEQDKNTQEVFAQVKQIYKTPPIKDFGGFNFSQILPDPSKPSKRSFIEDLLFNKVTLADAGFIKQYGDCLGDIAARDLICAQKFNGLTVLPPLLTDEMIAQYTSALLAGTITSGWTFGAGAALQIPFAMQMAYRFNGCGVTQNVLYENQKLIANQFNSAIGKIQDSLSSTASALGKLQDVVNQNAQALNTLVKQLSSNFGAISSVLNDILSRLDKVEAEVQIDRLITGRLQSLQTYVTQQLIRAAEIRASANLAATKMSECVLGQSKRVDFCGKGCHLMSFPQSAPHGVVFLHVTYVPAQEKNFTTAPAICHDGKAHFPREGVFVSNGTHWFVTQRNFYEPQIITTDNTFVSGNCDVVIGVVNNTVYDPLQPELDSGGGGSDIIKLLNEQVNKEMQSSNLYMSMSSWCYTHSLDGAGLFLFDHAAEEYEHAKKLIIFLNENNVPVQLTSISAPEHKFEGLTQIFQKAYEHEQHISESINNIVDHAIKSKDHATFNFLQWYVAEQHEEEVLFKDILDKIELIGNENHGLYLADQYVKGIAKSRKS

SEQ ID NO: 9281 - protein, 1315 aa, Artificial Sequence
  SARS-CoV-2/Netherlands/ZuidHolland_9/2020__EPI_ISL_414445 spike protein (1-1147)(I909C_Y1047C) Ferritin construct
MFVFLVLLPLVSSQCVNLTTRTQLPPAYTNSFTRGVYYPDKVFRSSVLHSTQDLFLPFFSNVTWFHAIHVSGTNGTKRFDNPVLPFNDGVYFASTEKSNIIRGWIFGTTLDSKTQSLLIVNNATNVVIKVCEFQFCNDPFLGVYYHKNNKSWMESEFRVYSSANNCTFEYVSQPFLMDLEGKQGNFKNLREFVFKNIDGYFKIYSKHTPINLVRDLPQGFSALEPLVDLPIGINITRFQTLLALHRSYLTPGDSSSGWTAGAAAYYVGYLQPRTFLLKYNENGTITDAVDCALDPLSETKCTLKSFTVEKGIYQTSNFRVQPTESIVRFPNITNLCPFGEVFNATRFASVYAWNRKRISNCVADYSVLYNSASFSTFKCYGVSPTKLNDLCFTNVYADSFVIRGDEVRQIAPGQTGKIADYNYKLPDDFTGCVIAWNSNNLDSKVGGNYNYLYRLFRKSNLKPFERDISTEIYQAGSTPCNGVEGFNCYFPLQSYGFQPTNGVGYQPYRVVVLSFELLHAPATVCGPKKSTNLVKNKCVNFNFNGLTGTGVLTESNKKFLPFQQFGRDIADTTDAVRDPQTLEILDITPCSFGGVSVITPGTNTSNQVAVLYQGVNCTEVPVAIHADQLTPTWRVYSTGSNVFQTRAGCLIGAEHVNNSYECDIPIGAGICASYQTQTNSPRRARSVASQSIIAYTMSLGAENSVAYSNNSIAIPTNFTISVTTEILPVSMTKTSVDCTMYICGDSTECSNLLLQYGSFCTQLNRALTGIAVEQDKNTQEVFAQVKQIYKTPPIKDFGGFNFSQILPDPSKPSKRSFIEDLLFNKVTLADAGFIKQYGDCLGDIAARDLICVQKFNGLTVLPPLLTDEMIAQYTSALLAGTITSGWTFGAGAALQIPFAMQMAYRFNGCGVTQNVLYENQKLIANQFNSAIGKIQDSLSSTASALGKLQDVVNQNAQALNTLVKQLSSNFGAISSVLNDILSRLDKVEAEVQIDRLITGRLQSLQTYVTQQLIRAAEIRASANLAATKMSECVLGQSKRVDFCGKGCHLMSFPQSAPHGVVFLHVTYVPAQEKNFTTAPAICHDGKAHFPREGVFVSNGTHWFVTQRNFYEPQIITTDNTFVSGNCDVVIGIVNNTVYDPLQPELDSGGGGSDIIKLLNEQVNKEMQSSNLYMSMSSWCYTHSLDGAGLFLFDHAAEEYEHAKKLIIFLNENNVPVQLTSISAPEHKFEGLTQIFQKAYEHEQHISESINNIVDHAIKSKDHATFNFLQWYVAEQHEEEVLFKDILDKIELIGNENHGLYLADQYVKGIAKSRKS

SEQ ID NO: 9282 - protein, 1315 aa, Artificial Sequence
  SARS-CoV-2/Finland/FIN03032020A/2020__EPI_ISL_413602 spike protein (1-1147)(I909C_Y1047C) Ferritin construct
MFVFLVLLPLVSSQCVNLTTRTQLPPAYTNSFTRGVYYPDKVFRSSVLHSTQDLFLPFFSNVTWFHAIHVSGTNGTKRFDNPVLPFNDGVYFASTEKSNIIRGWIFGTTLDSKTQSLLIVNNATNVVIKVCEFQFCNDPFLGVYYHKNNKSWMESEFRVYSSANNCTFEYVSQPFLMDLEGKQGNFKNLREFVFKNIDGYFKIYSKHTPINLVRDLPQGFSALEPLVDLPIGINITRFQTLLALHRSYLTPGDSSSGWTAGAAAYYVGYLQPRTFLLKYNENGTITDAVDCALDPLSETKCTLKSFTVEKGIYQTSNFRVQPTESIVRFPNITNLCPFGEVFNATRFASVYAWNRKRISNCVADYSVLYNSASFSTFKCYGVSPTKLNDLCFTNVYADSFVIRGDEVRQIAPGQTGKIADYNYKLPDDFTGCVISWNSNNLDSKVGGNYNYLYRLFRKSNLKPFERDISTEIYQAGSTPCNGVEGFNCYFPLQSYGFQPTNGVGYQPYRVVVLSFELLHAPATVCGPKKSTNLVKNKCVNFNFNGLTGTGVLTESNKKFLPFQQFGRDIADTTDAVRDPQTLEILDITPCSFGGVSVITPGTNTSNQVAVLYQGVNCTEVPVAIHADQLTPTWRVYSTGSNVFQTRAGCLIGAEHVNNSYECDIPIGAGICASYQTQTNSPRRARSVASQSIIAYTMSLGAENSVAYSNNSIAIPTNFTISVTTEILPVSMTKTSVDCTMYICGDSTECSNLLLQYGSFCTQLNRALTGIAVEQDKNTQEVFAQVKQIYKTPPIKDFGGFNFSQILPDPSKPSKRSFIEDLLFNKVTLADAGFIKQYGDCLGDIAARDLICAQKFNGLTVLPPLLTDEMIAQYTSALLAGTITSGWTFGAGAALQIPFAMQMAYRFNGCGVTQNVLYENQKLIANQFNSAIGKIQDSLSSTASALGKLQDVVNQNAQALNTLVKQLSSNFGAISSVLNDILSRLDKVEAEVQIDRLITGRLQSLQTYVTQQLIRAAEIRASANLAATKMSECVLGQSKRVDFCGKGCHLMSFPQSAPHGVVFLHVTYVPAQEKNFTTAPAICHDGKAHFPREGVFVSNGTHWFVTQRNFYEPQIITTDNTFVSGNCDVVIGIVNNTVYDPLQPELDSGGGGSDIIKLLNEQVNKEMQSSNLYMSMSSWCYTHSLDGAGLFLFDHAAEEYEHAKKLIIFLNENNVPVQLTSISAPEHKFEGLTQIFQKAYEHEQHISESINNIVDHAIKSKDHATFNFLQWYVAEQHEEEVLFKDILDKIELIGNENHGLYLADQYVKGIAKSRKS

SEQ ID NO: 9283 - protein, 1315 aa, Artificial Sequence
  SARS-CoV-2/France/GE1977/2020__EPI_ISL_414632 spike protein (1-1147)(I909C_Y1047C) Ferritin construct
MFVFLVLLPLVSSQCVNLTTRTQLPPAYTNSFTRGVYYPDKVFRSSVLHSTQDLFLPFFSNVTWFHAIHVSGTNGTKRFDNPVLPFNDGVYFASTEKSNIIRGWIFGTTLDSKTQSLLIVNNATNVVIKVCEFQFCNDPFLGVYYHKNNKSWMESEFRVYSSANNCTFEYVSQPFLMDLEGKQGNFKNLREFVFKNIDGYFKIYSKHTPINLVRDLPQGFSALEPLVDLPIGINITRFQTLLALHRSYLTPGDSSSGWTAGAAAYYVGYLQPRTFLLKYNENGTITDAVDCALDPLSETKCTLKSFTVEKGIYQTSNFRVQPTESIVRFPNITNLCPFGEVFNATRFASVYAWNRKRISNCVADYSVLYNSASFSTFKCYGVSPTKLNDLCFTNVYADSFVIRGDEVRQIAPGQTGKIADYNYKLPDDFTGCVIAWNSNNLDSKVGGNYNYLYRLFRKSNLKPFERDISTEIYQAGSTPCNGVEGFNCYFPLQSYGFQPTNGVGYQPYRVVVLSFELLHAPATVCGPKKSTNLVKNKCVNFNFNGLTGTGVLTESNKKFLPFQQFGRDIADTTDAVRDPQTLEILDITPCSFGGVSVITPGTNTSNQVAVLYQGVNCTEVPVAIHADQLTPTWRVYSTGSNVFQTRAGCLIGAEHVNNSYECDIPIGAGICASYQTQTNSPRRARSVASQSIIAYTMSLGAENSVAYSNNSIAIPTNFTISVTTEILPVSMTKTSVDCTMYICGDSTECSNLLLQYGSFCTQLNRALTGIAVEQDKNTQEVFAQVKQIYKTPPIKDFGGFNFSQILPDPSKPSKRSFIEDLLFNKVTLADAGFIKQYGDCLGDIAARDLICAQKFNGLTVLPPLLTDEMIAQYTSALLAGTITSGWTFGAGAALQIPFAMQMAYRFNGCGVTQNVLYENQKLIANQFNSAIGKIQDSLFSTASALGKLQDVVNQNAQALNTLVKQLSSNFGAISSVLNDILSRLDKVEAEVQIDRLITGRLQSLQTYVTQQLIRAAEIRASANLAATKMSECVLGQSKRVDFCGKGCHLMSFPQSAPHGVVFLHVTYVPAQEKNFTTAPAICHDGKAHFPREGVFVSNGTHWFVTQRNFYEPQIITTDNTFVSGNCDVVIGIVNNTVYDPLQPELDSGGGGSDIIKLLNEQVNKEMQSSNLYMSMSSWCYTHSLDGAGLFLFDHAAEEYEHAKKLIIFLNENNVPVQLTSISAPEHKFEGLTQIFQKAYEHEQHISESINNIVDHAIKSKDHATFNFLQWYVAEQHEEEVLFKDILDKIELIGNENHGLYLADQYVKGIAKSRKS

SEQ ID NO: 9284 - protein, 1315 aa, Artificial Sequence
  SARS-CoV-2/Finland/FIN-313/2020__EPI_ISL_414641 spike protein (1-1147)(I909C_Y1047C) Ferritin construct
MFVFLVLLPLVSSQCVNLTTRTQLPPAYTNSFTRGVYYPDKVFRSSVLHSTQDLFLPFFSNVTWFHAIHVSGTNGTKRFDNPVLPFNDGVYFASTEKSNIIRGWIFGTTLDSKTQSLLIVNNATNVVIKVCEFQFCNDPFLGVYYHKNNKSWMESEFRVYSSANNCTFEYVSQPFLMDLEGKQGNFKNLREFVFKNIDGYFKIYSKHTPINLVRDLPQGFSALEPLVDLPIGINITRFKTLLALHRSYLTPGDSSSGWTAGAAAYYVGYLQPRTFLLKYNENGTITDAVDCALDPLSETKCTLKSFTVEKGIYQTSNFRVQPTESIVRFPNITNLCPFGEVFNATRFASVYAWNRKRISNCVADYSVLYNSASFSTFKCYGVSPTKLNDLCFTNVYADSFVIRGDEVRQIAPGQTGKIADYNYKLPDDFTGCVIAWNSNNLDSKVGGNYNYLYRLFRKSNLKPFERDISTEIYQAGSTPCNGVEGFNCYFPLQSYGFQPTNGVGYQPYRVVVLSFELLHAPATVCGPKKSTNLVKNKCVNFNFNGLTGTGVLTESNKKFLPFQQFGRDIADTTDAVRDPQTLEILDITPCSFGGVSVITPGTNTSNQVAVLYQGVNCTEVPVAIHADQLTPTWRVYSTGSNVFQTRAGCLIGAEHVNNSYECDIPIGAGICASYQTQTNSPRRARSVASQSIIAYTMSLGAENSVAYSNNSIAIPTNFTISVTTEILPVSMTKTSVDCTMYICGDSTECSNLLLQYGSFCTQLNRALTGIAVEQDKNTQEVFAQVKQIYKTPPIKDFGGFNFSQILPDPSKPSKRSFIEDLLFNKVTLADAGFIKQYGDCLGDIAARDLICAQKFNGLTVLPPLLTDEMIAQYTSALLAGTITSGWTFGAGAALQIPFAMQMAYRFNGCGVTQNVLYENQKLIANQFNSAIGKIQDSLSSTASALGKLQDVVNQNAQALNTLVKQLSSNFGAISSVLNDILSRLDKVEAEVQIDRLITGRLQSLQTYVTQQLIRAAEIRASANLAATKMSECVLGQSKRVDFCGKGCHLMSFPQSAPHGVVFLHVTYVPAQEKNFTTAPAICHDGKAHFPREGVFVSNGTHWFVTQRNFYEPQIITTDNTFVSGNCDVVIGIVNNTVYDPLQPELDSGGGGSDIIKLLNEQVNKEMQSSNLYMSMSSWCYTHSLDGAGLFLFDHAAEEYEHAKKLIIFLNENNVPVQLTSISAPEHKFEGLTQIFQKAYEHEQHISESINNIVDHAIKSKDHATFNFLQWYVAEQHEEEVLFKDILDKIELIGNENHGLYLADQYVKGIAKSRKS

SEQ ID NO: 9285 - protein, 1315 aa, Artificial Sequence
  SARS-CoV-2/Netherlands/ZuidHolland_2/2020__EPI_ISL_414556 spike protein (1-1147)(I909C_Y1047C) Ferritin construct
MFVFLVLLPLVSSQCVNLTTRTQLPPAYTNSFTRGVYYPDKVFRSSVLHSTQDLFLPFFSNVTWFHAIHVSGTNGTKRFDNPVLPFNDGVYFASTEKSNIIRGWIFGTTLDSKTQSLLIVNNATNVVIKVCEFQFCNDPFLGVYYHKNNKSWMESEFRVYSSANNCTFEYVSQPFLMDLEGKQGNFKNLREFVFKNIDGYFKIYSKHTPINLVRDLPQGFSALEPLVDLPIGINITRFQTLLALHRSYLTPGDSSSGWTAGAAAYYVGYLQPRTFLLKYNENGTITDAVDCALDPLSETKCTLKSFTVEKGIYQTSNFRVQPTESIVRFPNITNLCPFGEVFNATRFASVYAWNRKRISNCVADYSVLYNSASFSTFKCYGVSPTKLNDLCFTNVYADSFVIRGDEVRQIAPGQTGKIADYNYKLPDDFTGCVIAWNSNNLDSKVGGNYNYLYRLFRKSNLKPFERDISTEIYQAGSTPCNGVEGFNCYFPLQSYGFQPTNGVGYQPYRVVVLSFELLHAPATVCGPKKSTNLVKNKCVNFNFNGLTGTGVLTESNKKFLPFQQFGRDIADTTDAVRDPQTLEILDITPCSFGGVSVITPGTNTSNQVAVLYQGVNCTEVPVAIHADQLTPTWRVYSTGSNVFQTRAGCLIGAEHVNNSYECDIPIGAGICASYQTQTNSPRRARSVASQSIIAYTMSLGAENSVAYSNNSIAIPTNFTISVTTEILPVSMTKTSVDCTMYICGDSTECSNLLLQYGSFCTQLNRALTGIALEQDKNTQEVFAQVKQIYKTPPIKDFGGFNFSQILPDPSKPSKRSFIEDLLFNKVTLADAGFIKQYGDCLGDIAARDLICAQKFNGLTVLPPLLTDEMIAQYTSALLAGTITSGWTFGAGAALQIPFAMQMAYRFNGCGVTQNVLYENQKLIANQFNSAIGKIQDSLSSTASALGKLQDVVNQNAQALNTLVKQLSSNFGAISSVLNDILSRLDKVEAEVQIDRLITGRLQSLQTYVTQQLIRAAEIRASANLAATKMSECVLGQSKRVDFCGKGCHLMSFPQSAPHGVVFLHVTYVPAQEKNFTTAPAICHDGKAHFPREGVFVSNGTHWFVTQRNFYEPQIITTDNTFVSGNCDVVIGIVNNTVYDPLQPELDSGGGGSDIIKLLNEQVNKEMQSSNLYMSMSSWCYTHSLDGAGLFLFDHAAEEYEHAKKLIIFLNENNVPVQLTSISAPEHKFEGLTQIFQKAYEHEQHISESINNIVDHAIKSKDHATFNFLQWYVAEQHEEEVLFKDILDKIELIGNENHGLYLADQYVKGIAKSRKS

SEQ ID NO: 9286 - protein, 1315 aa, Artificial Sequence
  SARS-CoV-2/USA/WA-UW31/2020__EPI_ISL_414618 spike protein (1-1147)(I909C_Y1047C) Ferritin construct
MFVFLVLLPLVSSQCVNLTTRTQLPPAYTNSFTRGVYYPDKVFRSSVLHSTQDLFLPFFSNVTWFHAIHVSGTNGTKRFDNPVLPFNDGVYFASTEKSNIIRGWIFGTTLDSKTQSLLIVNNATNVVIKVCEFQFCNDPFLGVYYHKNNKSWMESEFRVYSSANNCTFEYVSQPFLMDLEGKQGNFKNLREFVFKNIDGYFKIYSKHTPINLVRDLPQGFSALEPLVDLPIGINITRFQTLLALHRSYLTPGDSSSGWTAGAAAYYVGYLQPRTFLLKYNENGTITDAVDCALDPLSETKCTLKSFTVEKGIYQTSNFRVQPTESIVRFPNITNLCPFGEVFNATRFASVYAWNRKRISNCVADYSVLYNSASFSTFKCYGVSPTKLNDLCFTNVYADSFVIRGDEVRQIAPGQTGKIADYNYKLPDDFTGCVIAWNSNNLDSKVGGNYNYLYRLFRKSNLKPFERDISTEIYQAGSTPCNGAEGFNCYFPLQSYGFQPTNGVGYQPYRVVVLSFELLHAPATVCGPKKSTNLVKNKCVNFNFNGLTGTGVLTESNKKFLPFQQFGRDIADTTDAVRDPQTLEILDITPCSFGGVSVITPGTNTSNQVAVLYQDVNCTEVPVAIHADQLTPTWRVYSTGSNVFQTRAGCLIGAEHVNNSYECDIPIGAGICASYQTQTNSPRRARSVASQSIIAYTMSLGAENSVAYSNNSIAIPTNFTISVTTEILPVSMTKTSVDCTMYICGDSTECSNLLLQYGSFCTQLNRALTGIAVEQDKNTQEVFAQVKQIYKTPPIKDFGGFNFSQILPDPSKPSKRSFIEDLLFNKVTLADAGFIKQYGDCLGDIAARDLICAQKFNGLTVLPPLLTDEMIAQYTSALLAGTITSGWTFGAGAALQIPFAMQMAYRFNGCGVTQNVLYENQKLIANQFNSAIGKIQDSLSSTASALGKLQDVVNQNAQALNTLVKQLSSNFGAISSVLNDILSRLDKVEAEVQIDRLITGRLQSLQTYVTQQLIRAAEIRASANLAATKMSECVLGQSKRVDFCGKGCHLMSFPQSAPHGVVFLHVTYVPAQEKNFTTAPAICHDGKAHFPREGVFVSNGTHWFVTQRNFYEPQIITTDNTFVSGNCDVVIGIVNNTVYDPLQPELDSGGGGSDIIKLLNEQVNKEMQSSNLYMSMSSWCYTHSLDGAGLFLFDHAAEEYEHAKKLIIFLNENNVPVQLTSISAPEHKFEGLTQIFQKAYEHEQHISESINNIVDHAIKSKDHATFNFLQWYVAEQHEEEVLFKDILDKIELIGNENHGLYLADQYVKGIAKSRKS

SEQ ID NO: 9287 - protein, 1315 aa, Artificial Sequence
  SARS-CoV-2/South Korea/SNU01/2020__EPI_ISL_411929 spike protein (1-1147)(I909C_Y1047C) Ferritin construct
MFVFLVLLPLVSSQCVNLTTRTQLPPAYTNSFTRGVYYPDKVFRSSVLHSTQDLFLPFFSNVTWFHAIHVSGTNGTKRFDNPVLPFNDGVYFASTEKSNIIRGWIFGTTLDSKTQSLLIVNNATNVVIKVCEFQFCNDPFLGVYYHKNNKSWMESEFRVYSSANNCTFEYVSQPFLMDLEGKQGNFKNLREFVFKNIDGYFKIYSKHTPINLVRDLPQGFWALEPLVDLPIGINITRFQTLLALHRSYLTPGDSSSGWTAGAAAYYVGYLQPRTFLLKYNENGTITDAVDCALDPLSETKCTLKSFTVEKGIYQTSNFRVQPTESIVRFPNITNLCPFGEVFNATRFASVYAWNRKRISNCVADYSVLYNSASFSTFKCYGVSPTKLNDLCFTNVYADSFVIRGDEVRQIAPGQTGKIADYNYKLPDDFTGCVIAWNSNNLDSKVGGNYNYLYRLFRKSNLKPFERDISTEIYQAGSTPCNGVEGFNCYFPLQSYGFQPTNGVGYQPYRVVVLSFELLHAPATVCGPKKSTNLVKNKCVNFNFNGLTGTGVLTESNKKFLPFQQFGRDIADTTDAVRDPQTLEILDITPCSFGGVSVITPGTNTSNQVAVLYQDVNCTEVPVAIHADQLTPTWRVYSTGSNVFQTRAGCLIGAEHVNNSYECDIPIGAGICASYQTQTNSPRRARSVASQSIIAYTMSLGAENSVAYSNNSIAIPTNFTISVTTEILPVSMTKTSVDCTMYICGDSTECSNLLLQYGSFCTQLNRALTGIAVEQDKNTQEVFAQVKQIYKTPPIKDFGGFNFSQILPDPSKPSKRSFIEDLLFNKVTLADAGFIKQYGDCLGDIAARDLICAQKFNGLTVLPPLLTDEMIAQYTSALLAGTITSGWTFGAGAALQIPFAMQMAYRFNGCGVTQNVLYENQKLIANQFNSAIGKIQDSLSSTASALGKLQDVVNQNAQALNTLVKQLSSNFGAISSVLNDILSRLDKVEAEVQIDRLITGRLQSLQTYVTQQLIRAAEIRASANLAATKMSECVLGQSKRVDFCGKGCHLMSFPQSAPHGVVFLHVTYVPAQEKNFTTAPAICHDGKAHFPREGVFVSNGTHWFVTQRNFYEPQIITTDNTFVSGNCDVVIGIVNNTVYDPLQPELDSGGGGSDIIKLLNEQVNKEMQSSNLYMSMSSWCYTHSLDGAGLFLFDHAAEEYEHAKKLIIFLNENNVPVQLTSISAPEHKFEGLTQIFQKAYEHEQHISESINNIVDHAIKSKDHATFNFLQWYVAEQHEEEVLFKDILDKIELIGNENHGLYLADQYVKGIAKSRKS

SEQ ID NO: 9288 - protein, 1315 aa, Artificial Sequence
  SARS-CoV-2/China/WF0004/2020__EPI_ISL_413694 spike protein (1-1147)(I909C_Y1047C) Ferritin construct
MFVFLVLLPLVSSQCVNLTTRTQLPPAYTNSFTRGVYYPDKVFRSSVLHSTQDLFLPFFSNVTWFHAIHVSGTNGTKRFDNPVLPFNDGVYFASTEKSNIIRGWIFGTTLDSKTQSLLIVNNATNVVIKVCEFQFCNDPFLGVYYHKNNKSWTESEFRVYSSANNCTFEYVSQPFLMDLEGKQGNFKNLREFVFKNIDGYFKIYSKHTPINLVRDLPQGFSALEPLVDLPIGINITRFQTLLALHRSYLTPGDSSSGWTAGAAAYYVGYLQPRTFLLKYNENGTITDAVDCALDPLSETKCTLKSFTVEKGIYQTSNFRVQPTESIVRFPNITNLCPFGEVFNATRFASVYAWNRKRISNCVADYSVLYNSASFSTFKCYGVSPTKLNDLCFTNVYADSFVIRGDEVRQIAPGQTGKIADYNYKLPDDFTGCVIAWNSNNLDSKVGGNYNYLYRLFRKSNLKPFERDISTEIYQAGSTPCNGVEGFNCYFPLQSYGFQPTNGVGYQPYRVVVLSFELLHAPATVCGPKKSTNLVKNKCVNFNFNGLTGTGVLTESNKKFLPFQQFGRDIADTTDAVRDPQTLEILDITPCSFGGVSVITPGTNTSNQVAVLYQDVNCTEVPVAIHADQLTPTWRVYSTGSNVFQTRAGCLIGAEHVNNSYECDIPIGAGICASYQTQTNSPRRARSVASQSIIAYTMSLGAENSVAYSNNSIAIPTNFTISVTTEILPVSMTKTSVDCTMYICGDSTECSNLLLQYGSFCTQLNRALTGIAVEQDKNTQEVFAQVKQIYKTPPIKDFGGFNFSQILPDPSKPSKRSFIEDLLFNKVTLADAGFIKQYGDCLGDIAARDLICAQKFNGLTVLPPLLTDEMIAQYTSALLAGTITSGWTFGAGAALQIPFAMQMAYRFNGCGVTQNVLYENQKLIANQFNSAIGKIQDSLSSTASALGKLQDVVNQNAQALNTLVKQLSSNFGAISSVLNDILSRLDKVEAEVQIDRLITGRLQSLQTYVTQQLIRAAEIRASANLAATKMSECVLGQSKRFDFCGKGCHLMSFPQSAPHGVVFLHVTYVPAQEKNFTTAPAICHDGKAHFPREGVFVSNGTHWFVTQRNFYEPQIITTDNTFVSGNCDVVIGIVNNTVYDPLQPELDSGGGGSDIIKLLNEQVNKEMQSSNLYMSMSSWCYTHSLDGAGLFLFDHAAEEYEHAKKLIIFLNENNVPVQLTSISAPEHKFEGLTQIFQKAYEHEQHISESINNIVDHAIKSKDHATFNFLQWYVAEQHEEEVLFKDILDKIELIGNENHGLYLADQYVKGIAKSRKS

SEQ ID NO: 9289 - protein, 1315 aa, Artificial Sequence
  SARS-CoV-2/China/WF0028/2020__EPI_ISL_413791 spike protein (1-1147)(I909C_Y1047C) Ferritin construct
MFVFLVLLPLVSSQCVNLTTRTQLPPAYTNSFTRGVYYPDKVFRSSVLHSTQDLFLPFFSNVTWFHAIHVSGTNGTKRFDNPVLPFNDGVYFASTEKSNIIRGWIFGTTLDSKTQSLLIVNNATNVVIKVCEFQFCNDPFLGVYYHKNNKSWMESEFRVYSSANNCTFEYVSQPFLMDLEGKQGNFKNLREFVFKNIDGYFKIYSKHTPINLVRDLPQGFSALEPLVDLPIGINITRFQTLLALHRSYLTPGDSSSGWTAGAAAYYVGYLQPRTFLLKYNENGTITDAVDCALDPLSETKCTLKSFTVEKGIYQTSNFRVQPTESIVRFPNITNLCPFGEVFNATRFASVYAWNRKRISNCVADYSVLYNSASFSTFKCYGVSPTKLNDLCFTNVYADSFVIRGDEVRQIAPGQTGKIADYNYKLPDDFTGCVIAWNSNNLDSKVGGNYNYLYRLFRKSNLKPFERDISTEIYQAGSTPCNGVEGFNCYFPLQSYGFQPTNGVGYQPYRVVVLSFELLHAPATVCGPKKSTNLVKNKCVNFNFNGLTGTGVLTESNKKFLPFQQFGRDIADTTDAVRDPQTLEILDITPCSFGGVSVITPGTNTSNQVAVLYQDVNCTEVPVAIHADQLTPTWRVYSTGSNVFQTRAGCLIGAEHVNNSYECDIPIGAGICASYQTQTNSPRRARSVASQSIIAYTMSLGAENSVAYSNNSIAIPTNFTISVTTEILPVSMTKTSVDCTMYICGDSTECSNLLLQYGSFCTQLNRALTGIAVEQDKNTQEVFAQVKQIYKTPPIKDFGGFNFSQILPDPSKPSKRSFIEDLLFNKVTLADAGFIKQYGDCLGDIAARDLICAQKFNGLTVLPPLLTDEMIAQYTSALLAGTITSGWTFGAGAALQIPFAMQMAYRFNGCGVTQNVLYENQKLIANQFNSAIGKIQDSLSSTASALGKLQDVVNQNAQALNTLVKQLSSNFGAISSVLNDILSRLDKVEAEVQIDRLITGRLQSLQTYVTQQLIRAAEIRASANLAATKMSECVLGQSKRVDFCGKGCHLMSFPQSAPHGVVFLHVTYVPAQEKNFTTAPAICHDGKAHFPREGVFVSNGTHWFVTQRNFYEPQIITTDNTFVSGNCDVVIGIVNNTVYDPLQPELESGGGGSDIIKLLNEQVNKEMQSSNLYMSMSSWCYTHSLDGAGLFLFDHAAEEYEHAKKLIIFLNENNVPVQLTSISAPEHKFEGLTQIFQKAYEHEQHISESINNIVDHAIKSKDHATFNFLQWYVAEQHEEEVLFKDILDKIELIGNENHGLYLADQYVKGIAKSRKS

SEQ ID NO: 9290 - protein, 1315 aa, Artificial Sequence
  SARS-CoV-2/2019-nCoV/USA-CruiseA-18/2020__MT159716.1 spike protein (1-1147)(I909C_Y1047C) Ferritin construct
MFVFLVLLPLVSSQCVNLTTRTQLPPAYTNSFTRGVYYPDKVFRSSVLHSTQDLFLPFFSNVTWFHAIHVSGTNGTKRFDNPVLPFNDGVYFASTEKSNIIRGWIFGTTLDSKTQSLLIVNNATNVVIKVCEFQFCNDPFLGVYYHKNNKSWMESELRVYSSANNCTFEYVSQPFLMDLEGKQGNFKNLREFVFKNIDGYFKIYSKHTPINLVRDLPQGFSALEPLVDLPIGINITRFQTLLALHRSYLTPGDSSSGWTAGAAAYYVGYLQPRTFLLKYNENGTITDAVDCALDPLSETKCTLKSFTVEKGIYQTSNFRVQPTESIVRFPNITNLCPFGEVFNATRFASVYAWNRKRISNCVADYSVLYNSASFSTFKCYGVSPTKLNDLCFTNVYADSFVIRGDEVRQIAPGQTGKIADYNYKLPDDFTGCVIAWNSNNLDSKVGGNYNYLYRLFRKSNLKPFERDISTEIYQAGSTPCNGVEGFNCYFPLQSYGFQPTNGVGYQPYRVVVLSFELLHAPATVCGPKKSTNLVKNKCVNFNFNGLTGTGVLTESNKKFLPFQQFGRDIADTTDAVRDPQTLEILDITPCSFGGVSVITPGTNTSNQVAVLYQDVNCTEVPVAIHADQLTPTWRVYSTGSNVFQTRAGCLIGAEHVNNSYECDIPIGAGICASYQTQTNSPRRARSVASQSIIAYTMSLGAENSVAYSNNSIAIPTNFTISVTTEILPVSMTKTSVDCTMYICGDSTECSNLLLQYGSFCTQLNRALTGIAVEQDKNTQEVFAQVKQIYKTPPIKDFGGFNFSQILPDPSKPSKRSFIEDLLFNKVTLADAGFIKQYGDCLGDIAARDLICAQKFNGLTVLPPLLTDEMIAQYTSALLAGTITSGWTFGAGAALQIPFAMQMAYRFNGCGVTQNVLYENQKLIANQFNSAIGKIQDSLSSTASALGKLQDVVNQNAQALNTLVKQLSSNFGAISSVLNDILSRLDKVEAEVQIDRLITGRLQSLQTYVTQQLIRAAEIRASANLAATKMSECVLGQSKRVDFCGKGCHLMSFPQSAPHGVVFLHVTYVPAQEKNFTTAPAICHDGKAHFPREGVFVSNGTHWFVTQRNFYEPQIITTDNTFVSGNCDVVIGIVNNTVYDPLQPELDSGGGGSDIIKLLNEQVNKEMQSSNLYMSMSSWCYTHSLDGAGLFLFDHAAEEYEHAKKLIIFLNENNVPVQLTSISAPEHKFEGLTQIFQKAYEHEQHISESINNIVDHAIKSKDHATFNFLQWYVAEQHEEEVLFKDILDKIELIGNENHGLYLADQYVKGIAKSRKS

SEQ ID NO: 9291 - protein, 1315 aa, Artificial Sequence
  SARS-CoV-2/SARS-CoV-2/Yunnan-01/human/2020/CHN__MT049951.1 spike protein (1-1147)(I909C_Y1047C) Ferritin construct
MFVFLVLLPLVSSQCVNLTTRTQLPPANTNSFTRGVYYPDKVFRSSVLHSTQDLFLPFFSNVTWFHAIHVSGTNGTKRFDNPVLPFNDGVYFASTEKSNIIRGWIFGTTLDSKTQSLLIVNNATNVVIKVCEFQFCNDPFLGVYYHKNNKSWMESEFRVYSSANNCTFEYVSQPFLMDLEGKQGNFKNLREFVFKNIDGYFKIYSKHTPINLVRDLPQGFSALEPLVDLPIGINITRFQTLLALHRSYLTPGDSSSGWTAGAAAYYVGYLQPRTFLLKYNENGTITDAVDCALDPLSETKCTLKSFTVEKGIYQTSNFRVQPTESIVRFPNITNLCPFGEVFNATRFASVYAWNRKRISNCVADYSVLYNSASFSTFKCYGVSPTKLNDLCFTNVYADSFVIRGDEVRQIAPGQTGKIADYNYKLPDDFTGCVIAWNSNNLDSKVGGNYNYLYRLFRKSNLKPFERDISTEIYQAGSTPCNGVEGFNCYFPLQSYGFQPTNGVGYQPYRVVVLSFELLHAPATVCGPKKSTNLVKNKCVNFNFNGLTGTGVLTESNKKFLPFQQFGRDIADTTDAVRDPQTLEILDITPCSFGGVSVITPGTNTSNQVAVLYQDVNCTEVPVAIHADQLTPTWRVYSTGSNVFQTRAGCLIGAEHVNNSYECDIPIGAGICASYQTQTNSPRRARSVASQSIIAYTMSLGAENSVAYSNNSIAIPTNFTISVTTEILPVSMTKTSVDCTMYICGDSTECSNLLLQYGSFCTQLNRALTGIAVEQDKNTQEVFAQVKQIYKTPPIKDFGGFNFSQILPDPSKPSKRSFIEDLLFNKVTLADAGFIKQYGDCLGDIAARDLICAQKFNGLTVLPPLLTDEMIAQYTSALLAGTITSGWTFGAGAALQIPFAMQMAYRFNGCGVTQNVLYENQKLIANQFNSAIGKIQDSLSSTASALGKLQDVVNQNAQALNTLVKQLSSNFGAISSVLNDILSRLDKVEAEVQIDRLITGRLQSLQTYVTQQLIRAAEIRASANLAATKMSECVLGQSKRVDFCGKGCHLMSFPQSAPHGVVFLHVTYVPAQEKNFTTAPAICHDGKAHFPREGVFVSNGTHWFVTQRNFYEPQIITTDNTFVSGNCDVVIGIVNNTVYDPLQPELDSGGGGSDIIKLLNEQVNKEMQSSNLYMSMSSWCYTHSLDGAGLFLFDHAAEEYEHAKKLIIFLNENNVPVQLTSISAPEHKFEGLTQIFQKAYEHEQHISESINNIVDHAIKSKDHATFNFLQWYVAEQHEEEVLFKDILDKIELIGNENHGLYLADQYVKGIAKSRKS

SEQ ID NO: 9292 - protein, 1315 aa, Artificial Sequence
  SARS-CoV-2/USA/WA-UW292/2020__EPI_ISL_418077 spike protein (1-1147)(I909C_Y1047C) Ferritin construct
MFVFLVLLPLVSSQCVNLTTRTQLPPAYTNSFTRGVYYPDKVFRSSVLHSTQDLFLPFFSNVTWFHAIHVSGTNGTKRFDNPVLPFNDGVYFASTEKSNIIRGWIFGTTLDSKTQSLLIVNNATNVVIKVCEFQFCNDPFLGVYYHKNNKSWMESEFRVYSSANNCTFEYVSQPFLMDLEGKQGNFKNLREFVFKNIDGYFKIYSKHTPINLVRDLPQGFSALEPLVDLPIGINITRFQTLLALHRSYLTPGDSSSGWTAGAAAYYVGYLQPRTFLLKYNENGTITDAVDCALDPLSETKCTLKSFTVEKGIYQTSNFRVQPTESIVRFPNITNLCPFGEVFNATRFASVYAWNRKRISNCVADYSVLYNSASFSTFKCYGVSPTKLNDLCFTNVYADSFVIRGDEVRQIAPGQTGKIADYNYKLPDDFTGCVIAWNSNNLDSKVGGNYNYLYRLFRKSNLKPFERDISTEIYQASSTPCNGVEGFNCYFPLQSYGFQPTNGVGYQPYRVVVLSFELLHAPATVCGPKKSTNLVKNKCVNFNFNGLTGTGVLTESNKKFLPFQQFGRDIADTTDAVRDPQTLEILDITPCSFGGVSVITPGTNTSNQVAVLYQDVNCTEVPVAIHADQLTPTWRVYSTGSNVFQTRAGCLIGAEHVNNSYECDIPIGAGICASYQTQTNSPRRARSVASQSIIAYTMSLGAENSVAYSNNSIAIPTNFTISVTTEILPVSMTKTSVDCTMYICGDSTECSNLLLQYGSFCTQLNRALTGIAVEQDKNTQEVFAQVKQIYKTPPIKDFGGFNFSQILPDPSKPSKRSFIEDLLFNKVTLADAGFIKQYGDCLGDIAARDLICAQKFNGLTVLPPLLTDEMIAQYTSALLAGTITSGWTFGAGAALQIPFAMQMAYRFNGCGVTQNVLYENQKLIANQFNSAIGKIQDSLSSTASALGKLQDVVNQNAQALNTLVKQLSSNFGAISSVLNDILSRLDKVEAEVQIDRLITGRLQSLQTYVTQQLIRAAEIRASANLAATKMSECVLGQSKRVDFCGKGCHLMSFPQSAPHGVVFLHVTYVPAQEKNFTTAPAICHDGKAHFPREGVFVSNGTHWFVTQRNFYEPQIITTDNTFVSGNCDVVIGIVNNTVYDPLQPELDSGGGGSDIIKLLNEQVNKEMQSSNLYMSMSSWCYTHSLDGAGLFLFDHAAEEYEHAKKLIIFLNENNVPVQLTSISAPEHKFEGLTQIFQKAYEHEQHISESINNIVDHAIKSKDHATFNFLQWYVAEQHEEEVLFKDILDKIELIGNENHGLYLADQYVKGIAKSRKS

SEQ ID NO: 9293 - protein, 1315 aa, Artificial Sequence
  SARS-CoV-2/Iceland/192/2020__EPI_ISL_417819 spike protein (1-1147)(I909C_Y1047C) Ferritin construct
MFVFFVLLPLVSSQCVNLTTRTQLPPAYTNSFTRGVYYPDKVFRSSVLHSTQDLFLPFFSNVTWFHAIHVSGTNGTKRFDNPVLPFNDGVYFASTEKSNIIRGWIFGTTLDSKTQSLLIVNNATNVVIKVCEFQFCNDPFLGVYYHKNNKSWMESEFRVYSSANNCTFEYVSQPFLMDLEGKQGNFKNLREFVFKNIDGYFKIYSKHTPINLVRDLPQGFSALEPLVDLPIGINITRFQTLLALHRSYLTPGDSSSGWTAGAAAYYVGYLQPRTFLLKYNENGTITDAVDCALDPLSETKCTLKSFTVEKGIYQTSNFRVQPTESIVRFPNITNLCPFGEVFNATRFASVYAWNRKRISNCVADYSVLYNSASFSTFKCYGVSPTKLNDLCFTNVYADSFVIRGDEVRQIAPGQTGKIADYNYKLPDDFTGCVIAWNSNNLDSKVGGNYNYLYRLFRKSNLKPFERDISTEIYQAGSTPCNGVEGFNCYFPLQSYGFQPTNGVGYQPYRVVVLSFELLHAPATVCGPKKSTNLVKNKCVNFNFNGLTGTGVLTESNKKFLPFQQFGRDIADTTDAVRDPQTLEILDITPCSFGGVSVITPGTNTSNQVAVLYQGVNCTEVPVAIHADQLTPTWRVYSTGSNVFQTRAGCLIGAEHVNNSYECDIPIGAGICASYQTQTNSPRRARSVASQSIIAYTMSLGAENSVAYSNNSIAIPTNFTISVTTEILPVSMTKTSVDCTMYICGDSTECSNLLLQYGSFCTQLNRALTGIAVEQDKNTQEVFAQVKQIYKTPPIKDFGGFNFSQILPDPSKPSKRSFIEDLLFNKVTLADAGFIKQYGDCLGDIAARDLICAQKFNGLTVLPPLLTDEMIAQYTSALLAGTITSGWTFGAGAALQIPFAMQMAYRFNGCGVTQNVLYENQKLIANQFNSAIGKIQDSLSSTASALGKLQDVVNQNAQALNTLVKQLSSNFGAISSVLNDILSRLDKVEAEVQIDRLITGRLQSLQTYVTQQLIRAAEIRASANLAATKMSECVLGQSKRVDFCGKGCHLMSFPQSAPHGVVFLHVTYVPAQEKNFTTAPAICHDGKAHFPREGVFVSNGTHWFVTQRNFYEPQIITTDNTFVSGNCDVVIGIVNNTVYDPLQPELDSGGGGSDIIKLLNEQVNKEMQSSNLYMSMSSWCYTHSLDGAGLFLFDHAAEEYEHAKKLIIFLNENNVPVQLTSISAPEHKFEGLTQIFQKAYEHEQHISESINNIVDHAIKSKDHATFNFLQWYVAEQHEEEVLFKDILDKIELIGNENHGLYLADQYVKGIAKSRKS

SEQ ID NO: 9294 - protein, 1315 aa, Artificial Sequence
  SARS-CoV-2/Belgium/ULG-6939/2020__EPI_ISL_417020 spike protein (1-1147)(I909C_Y1047C) Ferritin construct
MFVFLVLLPLVSSQCVNLTTRTQLPPAYTNSFTRGVYYPDKVFRSSVLHSTQDLFLPFFSNVTWFHAIHVSGTNGTKRFDNPVLPFNDGVYFASTEKSNIIRGWIFGTTLDSKTQSLLIVNNATNVVIKVCEFQFCNDPFLGVYYHKNNKSWMESEFRVYSSANNCTFEYVSQPFLMDLEGKQGNFKNLREFVFKNIDGYFKIYSKHTPINLVRDLPQGFSALEPLVDLPIGINITRFQTLLALHRSYLTPGDSSSGWTAGAAAYYVGYLQPRTFLLKYNENGTITDAVDCALDPLSETKCTLKSFTVEKGIYQTSNFRVQPTESIVRFPNITNLCPFGEVFNATRFASVYAWNRKRISNCVADYSVLYNSASFSTFKCYGVSPTKLNDLCFTNVYADSFVIRGDEVRQIAPGQTGKIADYNYKLPDDFTGCVIAWNSNNLDSKVGGNYNYLYRLFRKSNLKPFERDISTEIYQAGSTPCNGVEGFNCYFPLQSYGFQPTNGVGYQPYRVVVLSFELLHAPATVCGPKKSTNLVKNKCVNFNFNGLTGTGVLTESNKKFLPFQQFGRDIADTTDAVRDPQTLEILDITPCSFGGVSVITPGTNTSNQVAVLYQGVNCTEVPVAIHADQLTPTWRVYSTGSNVFQTRAGCLIGAEHVNNSYECDIPIGAGICASYQTQTNSPRRARSVASQSIIAYTMSLGAENSVVYSNNSIAIPTNFTISVTTEILPVSMTKTSVDCTMYICGDSTECSNLLLQYGSFCTQLNRALTGIAVEQDKNTQEVFAQVKQIYKTPPIKDFGGFNFSQILPDPSKPSKRSFIEDLLFNKVTLADAGFIKQYGDCLGDIAARDLICAQKFNGLTVLPPLLTDEMIAQYTSALLAGTITSGWTFGAGAALQIPFAMQMAYRFNGCGVTQNVLYENQKLIANQFNSAIGKIQDSLSSTASALGKLQDVVNQNAQALNTLVKQLSSNFGAISSVLNDILSRLDKVEAEVQIDRLITGRLQSLQTYVTQQLIRAAEIRASANLAATKMSECVLGQSKRVDFCGKGCHLMSFPQSAPHGVVFLHVTYVPAQEKNFTTAPAICHDGKAHFPREGVFVSNGTHWFVTQRNFYEPQIITTDNTFVSGNCDVVIGIVNNTVYDPLQPELDSGGGGSDIIKLLNEQVNKEMQSSNLYMSMSSWCYTHSLDGAGLFLFDHAAEEYEHAKKLIIFLNENNVPVQLTSISAPEHKFEGLTQIFQKAYEHEQHISESINNIVDHAIKSKDHATFNFLQWYVAEQHEEEVLFKDILDKIELIGNENHGLYLADQYVKGIAKSRKS

SEQ ID NO: 9295 - protein, 1315 aa, Artificial Sequence
  SARS-CoV-2/France/HF2496/2020__EPI_ISL_418231 spike protein (1-1147)(I909C_Y1047C) Ferritin construct
MFVFLVLLPLVSSQCVNLTTRTQLPPAYTNSFTRGVYYPDKVFRSSVLHSTQDLFLPFFSNVTWFHAIHVSGTNGTKRFDNPVLPFNDGVYFASTEKSNIIRGWIFGTTLDSKTQSLLIVNNATNVVIKVCEFQFCNDPFLGVYYHKNNKSWMESEFRVYSSANNCTFEYVSQPFLMDLEGKQGNFKNLREFVFKNIDGYFKIYSKHTPINLVRDLPQGFSALEPLVDLPIGINITRFQTLLALHRSYLTPGDSSSGWTAGAAAYYVGYLQPRTFLLKYNENGTITDAVDCALDPLSETKCTLKSFTVEKGIYQTSNFRVQPTESIVRFPNITNLCPFGEVFNATRFASVYAWNRKRISNCVADYSVLYNSASFSTFKCYGVSPTKLNDLCFTNVYADSFVIRGDEVRQIAPGQTGKIADYNYKLPDDFTGCVIAWNSNNLDSKVGGNYNYLYRLFRKSNLKPFERDISTEIYQAGSTPCNGVEGFNCYFPLQSYGFQPTNGVGYQPYRVVVLSFELLHAPATVCGPKKSTNLVKNKCVNFNFNGLTGTGVLTESNKKFLPFQQFGRDIADTTDAVRDPQTLEILDITPCSFGGVSVITPGTNTSNQVAVLYQGVNCTEVPVAIHADQLTPTWRVYSTGSNVFQTRAGCLIGAEHVNNSYECDIPIGAGICASYQTQTNSPRRARSVASQSIIAYTMSLGAENSVAYSNNSIAIPTNFTISVTTEILPVSMTKTSVDCTMYICGDSTECSNLLLQYGSFCTQLNRALTGIAVEQDKNTQEVFAQVKQIYKTPPIKDFGGFNFSQILPDPSKPSKRSFIEDLLFNKVTLADAGFIKQYGDCLGDIVARDLICAQKFNGLTVLPPLLTDEMIAQYTSALLAGTITSGWTFGAGAALQIPFAMQMAYRFNGCGVTQNVLYENQKLIANQFNSAIGKIQDSLSSTASALGKLQDVVNQNAQALNTLVKQLSSNFGAISSVLNDILSRLDKVEAEVQIDRLITGRLQSLQTYVTQQLIRAAEIRASANLAATKMSECVLGQSKRVDFCGKGCHLMSFPQSAPHGVVFLHVTYVPAQEKNFTTAPAICHDGKAHFPREGVFVSNGTHWFVTQRNFYEPQIITTDNTFVSGNCDVVIGIVNNTVYDPLQPELDSGGGGSDIIKLLNEQVNKEMQSSNLYMSMSSWCYTHSLDGAGLFLFDHAAEEYEHAKKLIIFLNENNVPVQLTSISAPEHKFEGLTQIFQKAYEHEQHISESINNIVDHAIKSKDHATFNFLQWYVAEQHEEEVLFKDILDKIELIGNENHGLYLADQYVKGIAKSRKS

SEQ ID NO: 9296 - protein, 1315 aa, Artificial Sequence
  SARS-CoV-2/USA/WA-UW291/2020__EPI_ISL_418076 spike protein (1-1147)(I909C_Y1047C) Ferritin construct
MFVFLVLLPLVSSQCVNLTTRTQLPPAYTNSFTRGVYYPDKVFRSSVLHSTQDLFLPFFSNVTWFHAIHVSGTNGTKRFDNPVLPFNDGVYFASTEKSNIIRGWIFGTTLDSKTQSLLIVNNATNVVIKVCEFQFCNDPFLGVYYHKNNKSWMESEFRVYSSANNCTFEYVSQPFLMDLEGKQGNFKNLREFVFKNIDGYFKIYSKHTPINLVRDLPQGFSALEPLVDLPIGINITRFQTLLALHRSYLTPGDSSSGWTAGAAAYYVGYLQPRTFLLKYNENGTITDAVDCALDPLSETKCTLKSFTVEKGIYQTSNFRVQPTESIVRFPNITNLCPFGEVFNATRFASVYAWNRKRISNCVADYSVLYNSASFSTFKCYGVSPTKLNDLCFTNVYADSFVIRGDEVRQIAPGQTGKIADYNYKLPDDFTGCVIAWNSNNLDSKVGGNYNYLYRLFRKSNLKPFERDISTEIYQAGSTPCNGVEGFNCYFPLQSYGFQPTNGVGYQPYRVVVLSFELLHAPATVCGPKKSTNLVKNKCVNFNFNGLTGTGVLTESNKKFLPFQQFGRDIADTTDAVRDPQTLEILDITPCSFGGVSVITPGTNTSNQVAVLYQGVNCTEVPVAIHADQLTPTWRVYSTGSNVFQTRAGCLIGAEHVNNSYECDIPIGAGICASYQTQTNSPRRARSVASQSIIAYTMSLGAENSVAYSNNSIAIPTNFTISVTTEILPVSMTKTSVDCTMYICGDSTECSNLLLQYGSFCTQLNRALTGIAVEQDKNTQEVFAQVKQIYKTPPIKDFGGFNFSQILPDPSKPSKRSFIEDLLFNKVTLADAGFIKQYGDCLGDIAARDLICAQKFNGLTVLPPLLTDEMIAQYTSALLAGTITSGWTFGAGAALQIPFAMQMAYRFNGCGVTQNVLYENQKLIANQFNSAIGKIQYSLSSTASALGKLQDVVNQNAQALNTLVKQLSSNFGAISSVLNDILSRLDKVEAEVQIDRLITGRLQSLQTYVTQQLIRAAEIRASANLAATKMSECVLGQSKRVDFCGKGCHLMSFPQSAPHGVVFLHVTYVPAQEKNFTTAPAICHDGKAHFPREGVFVSNGTHWFVTQRNFYEPQIITTDNTFVSGNCDVVIGIVNNTVYDPLQPELDSGGGGSDIIKLLNEQVNKEMQSSNLYMSMSSWCYTHSLDGAGLFLFDHAAEEYEHAKKLIIFLNENNVPVQLTSISAPEHKFEGLTQIFQKAYEHEQHISESINNIVDHAIKSKDHATFNFLQWYVAEQHEEEVLFKDILDKIELIGNENHGLYLADQYVKGIAKSRKS

SEQ ID NO: 9297 - protein, 1315 aa, Artificial Sequence; identical to SEQ ID NO: 9260
  SARS-CoV-2/Portugal/PT0034/2020__EPI_ISL_418019 spike protein (1-1147)(I909C_Y1047C) Ferritin construct

SEQ ID NO: 9298 - protein, 1315 aa, Artificial Sequence; identical to SEQ ID NO: 9252
  SARS-CoV-2/Iceland/202/2020__EPI_ISL_417750 spike protein (1-1147)(I909C_Y1047C) Ferritin construct

SEQ ID NO: 9299 - protein, 1315 aa, Artificial Sequence
  SARS-CoV-2/USA/WA-UW261/2020__EPI_ISL_418046 spike protein (1-1147)(I909C_Y1047C) Ferritin construct
MFVFLVLLPLVSSQCVNLTTRTQLPPAYTNSFTRGVYYPDKVFRSSVLHSTQDLFLPFFSNVTWFHAIHVSGTNGTKRFDNPVLPFNDGVYFASTEKSNIIRGWIFGTTLDSKTQSLLIVNNATNVVIKVCEFQFCNDPFLGVYYHKNNKSWMESEFRVYSSANNCTFEYVSQPFLMDLEGKQGNFKNLREFVFKNIDGYFKIYSKHTPINLVRDLPQGFSALEPLVDLPIGINITRFQTLLALHRSYLTPGDSSSGWTAGAAAYYVGYLQPRTFLLKYNENGTITDAVDCALDPLSETKCTLKSFTVEKGIYQTSNFRVQPTESIVRFPNITNLCPFGEVFNATRFTSVYAWNRKRISNCVADYSVLYNSASFSTFKCYGVSPTKLNDLCFTNVYADSFVIRGDEVRQIAPGQTGKIADYNYKLPDDFTGCVIAWNSNNLDSKVGGNYNYLYRLFRKSNLKPFERDISTEIYQAGSTPCNGVEGFNCYFPLQSYGFQPTNGVGYQPYRVVVLSFELLHAPATVCGPKKSTNLVKNKCVNFNFNGLTGTGVLTESNKKFLPFQQFGRDIADTTDAVRDPQTLEILDITPCSFGGVSVITPGTNTSNQVAVLYQDVNCTEVPVAIHADQLTPTWRVYSTGSNVFQTRAGCLIGAEHVNNSYECDIPIGAGICASYQTQTNSPRRARSVASQSIIAYTMSLGAENSVAYSNNSIAIPTNFTISVTTEILPVSMTKTSVDCTMYICGDSTECSNLLLQYGSFCTQLNRALTGIAVEQDKNTQEVFAQVKQIYKTPPIKDFGGFNFSQILPDPSKPSKRSFIEDLLFNKVTLADAGFIKQYGDCLGDIAARDLICAQKFNGLTVLPPLLTDEMIAQYTSALLAGTITSGWTFGAGAALQIPFAMQMAYRFNGCGVTQNVLYENQKLIANQFNSAIGKIQDSLSSTASALGKLQDVVNQNAQALNTLVKQLSSNFGAISSVLNDILSRLDKVEAEVQIDRLITGRLQSLQTYVTQQLIRAAEIRASANLAATKMSECVLGQSKRVDFCGKGCHLMSFPQSAPHGVVFLHVTYVPAQEKNFTTAPAICHDGKAHFPREGVFVSNGTHWFVTQRNFYEPQIITTDNTFVSGNCDVVIGIVNNTVYDPLQPELDSGGGGSDIIKLLNEQVNKEMQSSNLYMSMSSWCYTHSLDGAGLFLFDHAAEEYEHAKKLIIFLNENNVPVQLTSISAPEHKFEGLTQIFQKAYEHEQHISESINNIVDHAIKSKDHATFNFLQWYVAEQHEEEVLFKDILDKIELIGNENHGLYLADQYVKGIAKSRKS

SEQ ID NO: 9300 - protein, 1315 aa, Artificial Sequence
  SARS-CoV-2/Portugal/PT0035/2020__EPI_ISL_418020 spike protein (1-1147)(I909C_Y1047C) Ferritin construct
MFVFLVLLPLVSSQCVNLTTRTQLPPAYTNSFTRGVYYPDKVFRSSVLHSTQDLFLPFFSNVTWFHAIHVSGTNGTKRFDNPVLPFNDGVYFASTEKSNIIRGWIFGTTLDSKTQSLLIVNNATNVVIKVCEFQFCNDPFLGVYYHKNNKSWMESEFRVYSSANNCTFEYVSQPFLMDLEGKQGNFKNLREFVFKNIDGYFKIYSKHTPINLVRDLPQGFSALEPLVDLPIGINITRFQTLLALHRSYLTPGDSSSGWTAGAAAYYVGYLQPRTFLLKYNENGTITDAVDCALDPLSETKCTLKSFTVEKGIYQTSNFRVQPTESIVRFPNITNLCPFGEVFNATRFASVYAWNRKRISNCVADYSVLYNSASFSTFKCYGVSPTKLNDLCFTNVYADSFVIRGDEVRQIAPGQTGKIADYNYKLPDDFTGCVIAWNSNNLDSKVGGNYNYLYRLFRKSNLKPFERDISTEIYQAGSTPCNGVEGFNCYFPLQSYGFQPTNGVGYQPYRVVVLSFELLHAPATVCGPKKSTNLVKNKCVNFNFNGLTGTGVLTESNKKFLPFQQFGRDIADTTDAVRDPQTLEILDITPCSFGGVSVITPGTNTSNQVAVLYQDVNCTEVPVAIHADQLTPTWRVYSTGSNVFQTRAGCLIGAEHVNNSYECDIPIGAGICASYQTQTNSPRRARSVASQSIIAYTMSLGAENSVAYSNNSIAIPTNFTISVTTEILPVSMTKTSVDCTMYICGDSTECSNLLLQYGSFCTQLNRALTGIAVEQDKNTQEVFAQVKQIYKTPPIKDFGGFNFSQILPDPSKPSKRSFIEDLLFNKVTLADAGFIKQYGDCLGDISARDLICAQKFNGLTVLPPLLTDEMIAQYTSALLAGTITSGWTFGAGAALQIPFAMQMAYRFNGCGVTQNVLYENQKLIANQFNSAIGKIQDSLSSTASALGKLQDVVNQNAQALNTLVKQLSSNFGAISSVLNDILSRLDKVEAEVQIDRLITGRLQSLQTYVTQQLIRAAEIRASANLAATKMSECVLGQSKRVDFCGKGCHLMSFPQSAPHGVVFLHVTYVPAQEKNFTTAPAICHDGKAHFPREGVFVSNGTHWFVTQRNFYEPQIITTDNTFVSGNCDVVIGIVNNTVYDPLQPELDSGGGGSDIIKLLNEQVNKEMQSSNLYMSMSSWCYTHSLDGAGLFLFDHAAEEYEHAKKLIIFLNENNVPVQLTSISAPEHKFEGLTQIFQKAYEHEQHISESINNIVDHAIKSKDHATFNFLQWYVAEQHEEEVLFKDILDKIELIGNENHGLYLADQYVKGIAKSRKS

SEQ ID NO: 9301 - protein, 1315 aa, Artificial Sequence
  SARS-CoV-2/USA/NY-NYUMC7/2020__EPI_ISL_418192 spike protein (1-1147)(I909C_Y1047C) Ferritin construct
MFVFLVLLPLVSSQCVNLTTRTQLPPAYTNSFTRGVYYPDKVFRSSVLHSTQDLFLPFFSNVTWFHAIHVSGTNGTKRFDNPVLPFNDGVYFASTEKSNIIRGWIFGTTLDSKTQSLLIVNNATNVVIKVCEFQFCNDPFLGVYHHKNNKSWMESEFRVYSSANNCTFEYVSQPFLMDLEGKQGNFKNLREFVFKNIDGYFKIYSKHTPINLVRDLPQGFSALEPLVDLPIGINITRFQTLLALHRSYLTPGDSSSGWTAGAAAYYVGYLQPRTFLLKYNENGTITDAVDCALDPLSETKCTLKSFTVEKGIYQTSNFRVQPTESIVRFPNITNLCPFGEVFNATRFASVYAWNRKRISNCVADYSVLYNSASFSTFKCYGVSPTKLNDLCFTNVYADSFVIRGDEVRQIAPGQTGKIADYNYKLPDDFTGCVIAWNSNNLDSKVGGNYNYLYRLFRKSNLKPFERDISTEIYQAGSTPCNGVEGFNCYFPLQSYGFQPTNGVGYQPYRVVVLSFELLHAPATVCGPKKSTNLVKNKCVNFNFNGLTGTGVLTESNKKFLPFQQFGRDIADTTDAVRDPQTLEILDITPCSFGGVSVITPGTNTSNQVAVLYQGVNCTEVPVAIHADQLTPTWRVYSTGSNVFQTRAGCLIGAEHVNNSYECDIPIGAGICASYQTQTNSPRRARSVASQSIIAYTMSLGAENSVAYSNNSIAIPTNFTISVTTEILPVSMTKTSVDCTMYICGDSTECSNLLLQYGSFCTQLNRALTGIAVEQDKNTQEVFAQVKQIYKTPPIKDFGGFNFSQILPDPSKPSKRSFIEDLLFNKVTLADAGFIKQYGDCLGDIAARDLICAQKFNGLTVLPPLLTDEMIAQYTSALLAGTITSGWTFGAGAALQIPFAMQMAYRFNGCGVTQNVLYENQKLIANQFNSAIGKIQDSLSSTASALGKLQDVVNQNAQALNTLVKQLSSNFGAISSVLNDILSRLDKVEAEVQIDRLITGRLQSLQTYVTQQLIRAAEIRASANLAATKMSECVLGQSKRVDFCGKGCHLMSFPQSAPHGVVFLHVTYVPAQEKNFTTAPAICHDGKAHFPREGVFVSNGTHWFVTQRNFYEPQIITTDNTFVSGNCDVVIGIVNNTVYDPLQPELDSGGGGSDIIKLLNEQVNKEMQSSNLYMSMSSWCYTHSLDGAGLFLFDHAAEEYEHAKKLIIFLNENNVPVQLTSISAPEHKFEGLTQIFQKAYEHEQHISESINNIVDHAIKSKDHATFNFLQWYVAEQHEEEVLFKDILDKIELIGNENHGLYLADQYVKGIAKSRKS

SEQ ID NO: 9302 - protein, 1315 aa, Artificial Sequence
  SARS-CoV-2/Iceland/189/2020__EPI_ISL_417709 spike protein (1-1147)(I909C_Y1047C) Ferritin construct
MFVFLVLLPLVSSQCVNLTTRTQLPPAYTNSFTRGVYYPDKVFRSSVLHSTQDLFLPFFSNVTWFHAIHVSGTNGTKRFDNPVLPFNDGVYFASTEKSNIIRGWIFGTTLDSKTQSLLIVNNATNVVIKVCEFQFCNDPFLGVYYHKNNKSWMESEFRVYSSANNCTFEYVSQPFLMDLEGKQGNFKNLREFVFKNIDGYFKIYSKHTPINLVRDLPQGFSALEPLVDLPIGINITRFQTLLALHRSYLTPGDSSSGWTAGAAAYYVGYLQPRTFLLKYNENGTITDAVDCALDPLSETKCTLKSFTVEKGIYQTSNFRVQPTESIVRFPNITNLCPFGEVFNATRFASVYAWNRKRISNCVADYSVLYNSASFSTFKCYGVSPTKLNDLCFTNVYADSFVIRGDEVRQIAPGQTGKIADYNYKLPDDFTGCVIAWNSNNLDSKVGGNYNYLYRLFRKSNLKPFERDISTEIYQAGSTPCNGVEGFNCYFPLQSYGFQPTNGVGYQPYRVVVLSFELLHAPATVCGPKKSTNLVKNKCVNFNFNGLTGTGVLTESNKKFLPFQQFGRDIADTTDAVRDPQTLEILDITPCSFGGVSVITPGTNTSNQVAVLYQGVNCTEVPVAIHADQLTPTWRVYSTGSNVFQTRAGCLIGAEHVNNSYECDIPIGAGICASYQTQTNSPRRARSVASQSIIAYTMSLGAENSVAYSNNSIAIPTNFTISVTTEILPVSMTKTSVDCTMYICGDSTECSNLLLQYGSFCTQLNRALTGIAVEQDKNTQEVFAQVKQIYKTPPIKDFGGFNFSQILPDPSKPSKRSFIEDLLFNKVTLADAGFTKQYGDCLGDIAARDLICAQKFNGLTVLPPLLTDEMIAQYTSALLAGTITSGWTFGAGAALQIPFAMQMAYRFNGCGVTQNVLYENQKLIANQFNSAIGKIQDSLSSTASALGKLQDVVNQNAQALNTLVKQLSSNFGAISSVLNDILSRLDKVEAEVQIDRLITGRLQSLQTYVTQQLIRAAEIRASANLAATKMSECVLGQSKRVDFCGKGCHLMSFPQSAPHGVVFLHVTYVPAQEKNFTTAPAICHDGKAHFPREGVFVSNGTHWFVTQRNFYEPQIITTDNTFVSGNCDVVIGIVNNTVYDPLQPELDSGGGGSDIIKLLNEQVNKEMQSSNLYMSMSSWCYTHSLDGAGLFLFDHAAEEYEHAKKLIIFLNENNVPVQLTSISAPEHKFEGLTQIFQKAYEHEQHISESINNIVDHAIKSKDHATFNFLQWYVAEQHEEEVLFKDILDKIELIGNENHGLYLADQYVKGIAKSRKS

SEQ ID NO: 9303 - protein, 1315 aa, Artificial Sequence
  SARS-CoV-2/Australia/NSW56/2020__EPI_ISL_417408 spike protein (1-1147)(I909C_Y1047C) Ferritin construct
MFVFLVLLPLVSSQCVNLTTRTQLPPAYTNSFTRGVYYPDKVFRSSVLHSTQDLFLPFFSNVTWFHAIHVSGTNGTKRFDNPVLPFNDGVYFASTEKSNIIRGWIFGTTLDSKTQSLLIVNNATNVVIKVCEFQFCNDPFLGVYYHKNNKSWMESEFRVYSSANNCTFEYVSQPFLMDLEGKQGNFKNLREFVFKNIDGYFKIYSKHTPINLVRDLPQGFSALEPLVDLPIGINITRFQTLLALHRSYLTPGDSSSGWTAGAAAYYVGYLQPRTFLLKYNENGTITDAVDCALDPLSETKCTLKSFTVEKGIYQTSNFRVQPTESIVRFPNITNLCPFGEVFNATRFASVYAWNRKRISNCVADYSVLYNSASFSTFKCYGVSPTKLNDLCFTNVYADSFVIRGDEVRQIAPGQTGKIADYNYKLPDDFTGCVIAWNSNNLDSKVGGNYNYLYRLFRKSNLKPFERDISTEIYQAGSTPCNGVEGFNCYFPLQSYGFQPTNGVGYQPYRVVVLSFELLHAPATVCGPKKSTNLVKNKCVNFNFNGLTGTGVLTESNKKFLPFQQFGRDIADTTDAVRDPQTLEILDITPCSFGGVSVITPGTNTSNQVAVLYQDVNCTEVPVAIHADQLTPTWRVYSTGSNVFQTRAGCLIGAEHVNNSYECDIPIGAGICASYQTQTNSPRRARSVASQSIIAYTMSLGAENSVAYSNNSIAIPTNFTISVTTEILPVSMTKTSVDCTMYICGDSTECSNLLLQYGSFCTQLNRALTGIAVEQDKNTQEVFAQVKQIYKTPPIKDFGGFNFSQILPDSSKPSKRSFIEDLLFNKVTLADAGFIKQYGDCLGDIAARDLICAQKFNGLTVLPPLLTDEMIAQYTSALLAGTITSGWTFGAGAALQIPFAMQMAYRFNGCGVTQNVLYENQKLIANQFNSAIGKIQDSLSSTASALGKLQDVVNQNAQALNTLVKQLSSNFGAISSVLNDILSRLDKVEAEVQIDRLITGRLQSLQTYVTQQLIRAAEIRASANLAATKMSECVLGQSKRVDFCGKGCHLMSFPQSAPHGVVFLHVTYVPAQEKNFTTAPAICHDGKAHFPREGVFVSNGTHWFVTQRNFYEPQIITTDNTFVSGNCDVVIGIVNNTVYDPLQPELDSGGGGSDIIKLLNEQVNKEMQSSNLYMSMSSWCYTHSLDGAGLFLFDHAAEEYEHAKKLIIFLNENNVPVQLTSISAPEHKFEGLTQIFQKAYEHEQHISESINNIVDHAIKSKDHATFNFLQWYVAEQHEEEVLFKDILDKIELIGNENHGLYLADQYVKGIAKSRKS

SEQ ID NO: 9304 - protein, 1315 aa, Artificial Sequence
  SARS-CoV-2/Iceland/280/2020__EPI_ISL_417608 spike protein (1-1147)(I909C_Y1047C) Ferritin construct
MFVFLVLLPLVSSQCVNLTTRTQLPPAYTNSFTRGVYYPDKVFRSSVLHSTQDLFLPFFSNVTWFHAIHVSGTNGTKRFDNPVLPFNDGVYFASTEKSNIIRGWIFGTTLDSKTQSLLIVNNATNVVIKVCEFQFCNDPFLGVYYHKNNKSWMESEFRVYSSANNCTFEYVSQPFLMDLEGKQGNFKNLREFVFKNIDGYFKIYSKHTPINLVRDLPQGFSALEPLVDLPIGINITRFQTLLALHRSYLTPGDSSSGWTAGAAAYYVGYLQPRTFLLKYNENGTITDAVDCALDPLSETKCTLKSFTVEKGIYQTSNFRVQPTESIVRFPNITNLCPFGEVFNATRFASVYAWNRKRISNCVADYSVLYNSASFSTFKCYGVSPTKLNDLCFTNVYADSFVIRGDEVRQIAPGQTGKIADYNYKLPDDFTGCVIAWNSNNLDSKVGGNYNYLYRLFRKSNLKPFERDISTEIYQAGSTPCNGVEGFNCYFPLQSYGFQPTNGVGYQPYRVVVLSFELLHAPATVCGPKKSTNLVKNKCVNFNFNGLTGTGVLTESNKKFLPFQQFGRDIADTTDAVRDPQTLEILDITPCSFGGVSVITPGTNTSNQVAVLYQGVNCTEVPVAIHADQLTPTWRVYSTGSNVFQTRAGCLIGAEHVNNSYECDIPIGAGICASYHTQTNSPRRARSVASQSIIAYTMSLGAENSVAYSNNSIAIPTNFTISVTTEILPVSMTKTSVDCTMYICGDSTECSNLLLQYGSFCTQLNRALTGIAVEQDKNTQEVFAQVKQIYKTPPIKDFGGFNFSQILPDPSKPSKRSFIEDLLFNKVTLADAGFIKQYGDCLGDIAARDLICAQKFNGLTVLPPLLTDEMIAQYTSALLAGTITSGWTFGAGAALQIPFAMQMAYRFNGCGVTQNVLYENQKLIANQFNSAIGKIQDSLSSTASALGKLQDVVNQNAQALNTLVKQLSSNFGAISSVLNDILSRLDKVEAEVQIDRLITGRLQSLQTYVTQQLIRAAEIRASANLAATKMSECVLGQSKRVDFCGKGCHLMSFPQSAPHGVVFLHVTYVPAQEKNFTTAPAICHDGKAHFPREGVFVSNGTHWFVTQRNFYEPQIITTDNTFVSGNCDVVIGIVNNTVYDPLQPELDSGGGGSDIIKLLNEQVNKEMQSSNLYMSMSSWCYTHSLDGAGLFLFDHAAEEYEHAKKLIIFLNENNVPVQLTSISAPEHKFEGLTQIFQKAYEHEQHISESINNIVDHAIKSKDHATFNFLQWYVAEQHEEEVLFKDILDKIELIGNENHGLYLADQYVKGIAKSRKS

SEQ ID NO: 9305 - protein, 1315 aa, Artificial Sequence; identical to SEQ ID NO: 9260
  SARS-CoV-2/Iceland/247/2020__EPI_ISL_417575 spike protein (1-1147)(I909C_Y1047C) Ferritin construct

SEQ ID NO: 9306 - protein, 1315 aa, Artificial Sequence
  SARS-CoV-2/Iceland/238/2020__EPI_ISL_417566 spike protein (1-1147)(I909C_Y1047C) Ferritin construct
MFVFLVLLPLVSSQCVNLTTRTQLPPAYTNSFTRGVYYPDKVFRSSVLHSTQDLFLPFFSNVTWFHAIHVSGTNGTKRFDNPVLPFNDGVYFASTEKSNIIRGWIFGTTLDSKTQSLLIVNNATNVVIKVCEFQFCNDPFLGVYYHKNNKSWMESEFRVYSSANNCTFEYVSQPFLMDLEGKQGNFKNLREFVFKNIDGYFKIYSKHTPINLVRDLPQGFSALEPLVDLPIGINITRFQTLLALHRSYLTPGDSSSGWTAGAAAYYVGYLQPRTFLLKYNENGTITDAVDCALDPLSETKCTLKSFTVEKGIYQTSNFRVQPTESIVRFPNITNLCPFGEVFNATRFASVYAWNRKRISNCVADYSVLYNSASFSTFKCYGVSPTKLNDLCFTNVYADSFVIRGDEVRQIAPGQTGKIADYNYKLPDDFTGCVIAWNSNNLDSKVGGNYNYLYRLFRKSNLKPFERDISTEIYQAGSTPCNGVEGFNCYFPLQSYGFQPTNGVGYQPYRVVVLSFELLHAPATVCGPKKSTNLVKNKCVNFNFNGLTGTGVLTESNKKFLPFQQFGRDIADTTDAVRDPQTLEILDITPCSFGGVSVITPGTNTSNQVAVLYQGVNCTEVPVAIHADQLTPTWRVYSTGSNVFQTRAGCLIGAEHVNNSYECDIPIGAGICASYQTQTNSPRRARSVASQSIIAYTMSLGAENSVAYSNNSIAIPTNFTISVTTEILPVSMTKTSVDCTMYICGDSTECSNLLLQYGSFCTQLNRALTGIAVEQDKNTQEVFAQVKQIYKTPPIKDFGGFNFSQILPDPSKPSKRSFIEDLLFNKVTLADVGFIKQYGDCLGDIAARDLICAQKFNGLTVLPPLLTDEMIAQYTSALLAGTITSGWTFGAGAALQIPFAMQMAYRFNGCGVTQNVLYENQKLIANQFNSAIGKIQDSLSSTASALGKLQDVVNQNAQALNTLVKQLSSNFGAISSVLNDILSRLDKVEAEVQIDRLITGRLQSLQTYVTQQLIRAAEIRASANLAATKMSECVLGQSKRVDFCGKGCHLMSFPQSAPHGVVFLHVTYVPAQEKNFTTAPAICHDGKAHFPREGVFVSNGTHWFVTQRNFYEPQIITTDNTFVSGNCDVVIGIVNNTVYDPLQPELDSGGGGSDIIKLLNEQVNKEMQSSNLYMSMSSWCYTHSLDGAGLFLFDHAAEEYEHAKKLIIFLNENNVPVQLTSISAPEHKFEGLTQIFQKAYEHEQHISESINNIVDHAIKSKDHATFNFLQWYVAEQHEEEVLFKDILDKIELIGNENHGLYLADQYVKGIAKSRKS

SEQ ID NO: 9307 - protein, 1315 aa, Artificial Sequence
  SARS-CoV-2/Greece/16/2020__EPI_ISL_418265 spike protein (1-1147)(I909C_Y1047C) Ferritin construct
MFVFLVLLPLVSSQCVNLTTRTQLPPAYTNSFTRGVYYPDKVFRSSVLHSTQDLFLPFFSNVTWFHAIHVSGTNGTKRFDNPVLPFNDGVYFASTEKSNIIRGWIFGTTLDSKTQSLLIVNNATNVVIKVCEFQFCNDPFLGVYYHKNNKSWMESEFRVYSSANNCTFEYVSQPFLMDLEGKQGNFKNLREFVFKNVDGYFKIYSKHTPINLVRDLPQGFSALEPLVDLPIGINITRFQTLLALHRSYLTPGDSSSGWTAGAAAYYVGYLQPRTFLLKYNENGTITDAVDCALDPLSETKCTLKSFTVEKGIYQTSNFRVQPTESIVRFPNITNLCPFGEVFNATRFASVYAWNRKRISNCVADYSVLYNSASFSTFKCYGVSPTKLNDLCFTNVYADSFVIRGDEVRQIAPGQTGKIADYNYKLPDDFTGCVIAWNSNNLDSKVGGNYNYLYRLFRKSNLKPFERDISTEIYQAGSTPCNGVEGFNCYFPLQSYGFQPTNGVGYQPYRVVVLSFELLHAPATVCGPKKSTNLVKNKCVNFNFNGLTGTGVLTESNKKFLPFQQFGRDIADTTDAVRDPQTLEILDITPCSFGGVSVITPGTNTSNQVAVLYQDVNCTEVPVAIHADQLTPTWRVYSTGSNVFQTRAGCLIGAEHVNNSYECDIPIGAGICASYQTQTNSPRRARSVASQSIIAYTMSLGAENSVAYSNNSIAIPTNFTISVTTEILPVSMTKTSVDCTMYICGDSTECSNLLLQYGSFCTQLNRALTGIAVEQDKNTQEVFAQVKQIYKTPPIKDFGGFNFSQILPDPSKPSKRSFIEDLLFNKVTLADAGFIKQYGDCLGDIAARDLICAQKFNGLTVLPPLLTDEMIAQYTSALLAGTITSGWTFGAGAALQIPFAMQMAYRFNGCGVTQNVLYENQKLIANQFNSAIGKIQDSLSSTASALGKLQDVVNQNAQALNTLVKQLSSNFGAISSVLNDILSRLDKVEAEVQIDRLITGRLQSLQTYVTQQLIRAAEIRASANLAATKMSECVLGQSKRVDFCGKGCHLMSFPQSAPHGVVFLHVTYVPAQEKNFTTAPAICHDGKAHFPREGVFVSNGTHWFVTQRNFYEPQIITTDNTFVSGNCDVVIGIVNNTVYDPLQPELDSGGGGSDIIKLLNEQVNKEMQSSNLYMSMSSWCYTHSLDGAGLFLFDHAAEEYEHAKKLIIFLNENNVPVQLTSISAPEHKFEGLTQIFQKAYEHEQHISESINNIVDHAIKSKDHATFNFLQWYVAEQHEEEVLFKDILDKIELIGNENHGLYLADQYVKGIAKSRKS

SEQ ID NO: 9308 - protein, 1315 aa, Artificial Sequence
  SARS-CoV-2/Iceland/319/2020__EPI_ISL_417648 spike protein (1-1147)(I909C_Y1047C) Ferritin construct
MFVFLVLLPLVSSQCVNLTTRTQLPPAYTNSFTRGVYYPDKVFRSSVLHSTQDLFLPFFSNVTWFHAIHVSGTNGTKRFDNPVLPFNDGVYFASTEKSNIIRGWIFGTTLDSKTQSLLIVNNATNVVIKVCEFQFCNDPFLGVYYHKNNKSWMESEFRVYSSANNCTFEYVSQPFLIDLEGKQGNFKNLREFVFKNIDGYFKIYSKHTPINLVRDLPQGFSALEPLVDLPIGINITRFQTLLALHRSYLTPGDSSSGWTAGAAAYYVGYLQPRTFLLKYNENGTITDAVDCALDPLSETKCTLKSFTVEKGIYQTSNFRVQPTESIVRFPNITNLCPFGEVFNATRFASVYAWNRKRISNCVADYSVLYNSASFSTFKCYGVSPTKLNDLCFTNVYADSFVIRGDEVRQIAPGQTGKIADYNYKLPDDFTGCVIAWNSNNLDSKVGGNYNYLYRLFRKSNLKPFERDISTEIYQAGSTPCNGVEGFNCYFPLQSYGFQPTNGVGYQPYRVVVLSFELLHAPATVCGPKKSTNLVKNKCVNFNFNGLTGTGVLTESNKKFLPFQQFGRDIADTTDAVRDPQTLEILDITPCSFGGVSVITPGTNTSNQVAVLYQGVNCTEVPVAIHADQLTPTWRVYSTGSNVFQTRAGCLIGAEHVNNSYECDIPIGAGICASYQTQTNSPRRARSVASQSIIAYTMSLGAENSVAYSNNSIAIPTNFTISVTTEILPVSMTKTSVDCTMYICGDSTECSNLLLQYGSFCTQLNRALTGIAVEQDKNTQEVFAQVKQIYKTPPIKDFGGFNFSQILPDPSKPSKRSFIEDLLFNKVTLADAGFIKQYGDCLGDIAARDLICAQKFNGLTVLPPLLTDEMIAQYTSALLAGTITSGWTFGAGAALQIPFAMQMAYRFNGCGVTQNVLYENQKLIANQFNSAIGKIQDSLSSTASALGKLQDVVNQNAQALNTLVKQLSSNFGAISSVLNDILSRLDKVEAEVQIDRLITGRLQSLQTYVTQQLIRAAEIRASANLAATKMSECVLGQSKRVDFCGKGCHLMSFPQSAPHGVVFLHVTYVPAQEKNFTTAPAICHDGKAHFPREGVFVSNGTHWFVTQRNFYEPQIITTDNTFVSGNCDVVIGIVNNTVYDPLQPELDSGGGGSDIIKLLNEQVNKEMQSSNLYMSMSSWCYTHSLDGAGLFLFDHAAEEYEHAKKLIIFLNENNVPVQLTSISAPEHKFEGLTQIFQKAYEHEQHISESINNIVDHAIKSKDHATFNFLQWYVAEQHEEEVLFKDILDKIELIGNENHGLYLADQYVKGIAKSRKS

SEQ ID NO: 9309 - protein, 1315 aa, Artificial Sequence
  SARS-CoV-2/Congo/94/2020__EPI_ISL_417947 spike protein (1-1147)(I909C_Y1047C) Ferritin construct
MFVFLVLLPLVSSQCVNLTTRTQLPPAYTNSFTRGVYYPDKVFRSSVLHSTQDLFLPFFSNVTWFHAIHVSGTNGTKRFDNPVLPFNDGVYFASTEKSNIIRGWIFGTTLDSKTQSLLIVNNATNVVIKVCEFQFCNDPFLGVYYHKNNKSWMESEFRVYSSANNCTFEYVSQPFLMDLEGKQGNFKNLREFVFKNIDGYFKIYSKHTPINLVRDLPQGFSALEPLVDLPIGINITRFQTLLALHRSYLTPGDSSSGWTAGAAAYYVGYLQPRTFLLKYNENGTITDAVDCALDPLSETKCTLKSFTVEKGIYQTSNFRVQPTESIVRFPNITNLCPFGEVFNATRFASVYAWNRKRISNCVADYSVLYNSASFSTFKCYGVSPTKLNDLCFTNVYADSFVIRGDEVRQIAPGQTGKIADYNYKLPDDFTGCVIAWNSNNLDSKVGGNYNYLYRLFRKSNLKPFERDISTEIYQAGSTPCNGVEGFNCYFPLQSYGFQPTNGVGYQPYRVVVLSFELLHAPATVCGPKKSTNLVKNKCVNFNFNGLTGTGVLTESNKKFLPFQQFGRDIADTTDAVRDPQTLEILDITPCSFGGVSVITPGTNTSNQVAVLYQGVNCTEVPVAIHADQLTPTWRVYSTGSNVFQTRAGCLIGAEHVNNSYECDIPIGAGICASYQTQTNSPRRARSVASQSIIAYTMSLGAENSVAYSNNSIAIPTNFTISVTTEILPVSMTKTSVDCTMYICGDSTECSNLLLQYGSFCTQLNRALTGIAVEQDKNTQEVFAQVKQIYKTPPIKDFGGFNFSQILPDPSKPSKRSFIEDILFNKVTLADAGFIKQYGDCLGDIAARDLICAQKFNGLTVLPPLLTDEMIAQYTSALLAGTITSGWTFGAGAALQIPFAMQMAYRFNGCGVTQNVLYENQKLIANQFNSAIGKIQDSLSSTASALGKLQDVVNQNAQALNTLVKQLSSNFGAISSVLNDILSRLDKVEAEVQIDRLITGRLQSLQTYVTQQLIRAAEIRASANLAATKMSECVLGQSKRVDFCGKGCHLMSFPQSAPHGVVFLHVTYVPAQEKNFTTAPAICHDGKAHFPREGVFVSNGTHWFVTQRNFYEPQIITTDNTFVSGNCDVVIGIVNNTVYDPLQPELDSGGGGSDIIKLLNEQVNKEMQSSNLYMSMSSWCYTHSLDGAGLFLFDHAAEEYEHAKKLIIFLNENNVPVQLTSISAPEHKFEGLTQIFQKAYEHEQHISESINNIVDHAIKSKDHATFNFLQWYVAEQHEEEVLFKDILDKIELIGNENHGLYLADQYVKGIAKSRKS

SEQ ID NO: 9310 - protein, 1315 aa, Artificial Sequence
  SARS-CoV-2/Congo/158/2020__EPI_ISL_417950 spike protein (1-1147)(I909C_Y1047C) Ferritin construct
MFVFLVLLPLVSSQCVNLTTRTQLPPAYTNSFTRGVYYPDKVFRSSVLHSTQDLFLPFFSNVTWFHAIHVSGTNGTKRFDNPVLPFNDGVYFASTEKSNIIRGWIFGTTLDSKTQSLLIVNNATNVVIKVCEFQFCNDPFLGVYYHKNNKSWMESEFRVYSSANNCTFEYVSQPFLMDLEGKQGNFKNLREFVFKNIDGYFKIYSKHTPINLVRDLPQGFSALEPLVDLPIGINITRFQTLLALHRSYLTPGDSSSGWTAGAAAYYVGYLQPRTFLLKYNENGTITDAVDCALDPLSETKCTLKSFTVEKGIYQTSNFRVQPTESIVRFPNITNLCPFGEVFNATRFASVYAWNRKRISNCVADYSVLYNSASFSTFKCYGVSPTKLNDLCFTNVYADSFVIRGDEVRQIAPGQTGKIADYNYKLPDDFTGCVIAWNSNNLDSKVGGNYNYLYRLFRKSNLKPFERDISTEIYQAGSTPCNGVEGFNCYFPLQSYGFQPTNGVGYQPYRVVVLSFELLHAPATVCGPKKSTNLVKNKCVNFNFNGLTGTGVLTESNKKFLPFQQFGRDIADTTDAVRDPQTLEILDITPCSFGGVSVITPGTNTSNQVAVLYQDVNCTEVPVAIHADQLTPTWRVYSTGSNVFQTRAGCLIGAEHVNNSYECDIPIGAGICASYQTQTNSPRRARSVASQSIIAYTMSLGAENSVAYSNNSIAIPTNFTISVTTEILPVSMTKTSVDCTMYICGDSTECSNLLLQYGSFCTQLNRALTGIAVEQDKNTQEVFAQVKQIYKTPPIKDFGGFNFSQILPDPSKPSKRSFIEDLLFNKVTLADAGFIKQYGDCLGDIAARDLICAQKFNGLTVLPPLLTDEMIAQYTSALLAGTITSGWTFGAGAALQIPFAMQMAYRFNGCGVTQNVLYENQKLIANQFNSAIGKIQDSLSSTASALGKLQDVVNQNAQALNTLVKQLSSNFGAISSVLNDILSRLDKVEAEVQIDRLITGRLQSLQTYVTQQLIRAAEIRASANLAATKMSECVLGQSKRVDFCGKGCHLMSFPQSAPHGVVFLHVTYVPAQEKNFTTAPAICHDGKAHFPREGVFVSNGTHWFVTQRNFYEPQIITTDNTFLSGNCDVVIGIVNNTVYDPLQPELDSGGGGSDIIKLLNEQVNKEMQSSNLYMSMSSWCYTHSLDGAGLFLFDHAAEEYEHAKKLIIFLNENNVPVQLTSISAPEHKFEGLTQIFQKAYEHEQHISESINNIVDHAIKSKDHATFNFLQWYVAEQHEEEVLFKDILDKIELIGNENHGLYLADQYVKGIAKSRKS

SEQ ID NO: 9311 - protein, 1315 aa, Artificial Sequence
  SARS-CoV-2/USA/UT-00034/2020__EPI_ISL_417977 spike protein (1-1147)(I909C_Y1047C) Ferritin construct
MFVFLVLLPLVSSQCVNLTTRTQLPPAYTNSFTRGVYYPDKVFRSSVLHSTQDLFLPFFSNVTWFHAIHVSGTNGTKRFDNPVLPFNDGVYFASTEKSNIIRGWIFGTTLDSKTQSLLIVNNATNVVIKVCEFQFCNDPFLGVYYYKNNKSWMESEFRVYSSANNCTFEYVSQPFLMDLEGKQGNFKNLREFVFKNIDGYFKIYSKHTPINLVRDLPQGFSALEPLVDLPIGINITRFQTLLALHRSYLTPGDSSSGWTAGAAAYYVGYLQPRTFLLKYNENGTITDAVDCALDPLSETKCTLKSFTVEKGIYQTSNFRVQPTESIVRFPNITNLCPFGEVFNATRFASVYAWNRKRISNCVADYSVLYNSASFSTFKCYGVSPTKLNDLCFTNVYADSFVIRGDEVRQIAPGQTGKIADYNYKLPDDFTGCVIAWNSNNLDSKVGGNYNYLYRLFRKSNLKPFERDISTEIYQAGSTPCNGVEGFNCYFPLQSYGFQPTNGVGYQPYRVVVLSFELLHAPATVCGPKKSTNLVKNKCVNFNFNGLTGTGVLTESNKKFLPFQQFGRDIADTTDAVRDPQTLEILDITPCSFGGVSVITPGTNTSNQVAVLYQGVNCTEVPVAIHADQLTPTWRVYSTGSNVFQTRAGCLIGAEHVNNSYECDIPIGAGICASYQTQTNSPRRARSVASQSIIAYTMSLGAENSVAYSNNSIAIPTNFTISVTTEILPVSMTKTSVDCTMYICGDSTECSNLLLQYGSFCTQLNRALTGIAVEQDKNTQEVFAQVKQIYKTPPIKDFGGFNFSQILPDPSKPSKRSFIEDLLFNKVTLADAGFIKQYGDCLGDIAARDLICAQKFNGLTVLPPLLTDEMIAQYTSALLAGTITSGWTFGAGAALQIPFAMQMAYRFNGCGVTQNVLYENQKLIANQFNSAIGKIQDSLSSTASALGKLQDVVNQNAQALNTLVKQLSSNFGAISSVLNDILSRLDKVEAEVQIDRLITGRLQSLQTYVTQQLIRAAEIRASANLAATKMSECVLGQSKRVDFCGKGCHLMSFPQSAPHGVVFLHVTYVPAQEKNFTTAPAICHDGKAHFPREGVFVSNGTHWFVTQRNFYEPQIITTDNTFVSGNCDVVIGIVNNTVYDPLQPELDSGGGGSDIIKLLNEQVNKEMQSSNLYMSMSSWCYTHSLDGAGLFLFDHAAEEYEHAKKLIIFLNENNVPVQLTSISAPEHKFEGLTQIFQKAYEHEQHISESINNIVDHAIKSKDHATFNFLQWYVAEQHEEEVLFKDILDKIELIGNENHGLYLADQYVKGIAKSRKS

SEQ ID NO: 9312 - protein, 1315 aa, Artificial Sequence
  SARS-CoV-2/USA/UT-00033/2020__EPI_ISL_417976 spike protein (1-1147)(I909C_Y1047C) Ferritin construct
MFVFLVLLPLVSSQCVNLTTRTQLPPAYTNSFTRGVYYPDKVFRSSVLHSTQDLFLPFFSNVTWFHAIHVSGTNGTKRFDNPVLPFNDGVYFASTEKSNIIRGWIFGTTLDSKTQSLLIVNNATNVVIKVCEFQFCNDPFLGVYYHKNNKSWMESEFRVYSSANNCTFEYVSQPFLMDLEGKQGNFKNLREFVFKNIDGYFKIYSKHTPINLVRDLPQGFSALEPLVDLPIGINITRFQTLLALHRSYLTPGDSSSGLTAGAAAYYVGYLQPRTFLLKYNENGTITDAVDCALDPLSETKCTLKSFTVEKGIYQTSNFRVQPTESIVRFPNITNLCPFGEVFNATRFASVYAWNRKRISNCVADYSVLYNSASFSTFKCYGVSPTKLNDLCFTNVYADSFVIRGDEVRQIAPGQTGKIADYNYKLPDDFTGCVIAWNSNNLDSKVGGNYNYLYRLFRKSNLKPFERDISTEIYQAGSTPCNGVEGFNCYFPLQSYGFQPTNGVGYQPYRVVVLSFELLHAPATVCGPKKSTNLVKNKCVNFNFNGLTGTGVLTESNKKFLPFQQFGRDIADTTDAVRDPQTLEILDITPCSFGGVSVITPGTNTSNQVAVLYQGVNCTEVPVAIHADQLTPTWRVYSTGSNVFQTRAGCLIGAEHVNNSYECDIPIGAGICASYQTQTNSPRRARSVASQSIIAYTMSLGAENSVAYSNNSIAIPTNFTISVTTEILPVSMTKTSVDCTMYICGDSTECSNLLLQYGSFCTQLNRALTGIAVEQDKNTQEVFAQVKQIYKTPPIKDFGGFNFSQILPDPSKPSKRSFIEDLLFNKVTLADAGFIKQYGDCLGDIAARDLICAQKFNGLTVLPPLLTDEMIAQYTSALLAGTITSGWTFGAGAALQIPFAMQMAYRFNGCGVTQNVLYENQKLIANQFNSAIGKIQDSLSSTASALGKLQDVVNQNAQALNTLVKQLSSNFGAISSVLNDILSRLDKVEAEVQIDRLITGRLQSLQTYVTQQLIRAAEIRASANLAATKMSECVLGQSKRVDFCGKGCHLMSFPQSAPHGVVFLHVTYVPAQEKNFTTAPAICHDGKAHFPREGVFVSNGTHWFVTQRNFYEPQIITTDNTFVSGNCDVVIGIVNNTVYDPLQPELDSGGGGSDIIKLLNEQVNKEMQSSNLYMSMSSWCYTHSLDGAGLFLFDHAAEEYEHAKKLIIFLNENNVPVQLTSISAPEHKFEGLTQIFQKAYEHEQHISESINNIVDHAIKSKDHATFNFLQWYVAEQHEEEVLFKDILDKIELIGNENHGLYLADQYVKGIAKSRKS

SEQ ID NO: 9313 - protein, 1315 aa, Artificial Sequence
  SARS-CoV-2/USA/WI-13/2020__EPI_ISL_417516 spike protein (1-1147)(I909C_Y1047C) Ferritin construct
MFVFLVLLPLVSSQCVNLTTRTQLPPAYTNSFTRGVYYPDKVFRSSVLHSTQDLFLPFFSNVTWFHAIHVSGTNGTKRFDNPVLPFNDGVYFASTEKSNIIRGWIFGTTLDSKTQSLLIVNNATNVVIKVCEFQFCNDPFLGVYYHKNNKSWMESEFRVYSSANNCTFEYVSQPFLMDLEGKQGNFKNLREFVFKNIDGYFKIYSKHTPINLVRDLPQGFSALEPLVDLPIGINITRFQTLLALHRSYLTPGDSSSGWTAGAAAYYVGYLQPRTFLLKYNENGTITDAVDCALDPLSETKCTLKSFTVEKGIYQTSNFRVLPTESIVRFPNITNLCPFGEVFNATRFASVYAWNRKRISNCVADYSVLYNSASFSTFKCYGVSPTKLNDLCFTNVYADSFVIRGDEVRQIAPGQTGKIADYNYKLPDDFTGCVIAWNSNNLDSKVGGNYNYLYRLFRKSNLKPFERDISTEIYQAGSTPCNGVEGFNCYFPLQSYGFQPTNGVGYQPYRVVVLSFELLHAPATVCGPKKSTNLVKNKCVNFNFNGLTGTGVLTESNKKFLPFQQFGRDIADTTDAVRDPQTLEILDITPCSFGGVSVITPGTNTSNQVAVLYQGVNCTEVPVAIHADQLTPTWRVYSTGSNVFQTRAGCLIGAEHVNNSYECDIPIGAGICASYQTQTNSPRRARSVASQSIIAYTMSLGAENSVAYSNNSIAIPTNFTISVTTEILPVSMTKTSVDCTMYICGDSTECSNLLLQYGSFCTQLNRALTGIAVEQDKNTQEVFAQVKQIYKTPPIKDFGGFNFSQILPDPSKPSKRSFIEDLLFNKVTLADAGFIKQYGDCLGDIAARDLICAQKFNGLTVLPPLLTDEMIAQYTSALLAGTITSGWTFGAGAALQIPFAMQMAYRFNGCGVTQNVLYENQKLIANQFNSAIGKIQDSLSSTASALGKLQDVVNQNAQALNTLVKQLSSNFGAISSVLNDILSRLDKVEAEVQIDRLITGRLQSLQTYVTQQLIRAAEIRASANLAATKMSECVLGQSKRVDFCGKGCHLMSFPQSAPHGVVFLHVTYVPAQEKNFTTAPAICHDGKAHFPREGVFVSNGTHWFVTQRNFYEPQIITTDNTFVSGNCDVVIGIVNNTVYDPLQPELDSGGGGSDIIKLLNEQVNKEMQSSNLYMSMSSWCYTHSLDGAGLFLFDHAAEEYEHAKKLIIFLNENNVPVQLTSISAPEHKFEGLTQIFQKAYEHEQHISESINNIVDHAIKSKDHATFNFLQWYVAEQHEEEVLFKDILDKIELIGNENHGLYLADQYVKGIAKSRKS

SEQ ID NO: 9314 - protein, 1314 aa, Artificial Sequence
  SARS-CoV-2/India/1-27/2020__EPI_ISL_413522 spike protein (1-1146)(I908C_Y1046C) Ferritin construct
MFVFLVLLPLVSSQCVNLTTRTQLPPAYTNSFTRGVYYPDKVFRSSVLHSTQDLFLPFFSNVTWFHAIHVSGTNGTKRFDNPVLPFNDGVYFASTEKSNIIRGWIFGTTLDSKTQSLLIVNNATNVVIKVCEFQFCNDPFLGVYHKNNKSWMESEFRVYSSANNCTFEYVSQPFLMDLEGKQGNFKNLREFVFKNIDGYFKIYSKHTPINLVRDLPQGFSALEPLVDLPIGINITRFQTLLALHRSYLTPGDSSSGWTAGAAAYYVGYLQPRTFLLKYNENGTITDAVDCALDPLSETKCTLKSFTVEKGIYQTSNFRVQPTESIVRFPNITNLCPFGEVFNATRFASVYAWNRKRISNCVADYSVLYNSASFSTFKCYGVSPTKLNDLCFTNVYADSFVIRGDEVIQIAPGQTGKIADYNYKLPDDFTGCVIAWNSNNLDSKVGGNYNYLYRLFRKSNLKPFERDISTEIYQAGSTPCNGVEGFNCYFPLQSYGFQPTNGVGYQPYRVVVLSFELLHAPATVCGPKKSTNLVKNKCVNFNFNGLTGTGVLTESNKKFLPFQQFGRDIADTTDAVRDPQTLEILDITPCSFGGVSVITPGTNTSNQVAVLYQDVNCTEVPVAIHADQLTPTWRVYSTGSNVFQTRAGCLIGAEHVNNSYECDIPIGAGICASYQTQTNSPRRARSVASQSIIAYTMSLGAENSVAYSNNSIAIPTNFTISVTTEILPVSMTKTSVDCTMYICGDSTECSNLLLQYGSFCTQLNRALTGIAVEQDKNTQEVFAQVKQIYKTPPIKDFGGFNFSQILPDPSKPSKRSFIEDLLFNKVTLADAGFIKQYGDCLGDIAARDLICAQKFNGLTVLPPLLTDEMIAQYTSALLAGTITSGWTFGAGAALQIPFAMQMAYRFNGCGVTQNVLYENQKLIANQFNSAIGKIQDSLSSTASALGKLQDVVNQNAQALNTLVKQLSSNFGAISSVLNDILSRLDKVEAEVQIDRLITGRLQSLQTYVTQQLIRAAEIRASANLAATKMSECVLGQSKRVDFCGKGCHLMSFPQSAPHGVVFLHVTYVPAQEKNFTTAPAICHDGKAHFPREGVFVSNGTHWFVTQRNFYEPQIITTDNTFVSGNCDVVIGIVNNTVYDPLQPELDSGGGGSDIIKLLNEQVNKEMQSSNLYMSMSSWCYTHSLDGAGLFLFDHAAEEYEHAKKLIIFLNENNVPVQLTSISAPEHKFEGLTQIFQKAYEHEQHISESINNIVDHAIKSKDHATFNFLQWYVAEQHEEEVLFKDILDKIELIGNENHGLYLADQYVKGIAKSRKS

SEQ ID NO: 9315 - protein, 1309 aa, Artificial Sequence
  SARS-CoV-2/pangolin/Guangxi/P4L/2017__EPI_ISL_410538 spike protein (1-1141)(I903C_Y1041C) Ferritin construct
MFVFLFVLPLVSSQCVNLTTRTGIPPGYTNSSTRGVYYPDKVFRSSILHLTQDLFLPFFSNVTWFNTINYQGGFKKFDNPVLPFNDGVYFASTEKSNIIRGWIFGTTLDARTQSLLIVNNATNVVIKVCEFQFCTDPFLGVYYHNNNKTWVENEFRVYSSANNCTFEYISQPFLMDLEGKQGNFKNLREFVFKNVDGYFKIYSKHTPIDLVRDLPRGFAALEPLVDLPIGINITRFQTLLALHRSYLTPGNLESGWTTGAAAYYVGYLQQRTFLLSYNQNGTITDAVDCSLDPLSETKCTLKSLTVEKGIYQTSNFRVQPTISIVRFPNITNLCPFGEVFNASKFASVYAWNRKRISNCVADYSVLYNSTSFSTFKCYGVSPTKLNDLCFTNVYADSFVVKGDEVRQIAPGQTGVIADYNYKLPDDFTGCVIAWNSVKQDALTGGNYGYLYRLFRKSKLKPFERDISTEIYQAGSTPCNGQVGLNCYYPLERYGFHPTTGVNYQPFRVVVLSFELLNGPATVCGPKLSTTLVKDKCVNFNFNGLTGTGVLTTSKKQFLPFQQFGRDISDTTDAVRDPQTLEILDITPCSFGGVSVITPGTNTSNQVAVLYQDVNCTEVPMAIHAEQLTPAWRVYSAGANVFQTRAGCLVGAEHVNNSYECDIPVGAGICASYHSMSSLRSVNQRSIIAYTMSLGAENSVAYSNNSIAIPTNFTISVTTEILPVSMTKTSVDCTMYICGDSIECSNLLLQYGSFCTQLNRALTGIAVEQDKNTQEVFAQVKQIYKTPPIKDFGGFNFSQILPDPSKPSKRSFIEDLLFNKVTLADAGFIKQYGDCLGDIAARDLICAQKFNGLTVLPPLLTDEMIAQYTSALLAGTITSGWTFGAGAALQIPFAMQMAYRFNGCGVTQNVLYENQKLIANQFNSAIGKIQDSLSSTASALGKLQDVVNQNAQALNTLVKQLSSNFGAISSVLNDILSRLDKVEAEVQIDRLITGRLQSLQTYVTQQLIRAAEIRASANLAATKMSECVLGQSKRVDFCGKGCHLMSFPQSAPHGVVFLHVTYVPAQEKNFTTAPAICHEGKAHFPREGVFVSNGTHWFITQRNFYEPQIITTDNTFVSGSCDVVIGIVNNTVYDPLQPELDSGGGGSDIIKLLNEQVNKEMQSSNLYMSMSSWCYTHSLDGAGLFLFDHAAEEYEHAKKLIIFLNENNVPVQLTSISAPEHKFEGLTQIFQKAYEHEQHISESINNIVDHAIKSKDHATFNFLQWYVAEQHEEEVLFKDILDKIELIGNENHGLYLADQYVKGIAKSRKS

SEQ ID NO: 9316 - protein, 1309 aa, Artificial Sequence
  SARS-CoV-2/pangolin/Guangxi/P5L/2017__EPI_ISL_410540 spike protein (1-1141)(I903C_Y1041C) Ferritin construct
MFVFLFVLPLVSSQCVNLTTRTGIPPGYTNSSTRGVYYPDKVFRSSILHLTQDLFLPFFSNVTWFNTINYQGGFKKFDNPVLPFNDGVYFASTEKSNIIRGWIFGTTLDARTQSLLIVNNATNVVIKVCEFQFCTDPFLGVYYHNNNKTWVENEFRVYSSANNCTFEYISQPFLMDLEGKQGNFKNLREFVFKNVDGYFKIYSKHTPIDLVRDLPRGFAALEPLVDLPIGINITRFQTLLALHRSYLTPGKLESGWTTGAAAYYVGYLQQRTFLLSYNQNGTITDAVDCSLDPLSETKCTLKSLTVEKGIYQTSNFRVQPTISIVRFPNITNLCPFGEVFNASKFASVYAWNRKRISNCVADYSVLYNSTSFSTFKCYGVSPTKLNDLCFTNVYADSFVVKGDEVRQIAPGQTGVIADYNYKLPDDFTGCVIAWNSVKQDALTGGNYGYLYRLFRKSKLKPFERDISTEIYQAGSTPCNGQVGLNCYYPLERYGFHPTTGVNYQPFRVVVLSFELLNGPATVCGPKLSTTLVKDKCVNFNFNGLTGTGVLTTSKKQFLPFQQFGRDISDTTDAVRDPQTLEILDITPCSFGGVSVITPGTNTSNQVAVLYQDVNCTEVPMAIHAEQLTPAWRVYSAGANVFQTRAGCLVGAEHVNNSYECDIPVGAGICASYHSMSSFRSVNQRSIIAYTMSLGAENSVAYSNNSIAIPTNFTISVTTEILPVSMTKTSVDCTMYICGDSIECSNLLLQYGSFCTQLNRALTGIAVEQDKNTQEVFAQVKQIYKTPPIKDFGGFNFSQILPDPSKPSKRSFIEDLLFNKVTLADAGFIKQYGDCLGDIAARDLICAQKFNGLTVLPPLLTDEMIAQYTSALLAGTITSGWTFGAGAALQIPFAMQMAYRFNGCGVTQNVLYENQKLIANQFNSAIGKIQDSLSSTASALGKLQDVVNQNAQALNTLVKQLSSNFGAISSVLNDILSRLDKVEAEVQIDRLITGRLQSLQTYVTQQLIRAAEIRASANLAATKMSECVLGQSKRVDFCGKGCHLMSFPQSAPHGVVFLHVTYVPAQEKNFTTAPAICHEGKAHFPREGVFVSNGTHWFITQRNFYEPQIITTDNTFVSGSCDVVIGIVNNTVYDPLQPELDSGGGGSDIIKLLNEQVNKEMQSSNLYMSMSSWCYTHSLDGAGLFLFDHAAEEYEHAKKLIIFLNENNVPVQLTSISAPEHKFEGLTQIFQKAYEHEQHISESINNIVDHAIKSKDHATFNFLQWYVAEQHEEEVLFKDILDKIELIGNENHGLYLADQYVKGIAKSRKS

SEQ ID NO: 9317 - protein, 1309 aa, Artificial Sequence
  SARS-CoV-2/pangolin/Guangxi/P5E/2017__EPI_ISL_410541 spike protein (1-1141)(I903C_Y1041C) Ferritin construct
MFVFLFVLPLVSSQCVNLTTRTGIPPGYTNSSTRGVYYPDKVFRSSILHLTQDLFLPFFSNVTWFNTITYQGGSKKFDNPVLPFNDGVYFASTEKSNIIRGWIFGTTLDARTQSLLIVNNATNVVIKVCEFQFCTDPFLGVYYHNNNKTWVENEFRVYSSANNCTFEYISQPFLMDLEGKQGNFKNLREFVFKNVDGYFKIYSKHTPIDLVRDLPRGFAALEPLVDLPIGINITRFQTLLALHRSYLTPGKLESGWTTGAAAYYVGYLQQRTFLLSYNQNGTITDAVDCSLDPLSETKCTLKSLTVEKGIYQTSNFRVQPTISIVRFPNITNLCPFGEVFNASKFASVYAWNRKRISNCVADYSVLYNSTSFSTFKCYGVSPTKLNDLCFTNVYADSFVVKGDEVRQIAPGQTGVIADYNYKLPDDFTGCVIAWNSVKQDALTGDNYGYLYRLFRKSKLKPFERDISTEIYQAGSTPCNGQVGLNCYYPLERYGFHPTTGVNYQPFRVVVLSFELLNGPATVCGPKLSTTLVKDKCVNFNFNGLTGTGVLTTSKKQFLPFQQFGRDISDTTDAVRDPQTLEILDITPCSFGGVSVITPGTNTSNQVAVLYQDVNCTEVPMAIHAEQLTPAWRVYSAGANVFQTRAGCLVGAEHVNNSYECDIPVGAGICASYHSMSSFRSVNQRSIIAYTMSLGAENSVAYSNNSIAIPTNFTISVTTEILPVSMTKTSVDCTMYICGDSIECSNLLLQYGSFCTQLNRALTGIAVEQDKNTQEVFAQVKQIYKTPPIKDFGGFNFSQILPDPSKPSKRSFIEDLLFNKVTLADAGFIKQYGDCLGDIAARDLICAQKFNGLTVLPPLLTDEMIAQYTSALLAGTITSGWTFGAGAALQIPFAMQMAYRFNGCGVTQNVLYENQKLIANQFNSAIGKIQDSLSSTASALGKLQDVVNQNAQALNTLVKQLSSNFGAISSVLNDILSRLDKVEAEVQIDRLITGRLQSLQTYVTQQLIRAAEIRASANLAATKMSECVLGQSKRVDFCGKGCHLMSFPQSAPHGVVFLHVTYVPAQEKNFTTAPAICHEGKAHFPREGVFVSNGTHWFITQRNFYEPQIITTDNTFVSGSCDVVIGIVNNTVYDPLQPELDSGGGGSDIIKLLNEQVNKEMQSSNLYMSMSSWCYTHSLDGAGLFLFDHAAEEYEHAKKLIIFLNENNVPVQLTSISAPEHKFEGLTQIFQKAYEHEQHISESINNIVDHAIKSKDHATFNFLQWYVAEQHEEEVLFKDILDKIELIGNENHGLYLADQYVKGIAKSRKS

SEQ ID NO: 9318 - protein, 1307 aa, Artificial Sequence
  SARS-CoV-2/pangolin/Guangxi/P1E/2017__EPI_ISL_410539 spike protein (1-1139)(I901C_Y1039C) Ferritin construct
MFVFLFVLPLVSSQCVNLTTRTGIQPGYTNSSTRGVYYPDKVFRSSILHLTQDLFLPFFSNVTWFNTINYQGGFKKFDNPVLPFNDGVYFASTEKSNIIRGWIFGTTLDARTQSLLIVNNATNVVIKVCEFQFCTDPFLGVYYHNNNKTWVENEFRVYSSANNCTFEYISQPFLMDLEGKQGNFKNLREFVFKNVDGYFKIYSKHTPIDLVRDLPRGFAALEPLVDLPIGINITRFQTLLALHRSYLTPGKLESGWTTGAAAYYVGYLQQRTFLLSYNQNGTITDAVDCSLDPLSETKCTLKSLTVEKGIYQTSNFRVQPTISIVRFPNITNLCPFGEVFNASKFASVYAWNRKRISNCVADYSVLYNSTSFSTFKCYGVSPTKLNDLCFTNVYADSFVVKGDEVRQIAPGQTGVIADYNYKLPDDFTGCVIAWNSVKQDALTGGNYLYRLFRKSKLKPFERDISTEIYQAGSTPCNGQVGLNCYYPLERYGFHPTTGVNYQPFRVVVLSFELLNGPATVCGPKLSTTLVKDKCVNFNFNGLTGTGVLTTSKKQFLPFQQFGRDISDTTDAVRDPQTLEILDITPCSFGGVSVITPGTNTSNQVAVLYQDVNCTEVPMAIHAEQLTPAWRVYSAGANVFQTRAGCLVGAEHVNNSYECDIPVGAGICASYHSMSSLRSVNQRSIIAYTMSLGAENSVAYSNNSIAIPTNFTISVTTEILPVSMTKTSVDCTMYICGDSIECSNLLLQYGSFCTQLNRALTGIAVEQDKNTQEVFAQVKQIYKTPPIKDFGGFNFSQILPDPSKPSKRSFIEDLLFNKVTLADAGFIKQYGDCLGDIAARDLICAQKFNGLTVLPPLLTDEMIAQYTSALLAGTITSGWTFGAGAALQIPFAMQMAYRFNGCGVTQNVLYENQKLIANQFNSAIGKIQDSLSSTASALGKLQDVVNQNAQALNTLVKQLSSNFGAISSVLNDILSRLDKVEAEVQIDRLITGRLQSLQTYVTQQLIRAAEIRASANLAATKMSECVLGQSKRVDFCGKGCHLMSFPQSAPHGVVFLHVTYVPAQEKNFTTAPAICHEGKAHFPREGVFVSNGTHWFITQRNFYEPQIITTDNTFVSGSCDVVIGIVNNTVYDPLQPELDSGGGGSDIIKLLNEQVNKEMQSSNLYMSMSSWCYTHSLDGAGLFLFDHAAEEYEHAKKLIIFLNENNVPVQLTSISAPEHKFEGLTQIFQKAYEHEQHISESINNIVDHAIKSKDHATFNFLQWYVAEQHEEEVLFKDILDKIELIGNENHGLYLADQYVKGIAKSRKS

SEQ ID NO: 9319 - protein, 1315 aa, Artificial Sequence
  SARS-CoV-2/Wuhan/WIV05/2019__EPI_ISL_402128 spike protein (1-1147)(Q965C_S1003C) Ferritin construct
MFVFLVLLPLVSSQCVNLTTRTQLPPAYTNSFTRGVYYPDKVFRSSVLHSTQDLFLPFFSNVTWFHAIHVSGTNGTKRFDNPVLPFNDGVYFASTEKSNIIRGWIFGTTLDSKTQSLLIVNNATNVVIKVCEFQFCNDPFLGVYYHKNNKSWMESEFRVYSSANNCTFEYVSQPFLMDLEGKQGNFKNLREFVFKNIDGYFKIYSKHTPINLVRDLPQGFSALEPLVDLPIGINITRFQTLLALHRSYLTPGDSSSGWTAGAAAYYVGYLQPRTFLLKYNENGTITDAVDCALDPLSETKCTLKSFTVEKGIYQTSNFRVQPTESIVRFPNITNLCPFGEVFNATRFASVYAWNRKRISNCVADYSVLYNSASFSTFKCYGVSPTKLNDLCFTNVYADSFVIRGDEVRQIAPGQTGKIADYNYKLPDDFTGCVIAWNSNNLDSKVGGNYNYLYRLFRKSNLKPFERDISTEIYQAGSTPCNGVEGFNCYFPLQSYGFQPTNGVGYQPYRVVVLSFELLHAPATVCGPKKSTNLVKNKCVNFNFNGLTGTGVLTESNKKFLPFQQFGRDIADTTDAVRDPQTLEILDITPCSFGGVSVITPGTNTSNQVAVLYQDVNCTEVPVAIHADQLTPTWRVYSTGSNVFQTRAGCLIGAEHVNNSYECDIPIGAGICASYQTQTNSPRRARSVASQSIIAYTMSLGAENSVAYSNNSIAIPTNFTISVTTEILPVSMTKTSVDCTMYICGDSTECSNLLLQYGSFCTQLNRALTGIAVEQDKNTQEVFAQVKQIYKTPPIKDFGGFNFSQILPDPSKPSKRSFIEDLLFNKVTLADAGFIKQYGDCLGDIAARDLICAQKFNGLTVLPPLLTDEMIAQYTSALLAGTITSGWTFGAGAALQIPFAMQMAYRFNGIGVTQNVLYENQKLIANQFNSAIGKIQDSLSSTASALGKLQDVVNQNAQALNTLVKCLSSNFGAISSVLNDILSRLDKVEAEVQIDRLITGRLQCLQTYVTQQLIRAAEIRASANLAATKMSECVLGQSKRVDFCGKGYHLMSFPQSAPHGVVFLHVTYVPAQEKNFTTAPAICHDGKAHFPREGVFVSNGTHWFVTQRNFYEPQIITTDNTFVSGNCDVVIGIVNNTVYDPLQPELDSGGGGSDIIKLLNEQVNKEMQSSNLYMSMSSWCYTHSLDGAGLFLFDHAAEEYEHAKKLIIFLNENNVPVQLTSISAPEHKFEGLTQIFQKAYEHEQHISESINNIVDHAIKSKDHATFNFLQWYVAEQHEEEVLFKDILDKIELIGNENHGLYLADQYVKGIAKSRKS

SEQ ID NO: 9320 - protein, 1311 aa, Artificial Sequence
  SARS-CoV-2/bat/Yunnan/RaTG13/2013__EPI_ISL_402131 spike protein (1-1143)(Q961C_S999C) Ferritin construct
MFVFLVLLPLVSSQCVNLTTRTQLPPAYTNSSTRGVYYPDKVFRSSVLHLTQDLFLPFFSNVTWFHAIHVSGTNGIKRFDNPVLPFNDGVYFASTEKSNIIRGWIFGTTLDSKTQSLLIVNNATNVVIKVCEFQFCNDPFLGVYYHKNNKSWMESEFRVYSSANNCTFEYVSQPFLMDLEGKQGNFKNLREFVFKNIDGYFKIYSKHTPINLVRDLPPGFSALEPLVDLPIGINITRFQTLLALHRSYLTPGDSSSGWTAGAAAYYVGYLQPRTFLLKYNENGTITDAVDCALDPLSETKCTLKSFTVEKGIYQTSNFRVQPTDSIVRFPNITNLCPFGEVFNATTFASVYAWNRKRISNCVADYSVLYNSTSFSTFKCYGVSPTKLNDLCFTNVYADSFVITGDEVRQIAPGQTGKIADYNYKLPDDFTGCVIAWNSKHIDAKEGGNFNYLYRLFRKANLKPFERDISTEIYQAGSKPCNGQTGLNCYYPLYRYGFYPTDGVGHQPYRVVVLSFELLNAPATVCGPKKSTNLVKNKCVNFNFNGLTGTGVLTESNKKFLPFQQFGRDIADTTDAVRDPQTLEILDITPCSFGGVSVITPGTNASNQVAVLYQDVNCTEVPVAIHADQLTPTWRVYSTGSNVFQTRAGCLIGAEHVNNSYECDIPIGAGICASYQTQTNSRSVASQSIIAYTMSLGAENSVAYSNNSIAIPTNFTISVTTEILPVSMTKTSVDCTMYICGDSTECSNLLLQYGSFCTQLNRALTGIAVEQDKNTQEVFAQVKQIYKTPPIKDFGGFNFSQILPDPSKPSKRSFIEDLLFNKVTLADAGFIKQYGDCLGDIAARDLICAQKFNGLTVLPPLLTDEMIAQYTSALLAGTITSGWTFGAGAALQIPFAMQMAYRFNGIGVTQNVLYENQKLIANQFNSAIGKIQDSLSSTASALGKLQDVVNQNAQALNTLVKCLSSNFGAISSVLNDILSRLDKVEAEVQIDRLITGRLQCLQTYVTQQLIRAAEIRASANLAATKMSECVLGQSKRVDFCGKGYHLMSFPQSAPHGVVFLHVTYVPAQEKNFTTAPAICHDGKAHFPREGVFVSNGTHWFVTQRNFYEPQIITTDNTFVSGSCDVVIGIVNNTVYDPLQPELDSGGGGSDIIKLLNEQVNKEMQSSNLYMSMSSWCYTHSLDGAGLFLFDHAAEEYEHAKKLIIFLNENNVPVQLTSISAPEHKFEGLTQIFQKAYEHEQHISESINNIVDHAIKSKDHATFNFLQWYVAEQHEEEVLFKDILDKIELIGNENHGLYLADQYVKGIAKSRKS

SEQ ID NO: 9321 - protein, 1315 aa, Artificial Sequence
  SARS-CoV-2/Wuhan/HBCDC-HB-01/2019__EPI_ISL_402132 spike protein (1-1147)(Q965C_S1003C) Ferritin construct
MFVFLVLLPLVSSQCVNLTTRTQLPPAYTNSITRGVYYPDKVFRSSVLHSTQDLFLPFFSNVTWFHAIHVSGTNGTKRFDNPVLPFNDGVYFASTEKSNIIRGWIFGTTLDSKTQSLLIVNNATNVVIKVCEFQFCNDPFLGVYYHKNNKSWMESEFRVYSSANNCTFEYVSQPFLMDLEGKQGNFKNLREFVFKNIDGYFKIYSKHTPINLVRDLPQGFSALEPLVDLPIGINITRFQTLLALHRSYLTPGDSSSGWTAGAAAYYVGYLQPRTFLLKYNENGTITDAVDCALDPLSETKCTLKSFTVEKGIYQTSNFRVQPTESIVRFPNITNLCPFGEVFNATRFASVYAWNRKRISNCVADYSVLYNSASFSTFKCYGVSPTKLNDLCFTNVYADSFVIRGDEVRQIAPGQTGKIADYNYKLPDDFTGCVIAWNSNNLDSKVGGNYNYLYRLFRKSNLKPFERDISTEIYQAGSTPCNGVEGFNCYFPLQSYGFQPTNGVGYQPYRVVVLSFELLHAPATVCGPKKSTNLVKNKCVNFNFNGLTGTGVLTESNKKFLPFQQFGRDIADTTDAVRDPQTLEILDITPCSFGGVSVITPGTNTSNQVAVLYQDVNCTEVPVAIHADQLTPTWRVYSTGSNVFQTRAGCLIGAEHVNNSYECDIPIGAGICASYQTQTNSPRRARSVASQSIIAYTMSLGAENSVAYSNNSIAIPTNFTISVTTEILPVSMTKTSVDCTMYICGDSTECSNLLLQYGSFCTQLNRALTGIAVEQDKNTQEVFAQVKQIYKTPPIKDFGGFNFSQILPDPSKPSKRSFIEDLLFNKVTLADAGFIKQYGDCLGDIAARDLICAQKFNGLTVLPPLLTDEMIAQYTSALLAGTITSGWTFGAGAALQIPFAMQMAYRFNGIGVTQNVLYENQKLIANQFNSAIGKIQDSLSSTASALGKLQDVVNQNAQALNTLVKCLSSNFGAISSVLNDILSRLDKVEAEVQIDRLITGRLQCLQTYVTQQLIRAAEIRASANLAATKMSECVLGQSKRVDFCGKGYHLMSFPQSAPHGVVFLHVTYVPAQEKNFTTAPAICHDGKAHFPREGVFVSNGTHWFVTQRNFYEPQIITTDNTFVSGNCDVVIGIVNNTVYDPLQPELDSGGGGSDIIKLLNEQVNKEMQSSNLYMSMSSWCYTHSLDGAGLFLFDHAAEEYEHAKKLIIFLNENNVPVQLTSISAPEHKFEGLTQIFQKAYEHEQHISESINNIVDHAIKSKDHATFNFLQWYVAEQHEEEVLFKDILDKIELIGNENHGLYLADQYVKGIAKSRKS

SEQ ID NO: 9322 - protein, 1315 aa, Artificial Sequence
  SARS-CoV-2/Guangdong/20SF028/2020__EPI_ISL_403936 spike protein (1-1147)(Q965C_S1003C) Ferritin construct
MFVFLVLLPLVSSQCVNLTTRTQLPPAYTNSFTRGVYYPDKVFRSSVLYSTQDLFLPFFSNVTWFHAIHVSGTNGTKRFDNPVLPFNDGVYFASTEKSNIIRGWIFGTTLDSKTQSLLIVNNATNVVIKVCEFQFCNDPFLGVYYHKNNKSWMESEFRVYSSANNCTFEYVSQPFLMDLEGKQGNFKNLREFVFKNIDGYFKIYSKHTPINLVRDLPQGFSALEPLVDLPIGINITRFQTLLALHRSYLTPGDSSSGWTAGAAAYYVGYLQPRTFLLKYNENGTITDAVDCALDPLSETKCTLKSFTVEKGIYQTSNFRVQPTESIVRFPNITNLCPFGEVFNATRFASVYAWNRKRISNCVADYSVLYNSASFSTFKCYGVSPTKLNDLCFTNVYADSFVIRGDEVRQIAPGQTGKIADYNYKLPDDFTGCVIAWNSNNLDSKVGGNYNYLYRLFRKSNLKPFERDISTEIYQAGSTPCNGVEGFNCYFPLQSYGFQPTNGVGYQPYRVVVLSFELLHAPATVCGPKKSTNLVKNKCVNFNFNGLTGTGVLTESNKKFLPFQQFGRDIADTTDAVRDPQTLEILDITPCSFGGVSVITPGTNTSNQVAVLYQDVNCTEVPVAIHADQLTPTWRVYSTGSNVFQTRAGCLIGAEHVNNSYECDIPIGAGICASYQTQTNSPRRARSVASQSIIAYTMSLGAENSVAYSNNSIAIPTNFTISVTTEILPVSMTKTSVDCTMYICGDSTECSNLLLQYGSFCTQLNRALTGIAVEQDKNTQEVFAQVKQIYKTPPIKDFGGFNFSQILPDPSKPSKRSFIEDLLFNKVTLADAGFIKQYGDCLGDIAARDLICAQKFNGLTVLPPLLTDEMIAQYTSALLAGTITSGWTFGAGAALQIPFAMQMAYRFNGIGVTQNVLYENQKLIANQFNSAIGKIQDSLSSTASALGKLQDVVNQNAQALNTLVKCLSSNFGAISSVLNDILSRLDKVEAEVQIDRLITGRLQCLQTYVTQQLIRAAEIRASANLAATKMSECVLGQSKRVDFCGKGYHLMSFPQSAPHGVVFLHVTYVPAQEKNFTTAPAICHDGKAHFPREGVFVSNGTHWFVTQRNFYEPQIITTDNTFVSGNCDVVIGIVNNTVYDPLQPELDSGGGGSDIIKLLNEQVNKEMQSSNLYMSMSSWCYTHSLDGAGLFLFDHAAEEYEHAKKLIIFLNENNVPVQLTSISAPEHKFEGLTQIFQKAYEHEQHISESINNIVDHAIKSKDHATFNFLQWYVAEQHEEEVLFKDILDKIELIGNENHGLYLADQYVKGIAKSRKS

SEQ ID NO: 9323 - protein, 1315 aa, Artificial Sequence
  SARS-CoV-2/Shenzhen/SZTH-001/2020__EPI_ISL_406592 spike protein (1-1147)(Q965C_S1003C) Ferritin construct
MFVFLVLLPLVSSQCVNLTTRTQLPPAYTNSFTRGVYYPDKVFRSSVLHSTQDLFLPFFSNVTWFHAIHVSGTNGTKRFDNPVLPFNDGVYFASTEKSNIIRGWIFGTTLDSKTQSLLIVNNATNVVIKVCEFQFCNDPFLGVYYHKNNKSWMESEFRVYSSANNCTFEYVSQPFLMDLEGKQGNFKNLREFVFKNIDGYFKIYSKHTPINLVRDLPQGFSALEPLVDLPIGINITRFQTLLALHRSYLTPGDSSSGWTAGAAAYYVGYLQPRTFLLKYNENGTITDAVDCALDPLSETKCTLKSFTVEKGIYQTSNFRVQPTESIVRFPNITNLCPFGEVFNATRFASVYAWNRKRISNCVADYSVLYNSASFSTFKCYGVSPTKLNDLCFTNVYADSFVIRGDEVRQIAPGQTGKIADYNYKLPDDFTGCVIAWNSNNLDSKVGGNYNYLYRLFRKSNLKPFERDISTEIYQAGSTPCNGVEGFNCYFPLQSYGFQPTNGVGYQPYRVVVLSFELLHAPATVCGPKKSTNLVKNKCVNFNFNGLTGTGVLTESNKKFLPFQQFGRDIADTTDAVRDPQTLEILDITPCSFGGVSVITPGTNTSNQVAVLYQDVNCTEVPVAIHADQLTPTWRVYSTGSNVFQTRAGCLIGAEHVNNSYECDIPIGAGICASYQTQTNSPRRARSVASQSIIAYTMSLGAENSVAYSNNSIAIPTNFTISVTTEILPVSMTKTSVDCTMYICGDSTECSNLLLQYGSFCTQLNRALTGIAVEQDKNTQEVFAQVKQIYKTPPIKDFGGFNFSQILPDPSKPSKRSFIEDLLFNKVTLADAGFIKQYGDCLGDIAARDLICAQKFNGLTVLPPLLTDEMIAQYTSALLAGTITSGWTFGAGAALQIPFAMQMAYRFNGIGVTQNVLYENQKLIANQFNSAIGKIQDSLSSTASALGKLQDVVNQNAQALNTLVKCLSSNFGAISSVLNDILSRLDKVEAEVQIDRLITGRLQCLQTYVTQQLIRAAEIRASANLAATKMSECVLGQSKRVDFCGKGYHLMSFPQSAPHGVVFLHVTYVPAQEKNFTTAPAICHDGKAHFPREGVFVSNGTHWFVTQRNFYEPQIITTDNTFVSGNCDVLIGIVNNTVYDPLQPELDSGGGGSDIIKLLNEQVNKEMQSSNLYMSMSSWCYTHSLDGAGLFLFDHAAEEYEHAKKLIIFLNENNVPVQLTSISAPEHKFEGLTQIFQKAYEHEQHISESINNIVDHAIKSKDHATFNFLQWYVAEQHEEEVLFKDILDKIELIGNENHGLYLADQYVKGIAKSRKS

SEQ ID NO: 9324 - protein, 1315 aa, Artificial Sequence
  SARS-CoV-2/Shenzhen/SZTH-004/2020__EPI_ISL_406595 spike protein (1-1147)(Q965C_S1003C) Ferritin construct
MFVFLVLLPLVSSQCVNLTTRTQLPPAYTNSFTRGVYYPDKVFRSSVLHSTQDLFLPFFSNVTWFHAIHVSGTNGTKRFDNPVLPFNDGVYFASTEKSNIIRGWIFGTTLDSKTQSLLIVNNATNVVIKVCEFQFCNDPFLGVYYHKNNKSWMESEFRVYSSANNCTFEYVSQPFLMDLEGKQGNFKNLREFVFKNIDGYFKIYSKHTPINLVRDLPQGFSALEPLVDLPIGINITRFQTLLALHRSYLTPGDSSSGWTAGAAAYYVGYLQPRTFLLKYNENGTITDAVDCALDPLSETKCTLKSFTVEKGIYQTSNFRVQPTESIVRFPNITNLCPFGEVFNATRFASVYAWDRKRISNCVAYYSVLYNSASFSTFKCYGVSPTKLNDLCFTNVYADSFVIRGDEVRQIAPGQTGKIADYNYKLPDDFTGCVIAWNSNNLDSKVGGNYNYLYRLFRKSNLKPFERDISTEIYQAGSTPCNGVEGFNCYFPLQSYGFQPTNGVGYQPYRVVVLSFELLHAPATVCGPKKSTNLVKNKCVNFNFNGLTGTGVLTESNKKFLPFQQFGRDIADTTDAVRDPQTLEILDITPCSFGGVSVITPGTNTSNQVAVLYQDVNCTEVPVAIHADQLTPTWRVYSTGSNVFQTRAGCLIGAEHVNNSYECDIPIGAGICASYQTQTNSPRRARSVASQSIIAYTMSLGAENSVAYSNNSIAIPTNFTISVTTEILPVSMTKTSVDCTMYICGDSTECSNLLLQYGSFCTQLNRALTGIAVEQDKNTQEVFAQVKQIYKTPPIKDFGGFNFSQILPDPSKPSKRSFIEDLLFNKVTLADAGFIKQYGDCLGDIAARDLICAQKFNGLTVLPPLLTDEMIAQYTSALLAGTITSGWTFGAGAALQIPFAMQMAYRFNGIGVTQNVLYENQKLIANQFNSAIGKIQDSLSSTASALGKLQDVVNQNAQALNTLVKCLSSNFGAISSVLNDILSRLDKVEAEVQIDRLITGRLQCLQTYVTQQLIRAAEIRASANLAATKMSECVLGQSKRVDFCGKGYHLMSFPQSAPHGVVFLHVTYVPAQEKNFTTAPAICHDGKAHFPREGVFVSNGTHWFVTQRNFYEPQIITTDNTFVSGNCDVVIGIVNNTVYDPLQPELDSGGGGSDIIKLLNEQVNKEMQSSNLYMSMSSWCYTHSLDGAGLFLFDHAAEEYEHAKKLIIFLNENNVPVQLTSISAPEHKFEGLTQIFQKAYEHEQHISESINNIVDHAIKSKDHATFNFLQWYVAEQHEEEVLFKDILDKIELIGNENHGLYLADQYVKGIAKSRKS

SEQ ID NO: 9325 - protein, 1315 aa, Artificial Sequence
  SARS-CoV-2/France/IDF0372/2020__EPI_ISL_406596 spike protein (1-1147)(Q965C_S1003C) Ferritin construct
MFVFLVLLPLVSSQCVNLTTRTQLPPAYTNSFTRGVYYPDKVFRSSVLHSTQDLFLPFFSNVTWFHAIHVSGTNGTKRFDNPVLPFNDGVYFASTEKSNIIRGWIFGTTLDSKTQSLLIVNNATNVVIKVCEFQFCNDPFLGVYYHKNNKSWMESEFRVYSSANNCTFEYVSQPFLMDLEGKQGNFKNLREFVFKNIDGYFKIYSKHTPINLVRDLPQGFSALEPLVDLPIGINITRFQTLLALHRSYLTPGDSSSGWTAGAAAYYVGYLQPRTFLLKYNENGTITDAVDCALDPLSETKCTLKSFTVEKGIYQTSNFRVQPTESIVRFPNITNLCPFGEVFNATRFASVYAWNRKRISNCVADYSFLYNSASFSTFKCYGVSPTKLNDLCFTNVYADSFVIRGDEVRQIAPGQTGKIADYNYKLPDDFTGCVIAWNSNNLDSKVGGNYNYLYRLFRKSNLKPFERDISTEIYQAGSTPCNGVEGFNCYFPLQSYGFQPTNGVGYQPYRVVVLSFELLHAPATVCGPKKSTNLVKNKCVNFNFNGLTGTGVLTESNKKFLPFQQFGRDIADTTDAVRDPQTLEILDITPCSFGGVSVITPGTNTSNQVAVLYQDVNCTEVPVAIHADQLTPTWRVYSTGSNVFQTRAGCLIGAEHVNNSYECDIPIGAGICASYQTQTNSPRRARSVASQSIIAYTMSLGAENSVAYSNNSIAIPTNFTISVTTEILPVSMTKTSVDCTMYICGDSTECSNLLLQYGSFCTQLNRALTGIAVEQDKNTQEVFAQVKQIYKTPPIKDFGGFNFSQILPDPSKPSKRSFIEDLLFNKVTLADAGFIKQYGDCLGDIAARDLICAQKFNGLTVLPPLLTDEMIAQYTSALLAGTITSGWTFGAGAALQIPFAMQMAYRFNGIGVTQNVLYENQKLIANQFNSAIGKIQDSLSSTASALGKLQDVVNQNAQALNTLVKCLSSNFGAISSVLNDILSRLDKVEAEVQIDRLITGRLQCLQTYVTQQLIRAAEIRASANLAATKMSECVLGQSKRVDFCGKGYHLMSFPQSAPHGVVFLHVTYVPAQEKNFTTAPAICHDGKAHFPREGVFVSNGTHWFVTQRNFYEPQIITTDNTFVSGNCDVVIGIVNNTVYDPLQPELDSGGGGSDIIKLLNEQVNKEMQSSNLYMSMSSWCYTHSLDGAGLFLFDHAAEEYEHAKKLIIFLNENNVPVQLTSISAPEHKFEGLTQIFQKAYEHEQHISESINNIVDHAIKSKDHATFNFLQWYVAEQHEEEVLFKDILDKIELIGNENHGLYLADQYVKGIAKSRKS

SEQ ID NO: 9326 - protein, 1315 aa, Artificial Sequence
  SARS-CoV-2/Australia/VIC01/2020__EPI_ISL_406844 spike protein (1-1147)(Q965C_S1003C) Ferritin construct
MFVFLVLLPLVSSQCVNLTTRTQLPPAYTNSFTRGVYYPDKVFRSSVLHSTQDLFLPFFSNVTWFHAIHVSGTNGTKRFDNPVLPFNDGVYFASTEKSNIIRGWIFGTTLDSKTQSLLIVNNATNVVIKVCEFQFCNDPFLGVYYHKNNKSWMESEFRVYSSANNCTFEYVSQPFLMDLEGKQGNFKNLREFVFKNIDGYFKIYSKHTPINLVRDLPQGFSALEPLVDLPIGINITRFQTLLALHRRYLTPGDSSSGWTAGAAAYYVGYLQPRTFLLKYNENGTITDAVDCALDPLSETKCTLKSFTVEKGIYQTSNFRVQPTESIVRFPNITNLCPFGEVFNATRFASVYAWNRKRISNCVADYSVLYNSASFSTFKCYGVSPTKLNDLCFTNVYADSFVIRGDEVRQIAPGQTGKIADYNYKLPDDFTGCVIAWNSNNLDSKVGGNYNYLYRLFRKSNLKPFERDISTEIYQAGSTPCNGVEGFNCYFPLQSYGFQPTNGVGYQPYRVVVLSFELLHAPATVCGPKKSTNLVKNKCVNFNFNGLTGTGVLTESNKKFLPFQQFGRDIADTTDAVRDPQTLEILDITPCSFGGVSVITPGTNTSNQVAVLYQDVNCTEVPVAIHADQLTPTWRVYSTGSNVFQTRAGCLIGAEHVNNSYECDIPIGAGICASYQTQTNSPRRARSVASQSIIAYTMSLGAENSVAYSNNSIAIPTNFTISVTTEILPVSMTKTSVDCTMYICGDSTECSNLLLQYGSFCTQLNRALTGIAVEQDKNTQEVFAQVKQIYKTPPIKDFGGFNFSQILPDPSKPSKRSFIEDLLFNKVTLADAGFIKQYGDCLGDIAARDLICAQKFNGLTVLPPLLTDEMIAQYTSALLAGTITSGWTFGAGAALQIPFAMQMAYRFNGIGVTQNVLYENQKLIANQFNSAIGKIQDSLSSTASALGKLQDVVNQNAQALNTLVKCLSSNFGAISSVLNDILSRLDKVEAEVQIDRLITGRLQCLQTYVTQQLIRAAEIRASANLAATKMSECVLGQSKRVDFCGKGYHLMSFPQSAPHGVVFLHVTYVPAQEKNFTTAPAICHDGKAHFPREGVFVSNGTHWFVTQRNFYEPQIITTDNTFVSGNCDVVIGIVNNTVYDPLQPELDSGGGGSDIIKLLNEQVNKEMQSSNLYMSMSSWCYTHSLDGAGLFLFDHAAEEYEHAKKLIIFLNENNVPVQLTSISAPEHKFEGLTQIFQKAYEHEQHISESINNIVDHAIKSKDHATFNFLQWYVAEQHEEEVLFKDILDKIELIGNENHGLYLADQYVKGIAKSRKS

SEQ ID NO: 9327 - protein, 1315 aa, Artificial Sequence
  SARS-CoV-2/Germany/BavPat1/2020__EPI_ISL_406862 spike protein (1-1147)(Q965C_S1003C) Ferritin construct
MFVFLVLLPLVSSQCVNLTTRTQLPPAYTNSFTRGVYYPDKVFRSSVLHSTQDLFLPFFSNVTWFHAIHVSGTNGTKRFDNPVLPFNDGVYFASTEKSNIIRGWIFGTTLDSKTQSLLIVNNATNVVIKVCEFQFCNDPFLGVYYHKNNKSWMESEFRVYSSANNCTFEYVSQPFLMDLEGKQGNFKNLREFVFKNIDGYFKIYSKHTPINLVRDLPQGFSALEPLVDLPIGINITRFQTLLALHRSYLTPGDSSSGWTAGAAAYYVGYLQPRTFLLKYNENGTITDAVDCALDPLSETKCTLKSFTVEKGIYQTSNFRVQPTESIVRFPNITNLCPFGEVFNATRFASVYAWNRKRISNCVADYSVLYNSASFSTFKCYGVSPTKLNDLCFTNVYADSFVIRGDEVRQIAPGQTGKIADYNYKLPDDFTGCVIAWNSNNLDSKVGGNYNYLYRLFRKSNLKPFERDISTEIYQAGSTPCNGVEGFNCYFPLQSYGFQPTNGVGYQPYRVVVLSFELLHAPATVCGPKKSTNLVKNKCVNFNFNGLTGTGVLTESNKKFLPFQQFGRDIADTTDAVRDPQTLEILDITPCSFGGVSVITPGTNTSNQVAVLYQGVNCTEVPVAIHADQLTPTWRVYSTGSNVFQTRAGCLIGAEHVNNSYECDIPIGAGICASYQTQTNSPRRARSVASQSIIAYTMSLGAENSVAYSNNSIAIPTNFTISVTTEILPVSMTKTSVDCTMYICGDSTECSNLLLQYGSFCTQLNRALTGIAVEQDKNTQEVFAQVKQIYKTPPIKDFGGFNFSQILPDPSKPSKRSFIEDLLFNKVTLADAGFIKQYGDCLGDIAARDLICAQKFNGLTVLPPLLTDEMIAQYTSALLAGTITSGWTFGAGAALQIPFAMQMAYRFNGIGVTQNVLYENQKLIANQFNSAIGKIQDSLSSTASALGKLQDVVNQNAQALNTLVKCLSSNFGAISSVLNDILSRLDKVEAEVQIDRLITGRLQCLQTYVTQQLIRAAEIRASANLAATKMSECVLGQSKRVDFCGKGYHLMSFPQSAPHGVVFLHVTYVPAQEKNFTTAPAICHDGKAHFPREGVFVSNGTHWFVTQRNFYEPQIITTDNTFVSGNCDVVIGIVNNTVYDPLQPELDSGGGGSDIIKLLNEQVNKEMQSSNLYMSMSSWCYTHSLDGAGLFLFDHAAEEYEHAKKLIIFLNENNVPVQLTSISAPEHKFEGLTQIFQKAYEHEQHISESINNIVDHAIKSKDHATFNFLQWYVAEQHEEEVLFKDILDKIELIGNENHGLYLADQYVKGIAKSRKS

SEQ ID NO: 9328 - protein, 1315 aa, Artificial Sequence
  SARS-CoV-2/Wuhan/HBCDC-HB-02/2020__EPI_ISL_412978 spike protein (1-1147)(Q965C_S1003C) Ferritin construct
MFVFLVLLPLVSSQCVNLTTRTQLPPAYTNSFTRGVYYPDKVFRSSVLHSTQDLFLPFFSNVTWFHAIHVSGTNGTKRFDNPVLPFNDGVYFASTEKSNIIRGWIFGTTLDSKTQSLLIVNNATNVVIKVCEFQFCNDPFLGVYYHKNNKSWMESEFRVYSSANNCTFEYVSQPFLMDLEGKQGNFKNLREFVFKNIDGYFKIYSKHTPINLVRDLPQGFSALEPLVDLPIGINITRFQTLLALHRSYLTPGDSSSGWTAGAAAYYVGYLQPRTFLLKYNENGTITDAVDCALDPLSETKCTLKSFTVEKGIYQTSNFRVQPTESIVRFPNITNLCPFGEVFNATRFASVYAWNRKRISNCVADYSVLYNSASFSTFKCYGVSPTKLNDLCFTNVYADSFVIRGDEVRQIAPGQTGKIADYNYKLPDDFTGCVIAWNSNNLDSKVGGNYNYLYRLFRKSNLKPFERDISTEIYQAGSTPCNGVEGFNCYFPLQSYGFQPTNGVGYQPYRVVVLSFELLHAPATVCGPKKSTNLVKNKCVNFNFNGLTGTGVLTESNKKFLPFQQFGRDIADTTDAVRDPQTLEILDITPCSFGGVSVITPGTNTSNQVAVLYQDVNCTEVPVAIHADQLTPTWRVYSTGSNVFQTRAGCLIGAEHVNNSYECDIPIGAGICASYQTQTNSPRRARSVASQSIIAYTMSLGAENSVAYSNNSIAIPTNFTISVTTEILPVSMTKTSVDCTMYICGDSTECSNFLLQYGSFCTQLNRALTGIAVEQDKNTQEVFAQVKQIYKTPPIKDFGGFNFSQILPDPSKPSKRSFIEDLLFNKVTLADAGFIKQYGDCLGDIAARDLICAQKFNGLTVLPPLLTDEMIAQYTSALLAGTITSGWTFGAGAALQIPFAMQMAYRFNGIGVTQNVLYENQKLIANQFNSAIGKIQDSLSSTASALGKLQDVVNQNAQALNTLVKCLSSNFGAISSVLNDILSRLDKVEAEVQIDRLITGRLQCLQTYVTQQLIRAAEIRASANLAATKMSECVLGQSKRVDFCGKGYHLMSFPQSAPHGVVFLHVTYVPAQEKNFTTAPAICHDGKAHFPREGVFVSNGTHWFVTQRNFYEPQIITTDNTFVSGNCDVVIGIVNNTVYDPLQPELDSGGGGSDIIKLLNEQVNKEMQSSNLYMSMSSWCYTHSLDGAGLFLFDHAAEEYEHAKKLIIFLNENNVPVQLTSISAPEHKFEGLTQIFQKAYEHEQHISESINNIVDHAIKSKDHATFNFLQWYVAEQHEEEVLFKDILDKIELIGNENHGLYLADQYVKGIAKSRKS

SEQ ID NO: 9329 - protein, 1315 aa, Artificial Sequence
  SARS-CoV-2/Australia/QLD02/2020__EPI_ISL_407896 spike protein (1-1147)(Q965C_S1003C) Ferritin construct
MFVFLVLLPLVSSQCVNLTTRTQLPPAYTNSFTRGVYYPDKVFRSSVLHSTQDLFLPFFSNVTWFHAIHVSGTNGTKRFDNPVLPFNDGVYFASTEKSNIIRGWIFGTTLDSKTQSLLIVNNATNVVIKVCEFQFCNDPFLGVYYHKNNKSWMESEFRVYSSANNCTFEYVSQPFLMDLEGKQGNFKNLREFVFKNIDGYFKIYSKHTPINLVRDLPQGFSALEPLVDLPIGINITRFQTLLALHRSYLTPGDSSSGWTAGAAAYYVGYLQPRTFLLKYNENGTITDAVDCALDPLSETKCTLKSFTVEKGIYQTSNFRVQPTESIVRFPNITNLCPFGEVFNATRFASVYAWNRKRISNCVADYSVLYNSASFSTFKCYGVSPTKLNDLCFTNVYADSFVIRGDEVRQIAPGQTGKIADYNYKLPDDFTGCVIAWNSNNLDSKVGGNYNYLYRLFRKSNLKPFERDISTEIYQAGSTPCNGVEGFNCYFPLQSYGFQPTNGVGYQPYRVVVLSFELLHAPATVCGPKKSTNLVKNKCVNFNFNGLTGTGVLTESNKKFLPFQQFGRDIADTTDAVRDPQTLEILDITPCSFGGVSVITPGTNTSNQVAVLYQDVNCTEVPVAIHADQLTPTWRVYSTGSNVFQTRAGCLIGAEHVNNSYECDIPIGAGICASYQTQTNSPRRARSVASQSIIAYTMSLGAENSVAYSNNSIAIPTNFTISVTTEILPVSMTKTSVDCTMYICGDSTECSNLLLQYGSFCTQLNRALTGIAVEQDKNTQEVFAQVKQIYKTPPIKDFGGFNFSQILPDPSKPSKRSFIEDLLFNKVTLADAGFIKQYGDCLGDIAARDLICAQKFNGLTVLPPLLTDEMIAQYTSALLAGTITSGWTFGAGAALQIPFAMQMAYRFNGIGVTQNVLYENQKLIANQFNSAIGKIQDSLSSTASALGKLQDVVNQNAQALNTLVKCLSSNFGAISSVLNDILSRLDKVEAEVQIDRLITGRLQCLQTYVTQQLIRAAEIRASANLAATKMSECVLGQSKRVDFCGKGYHLMSFPQSAPHGVVFLHVTYVPAQEKNFTTAPAICHDGKAHFPREGVFVSNGTHWFVTQRNFYEPQIITTDNTFVSGNCDVVIGIVNNTVYDPLQLELDSGGGGSDIIKLLNEQVNKEMQSSNLYMSMSSWCYTHSLDGAGLFLFDHAAEEYEHAKKLIIFLNENNVPVQLTSISAPEHKFEGLTQIFQKAYEHEQHISESINNIVDHAIKSKDHATFNFLQWYVAEQHEEEVLFKDILDKIELIGNENHGLYLADQYVKGIAKSRKS

SEQ ID NO: 9330 - protein, 1315 aa, Artificial Sequence
  SARS-CoV-2/India/1-31/2020__EPI_ISL_413523 spike protein (1-1147)(Q965C_S1003C) Ferritin construct
MFVFLVLLPLVSSQCVNLTTRTQLPPAYTNSFTRGVYYPDKVFRSSVLHSTQDLFLPFFSNVTWFHAIHVSGTNGTKRFDNPVLPFNDGVYFASTEKSNIIRGWIFGTTLDSKTQSLLIVNNATNVVIKVCEFQFCNDPFLGVYYHKNNKSWMESEFRVYSSANNCTFEYVSQPFLMDLEGKQGNFKNLREFVFKNIDGYFKIYSKHTPINLVRDLPQGFSALEPLVDLPIGINITRFQTLLALHRSYLTPGDSSSGWTAGAAAYYVGYLQPRTFLLKYNENGTITDAVDCALDPLSETKCTLKSFTVEKGIYQTSNFRVQPTESIVRFPNITNLCPFGEVFNATRFASVYAWNRKRISNCVADYSVLYNSASFSTFKCYGVSPTKLNDLCFTNVYADSFVIRGDEVRQIAPGQTGKIADYNYKLPDDFTGCVIAWNSNNLDSKVGGNYNYLYRLFRKSNLKPFERDISTEIYQAGSTPCNGVEGFNCYFPLQSYGFQPTNGVGYQPYRVVVLSFELLHAPATVCGPKKSTNLVKNKCVNFNFNGLTGTGVLTESNKKFLPFQQFGRDIADTTDAVRDPQTLEILDITPCSFGGVSVITPGTNTSNQVAVLYQDVNCTEVPVAIHADQLTPTWRVYSTGSNVFQTRAGCLIGAEHVNNSYECDIPIGAGICASYQTQTNSPRRARSVASQSIIAYTMSLGAENSVAYSNNSIAIPTNFTISVTTEILPVSMTKTSVDCTMYICGDSTECSNLLLQYGSFCTQLNRALTGIAVEQDKNTQEVFAQVKQIYKTPPIKDFGGFNFSQILPDPSKPSKRSFIEDLLFNKVTLADAGFIKQYGDCLGDIAARDLICAQKFNGLTVLPPLLTDEMIAQYTSALLAGTITSGWTFGAGAALQIPFAMQMAYRFNGIGVTQNVLYENQKLIANQFNSVIGKIQDSLSSTASALGKLQDVVNQNAQALNTLVKCLSSNFGAISSVLNDILSRLDKVEAEVQIDRLITGRLQCLQTYVTQQLIRAAEIRASANLAATKMSECVLGQSKRVDFCGKGYHLMSFPQSAPHGVVFLHVTYVPAQEKNFTTAPAICHDGKAHFPREGVFVSNGTHWFVTQRNFYEPQIITTDNTFVSGNCDVVIGIVNNTVYDPLQPELDSGGGGSDIIKLLNEQVNKEMQSSNLYMSMSSWCYTHSLDGAGLFLFDHAAEEYEHAKKLIIFLNENNVPVQLTSISAPEHKFEGLTQIFQKAYEHEQHISESINNIVDHAIKSKDHATFNFLQWYVAEQHEEEVLFKDILDKIELIGNENHGLYLADQYVKGIAKSRKS

SEQ ID NO: 9331 - protein, 1315 aa, Artificial Sequence
  SARS-CoV-2/Guangdong/GD2020087-P0008/2020__EPI_ISL_413863 spike protein (1-1147)(Q965C_S1003C) Ferritin construct
MFVFLVLLPLVSSQCVNLTTRTQLPPAYTNSFTRGVYYPDKVFRSSVLHSTQDLFLPFFSNVTWFHAIHVSGTNGTKRFDNPVLPFNDGVYFASTEKSNIIRGWIFGTTLDSKTQSLLIVNNATNVVIKVCEFQFCNDPFLGVYYHKNNKSWMESEFRVYSSANNCTFEYVSQPFLMDLEGKQGNFKNLREFVFKNIDGYFKIYSKHTPINLVRDLPQGFSALEPLVDLPIGINITRFQTLLALHRSYLTPGDSSSGWTAGAAAYYVGYLQPRTFLLKYNENGTITDAVDCALDPLSETKCTLKSFTVEKGIYQTSNFRVQPTESIVRFPNITNLCPFGEVFNATRFASVYAWNRKRISNCVADYSVLYNSASFSTFKCYGVSPTKLNDLCFTNVYADSFVIRGDEVREIAPGQTGKIADYNYKLPDDFTGCVIAWNSNNLDSKVGGNYNYLYRLFRKSNLKPFERDISTEIYQAGSTPCNGVEGFNCYFPLQSYGFQPTNGVGYQPYRVVVLSFELLHAPATVCGPKKSTNLVKNKCVNFNFNGLTGTGVLTESNKKFLPFQQFGRDIADTTDAVRDPQTLEILDITPCSFGGVSVITPGTNTSNQVAVLYQDVNCTEVPVAIHADQLTPTWRVYSTGSNVFQTRAGCLIGAEHVNNSYECDIPIGAGICASYQTQTNSPRRARSVASQSIIAYTMSLGAENSVAYSNNSIAIPTNFTISVTTEILPVSMTKTSVDCTMYICGDSTECSNLLLQYGSFCTQLNRALTGIAVEQDKNTQEVFAQVKQIYKTPPIKDFGGFNFSQILPDPSKPSKRSFIEDLLFNKVTLADAGFIKQYGDCLGDIAARDLICAQKFNGLTVLPPLLTDEMIAQYTSALLAGTITSGWTFGAGAALQIPFAMQMAYRFNGIGVTQNVLYENQKLIANQFNSAIGKIQDSLSSTASALGKLQDVVNQNAQALNTLVKCLSSNFGAISSVLNDILSRLDKVEAEVQIDRLITGRLQCLQTYVTQQLIRAAEIRASANLAATKMSECVLGQSKRVDFCGKGYHLMSFPQSAPHGVVFLHVTYVPAQEKNFTTAPAICHDGKAHFPREGVFVSNGTHWFVTQRNFYEPQIITTDNTFVSGNCDVVIGIVNNTVYDPLQPELDSGGGGSDIIKLLNEQVNKEMQSSNLYMSMSSWCYTHSLDGAGLFLFDHAAEEYEHAKKLIIFLNENNVPVQLTSISAPEHKFEGLTQIFQKAYEHEQHISESINNIVDHAIKSKDHATFNFLQWYVAEQHEEEVLFKDILDKIELIGNENHGLYLADQYVKGIAKSRKS

SEQ ID NO: 9332 - protein, 1315 aa, Artificial Sequence
  SARS-CoV-2/Sweden/01/2020__EPI_ISL_411951 spike protein (1-1147)(Q965C_S1003C) Ferritin construct
MFVFLVLLPLVSSQCVNLTTRTQLPPAYTNSFTRGVYYPDKVFRSSVLHSTQDLFLPFFSNVTWFHAIHVSGTNGTKRFDNPVLPFNDGVYFASTEKSNIIRGWIFGTTLDSKTQSLLIVNNATNVVIKVCEFQFCNDPFLGVYYHKNNKSWMESEFRVYSSANNCTFEYVSQPFLMDLEGKQGNFKNLREFVFKNIDGYFKIYSKHTPINLVRDLPQGFSALEPLVDLPIGINITRFQTLLALHRSYLTPGDSSSGWTAGAAAYYVGYLQPRTFLLKYNENGTITDAVDCALDPLSETKCTLKSFTVEKGIYQTSNFRVQPTESIVRFPNITNLCPFGEVFNATRFASVYAWNRKRISNCVADYSVLYNSASFSTFKCYGVSPTKLNDLCFTNVYADSFVIRGDEVRQIAPGQTGKIADYNYKLPDDFTGCVIAWNSNNLDSKVGGNYNYLYRLFRKSNLKPFERDISTEIYQAGSTPCNGVEGFNCYFPLQSYGFQPTNGVGYQPYRVVVLSFELLHAPATVCGPKKSTNLVKNKCVNFNFNGLTGTGVLTESNKKFLPFQQFGRDIADTTDAVRDPQTLEILDITPCSFGGVSVITPGTNTSNQVAVLYQDVNCTEVPVAIHADQLTPTWRVYSTGSNVFQTRAGCLIGAEHVNNSYECDIPIGAGICASYQTQTNSPRRARSVASQSIIAYTMSLGAENSVAYSNNSIAIPTNFTISVTTEILPVSMTKTSVDCTMYICGDSTECSNLLLQYGSFCTQLNRALTGIAVEQDKNTQEVFAQVKQIYKTPPIKDCGGFNFSQILPDPSKPSKRSFIEDLLFNKVTLADAGFIKQYGDCLGDIAARDLICAQKFNGLTVLPPLLTDEMIAQYTSALLAGTITSGWTFGAGAALQIPFAMQMAYRFNGIGVTQNVLYENQKLIANQFNSAIGKIQDSLSSTASALGKLQDVVNQNAQALNTLVKCLSSNFGAISSVLNDILSRLDKVEAEVQIDRLITGRLQCLQTYVTQQLIRAAEIRASANLAATKMSECVLGQSKRVDFCGKGYHLMSFPQSAPHGVVFLHVTYVPAQEKNFTTAPAICHDGKAHFPREGVFVSNGTHWFVTQRNFYEPQIITTDNTFVSGNCDVVIGIVNNTVYDPLQPELDSGGGGSDIIKLLNEQVNKEMQSSNLYMSMSSWCYTHSLDGAGLFLFDHAAEEYEHAKKLIIFLNENNVPVQLTSISAPEHKFEGLTQIFQKAYEHEQHISESINNIVDHAIKSKDHATFNFLQWYVAEQHEEEVLFKDILDKIELIGNENHGLYLADQYVKGIAKSRKS

SEQ ID NO: 9333 - protein, 1315 aa, Artificial Sequence
  SARS-CoV-2/Tianmen/HBCDC-HB-07/2020__EPI_ISL_412983 spike protein (1-1147)(Q965C_S1003C) Ferritin construct
MFVFLVLLPLVSSQCVNLTTRTQLPPAYTNSFTRGVYYPDKVFRSSVLHSTQDLFLPFFSNVTWFHAIHVSGTNGTKRFDNPVLPFNDGVYFASTEKSNIIRGWIFGTTLDSKTQSLLIVNNATNVVIKVCEFQFCNDPFLGVYYHKNNKSWMESEFRVYSSANNCTFEYVSQPFLMDLEGKQGNFKNLREFVFKNIDGYFKIYSKHTPINLVRDLPQGFSALEPLVDLPIGINITRFQTLLALHRSYLTPGDSSSGWTAGAAAYYVGYLQPRTFLLKYNENGTITDAVDCALDPLSETKCTLKSFTVEKGIYQTSNFRVQPTESIVRFPNITNLCPFGEVFNATRFASVYAWNRKRISNCVADYSVLYNSASFSTFKCYGVSPTKLNDLCFTNVYADSFVIRGDEVRQIAPGQTGKIADYNYKLPDDFTGCVIAWNSNNLDSKVGGNYNYLYRLFRKSNLKPFERDISTEIYQAGSTPCNGVEGFNCYFPLQSYGFQPTNGVGYQPYRVVVLSFELLHAPATVCGPKKSTNLVKNKCVNFNFNGLTGTGVLTESNKKFLPFQQFGRDIADTTDAVRDPQTLEILDITPCSFGGVSVITPGTNTSNQVAVLYQDLNCTEVPVAIHADQLTPTWRVYSTGSNVFQTRAGCLIGAEHVNNSYECDIPIGAGICASYQTQTNSPRRARSVASQSIIAYTMSLGAENSVAYSNNSIAIPTNFTISVTTEILPVSMTKTSVDCTMYICGDSTECSNLLLQYGSFCTQLNRALTGIAVEQDKNTQEVFAQVKQIYKTPPIKDFGGFNFSQILPDPSKPSKRSFIEDLLFNKVTLADAGFIKQYGDCLGDIAARDLICAQKFNGLTVLPPLLTDEMIAQYTSALLAGTITSGWTFGAGAALQIPFAMQMAYRFNGIGVTQNVLYENQKLIANQFNSAIGKIQDSLSSTASALGKLQDVVNQNAQALNTLVKCLSSNFGAISSVLNDILSRLDKVEAEVQIDRLITGRLQCLQTYVTQQLIRAAEIRASANLAATKMSECVLGQSKRVDFCGKGYHLMSFPQSAPHGVVFLHVTYVPAQEKNFTTAPAICHDGKAHFPREGVFVSNGTHWFVTQRNFYEPQIITTDNTFVSGNCDVVIGIVNNTVYDPLQPELDSGGGGSDIIKLLNEQVNKEMQSSNLYMSMSSWCYTHSLDGAGLFLFDHAAEEYEHAKKLIIFLNENNVPVQLTSISAPEHKFEGLTQIFQKAYEHEQHISESINNIVDHAIKSKDHATFNFLQWYVAEQHEEEVLFKDILDKIELIGNENHGLYLADQYVKGIAKSRKS

SEQ ID NO: 9334 - protein, 1315 aa, Artificial Sequence
  SARS-CoV-2/Hong Kong/case42_VM20002493/2020__EPI_ISL_414527 spike protein (1-1147)(Q965C_S1003C) Ferritin construct
MFVFLVLLPLVSSQCVNLTTRTQLPPAYTNSFTRGVYYPDKVFRSSVLHSTQDLFLPFFSNVTWFHAIHVSGTNGTKRFDNPVLPFNDGVYFASTEKSNIIRGWIFGTTLDSKTQSLLIVNNATNVVIKVCEFQFCNDPFLGVYYHKNNKSWMESEFRVYSSANNCTFEYVSQPFLMDLEGKQGNFKNLREFVFKNIDGYFKIYSKHTPINLVRDLPQGFSALEPLVDLPIGINITRFQTLLALHRSYLTPGDSSSGWTAGAAAYYVGYLQPRTFLLKYNENGTITDAVDCALDPLSETKCTLKSFTVEKGIYQTSNFRVQPTESIVRFPNITNLCPFGEVFNATRFASVYAWNRKRISNCVADYSVLYNSASFSTFKCYGVSPTKLNDLCFTNVYADSFVIRGDEVRQIAPGQTGKIADYNYKLPDDFTGCVIAWNSNNLDSKVGGNYNYLYRLFRKSNLKPFERDISTEIYQAGSTPCNGVEGFNCYFPLQSYGFQPTNGVGYQPYRVVVLSFELLHAPATVCGPKKSTNLVKNKCVNFNFNGLTGTGVLTESNKKFLPFQQFGRDIADTTDAVRDPQTLEILDITPCSFGGVSVITPGTNTSNQVAVLYQDVNCTEVPVAIHADQLTPTWRVYSTGSNVFQTRAGCLIGAEHVNNSYECDIPIGAGICASYQTQTNSPRRARSVASQSIIAYTMSLGAENSVAYSNNSIAIPTNFAISVTTEILPVSMTKTSVDCTMYICGDSTECSNLLLQYGSFCTQLNRALTGIAVEQDKNTQEVFAQVKQIYKTPPIKDFGGFNFSQILPDPSKPSKRSFIEDLLFNKVTLADAGFIKQYGDCLGDIAARDLICAQKFNGLTVLPPLLTDEMIAQYTSALLAGTITSGWTFGAGAALQIPFAMQMAYRFNGIGVTQNVLYENQKLIANQFNSAIGKIQDSLSSTASALGKLQDVVNQNAQALNTLVKCLSSNFGAISSVLNDILSRLDKVEAEVQIDRLITGRLQCLQTYVTQQLIRAAEIRASANLAATKMSECVLGQSKRVDFCGKGYHLMSFPQSAPHGVVFLHVTYVPAQEKNFTTAPAICHDGKAHFPREGVFVSNGTHWFVTQRNFYEPQIITTDNTFVSGNCDVVIGIVNNTVYDPLQPELDSGGGGSDIIKLLNEQVNKEMQSSNLYMSMSSWCYTHSLDGAGLFLFDHAAEEYEHAKKLIIFLNENNVPVQLTSISAPEHKFEGLTQIFQKAYEHEQHISESINNIVDHAIKSKDHATFNFLQWYVAEQHEEEVLFKDILDKIELIGNENHGLYLADQYVKGIAKSRKS

SEQ ID NO: 9335 - protein, 1315 aa, Artificial Sequence
  SARS-CoV-2/USA/CruiseA-23/2020__EPI_ISL_414482 spike protein (1-1147)(Q965C_S1003C) Ferritin construct
MFVFLVLLPLVSSQCVNLTTRTQLPPAYTNSFTRGVYYPDKVFRSSVLHSTQDLFLPFFSNVTWFHAIHVSGTNGTKRFDNPVLPFNDGVYFASTEKSNIIRGWIFGTTLDSKTQSLLIVNNATNVVIKVCEFQFCNDPFLGVYYHKNNKSWMESEFRVYSSANNCTFEYVSQPFLMDLEVKQGNFKNLREFVFKNIDGYFKIYSKHTPINLVRDLPQGFSALEPLVDLPIGINITRFQTLLALHRSYLTPGDSSSGWTAGAAAYYVGYLQPRTFLLKYNENGTITDAVDCALDPLSETKCTLKSFTVEKGIYQTSNFRVQPTESIVRFPNITNLCPFGEVFNATRFASVYAWNRKRISNCVADYSVLYNSASFSTFKCYGVSPTKLNDLCFTNVYADSFVIRGDEVRQIAPGQTGKIADYNYKLPDDFTGCVIAWNSNNLDSKVGGNYNYLYRLFRKSNLKPFERDISTEIYQAGSTPCNGVEGFNCYFPLQSYGFQPTNGVGYQPYRVVVLSFELLHAPATVCGPKKSTNLVKNKCVNFNFNGLTGTGVLTESNKKFLPFQQFGRDIADTTDAVRDPQTLEILDITPCSFGGVSVITPGTNTSNQVAVLYQDVNCTEVPVAIHADQLTPTWRVYSTGSNVFQTRAGCLIGAEHVNNSYECDIPIGAGICASYQTQTNSPRRARSVASQSIIAYTMSLGAENSVAYSNNSIAIPTNFTISVTTEILPVSMTKTSVDCTMYICGDSTECSNLLLQYGSFCTQLNRALTGIAVEQDKNTQEVFAQVKQIYKTPPIKDFGGFNFSQILPDPSKPSKRSFIEDLLFNKVTLADAGFIKQYGDCLGDIAARDLICAQKFNGLTVLPPLLTDEMIAQYTSALLAGTITSGWTFGAGAALQIPFAMQMAYRFNGIGVTQNVLYENQKLIANQFNSAIGKIQDSLSSTASALGKLQDVVNQNAQALNTLVKCLSSNFGAISSVLNDILSRLDKVEAEVQIDRLITGRLQCLQTYVTQQLIRAAEIRASANLAATKMSECVLGQSKRVDFCGKGYHLMSFPQSAPHGVVFLHVTYVPAQEKNFTTAPAICHDGKAHFPREGVFVSNGTHWFVTQRNFYEPQIITTDNTFVSGNCDVVIGIVNNTVYDPLQPELDSGGGGSDIIKLLNEQVNKEMQSSNLYMSMSSWCYTHSLDGAGLFLFDHAAEEYEHAKKLIIFLNENNVPVQLTSISAPEHKFEGLTQIFQKAYEHEQHISESINNIVDHAIKSKDHATFNFLQWYVAEQHEEEVLFKDILDKIELIGNENHGLYLADQYVKGIAKSRKS

SEQ ID NO: 9336 - protein, 1315 aa, Artificial Sequence
  SARS-CoV-2/Hong Kong/case85_VM20002868/2020__EPI_ISL_414519 spike protein (1-1147)(Q965C_S1003C) Ferritin construct
MFVFLVLVPLVSSQCVNLTTRTQLPPAYTNSFTRGVYYPDKVFRSSVLHSTQDLFLPFFSNVTWFHAIHVSGTNGTKRFDNPVLPFNDGVYFASTEKSNIIRGWIFGTTLDSKTQSLLIVNNATNVVIKVCEFQFCNDPFLGVYYHKNNKSWMESEFRVYSSANNCTFEYVSQPFLMDLEGKQGNFKNLREFVFKNIDGYFKIYSKHTPINLVRDLPQGFSALEPLVDLPIGINITRFQTLLALHRSYLTPGDSSSGWTAGAAAYYVGYLQPRTFLLKYNENGTITDAVDCALDPLSETKCTLKSFTVEKGIYQTSNFRVQPTESIVRFPNITNLCPFGEVFNATRFASVYAWNRKRISNCVADYSVLYNSASFSTFKCYGVSPTKLNDLCFTNVYADSFVIRGDEVRQIAPGQTGKIADYNYKLPDDFTGCVIAWNSNNLDSKVGGNYNYLYRLFRKSNLKPFERDISTEIYQAGSTPCNGVEGFNCYFPLQSYGFQPTNGVGYQPYRVVVLSFELLHAPATVCGPKKSTNLVKNKCVNFNFNGLTGTGVLTESNKKFLPFQQFGRDIADTTDAVRDPQTLEILDITPCSFGGVSVITPGTNTSNQVAVLYQDVNCTEVPVAIHADQLTPTWRVYSTGSNVFQTRAGCLIGAEHVNNSYECDIPIGAGICASYQTQTNSPRRARSVASQSIIAYTMSLGAENSVAYSNNSIAIPTNFTISVTTEILPVSMTKTSVDCTMYICGDSTECSNLLLQYGSFCTQLNRALTGIAVEQDKNTQEVFAQVKQIYKTPPIKDFGGFNFSQILPDPSKPSKRSFIEDLLFNKVTLADAGFIKQYGDCLGDIAARDLICAQKFNGLTVLPPLLTDEMIAQYTSALLAGTITSGWTFGAGAALQIPFAMQMAYRFNGIGVTQNVLYENQKLIANQFNSAIGKIQDSLSSTASALGKLQDVVNQNAQALNTLVKCLSSNFGAISSVLNDILSRLDKVEAEVQIDRLITGRLQCLQTYVTQQLIRAAEIRASANLAATKMSECVLGQSKRVDFCGKGYHLMSFPQSAPHGVVFLHVTYVPAQEKNFTTAPAICHDGKAHFPREGVFVSNGTHWFVTQRNFYEPQIITTDNTFVSGNCDVVIGIVNNTVYDPLQPELDSGGGGSDIIKLLNEQVNKEMQSSNLYMSMSSWCYTHSLDGAGLFLFDHAAEEYEHAKKLIIFLNENNVPVQLTSISAPEHKFEGLTQIFQKAYEHEQHISESINNIVDHAIKSKDHATFNFLQWYVAEQHEEEVLFKDILDKIELIGNENHGLYLADQYVKGIAKSRKS

SEQ ID NO: 9337 - protein, 1315 aa, Artificial Sequence; identical to SEQ ID NO: 9327
  SARS-CoV-2/England/200990660/2020__EPI_ISL_414523 spike protein (1-1147)(Q965C_S1003C) Ferritin construct

SEQ ID NO: 9338 - protein, 1315 aa, Artificial Sequence
  SARS-CoV-2/Australia/NSW09/2020__EPI_ISL_413595 spike protein (1-1147)(Q965C_S1003C) Ferritin construct
MFVFLVLLPLVSSQCVNLTTRTQLPPAYTNSFTRGVYYPDKVFRSSVLHSTQDLFLPFFSNVTWFHAIHVSGTNGTKRFDNPVLPFNDGVYFASTEKSNIIRGWIFGTTLDSKTQSLLIVNNATNVVIKVCEFQFCNDPFLGVYYHKNNKSWMESEFRVYSSANNCTFEYVSQPFLMDLEGKQGNFKNLREFVFKNIDGYFKIYSKHTPINLVRDLPQGFSALEPLVDLPIGINITRFQTLLALHRSYLTPGDSSSGWTAGAAAYYVGYLQPRTFLLKYNENGTITDAVDCALDPLSETKCTLKSFTVEKGIYQTSNFRVQPTESIVRFPNITNLCPFGEVFNATRFASVYAWNRKRISNCVADYSVLYNSASFSTFKCYGVSPTKLNDLCFTNVYADSFVIRGDEVRQIAPGQTGKIADYNYKLPDDFTGCVIAWNSNNLDSKVGGNYNYLYRLFRKSNLKPFERDISTEIYQAGSTPCNGVEGFNCYFPLQSYGFQPTNGVGYQPYRVVVLSFELLHAPATVCGPKKSTNLVKNKCVNFNFNGLTGTGVLTESNKKFLPFQQFGRDIADTTDAVRDPQTLEILDITPCSFGGVSVITPGTNTSNQVAVLYQDVNCTEVPVAIHADQLTPTWRVYSTGSNVFQTRAGCLIGAEHVNNSYECDIPIGAGICASYQTQTNSPRRARSVASQSIIAYTMSLGAENSVAYSNNSIAIPTNFTISVTTEILPVSMTKTSVDCTMYICGDSTECSNLLLQYGSFCTQLNRALTGIAVEQDKNTQEVFAQVKQIYKTPPIKDFGGFNFSQILPDPSKPSKRSFIEDLLFNKVTLADAGFIKQYGDCLGDIAARDLICAQKFNGLTVLPPLLTDEMIAQYTSALLAGTITSGWTFGAGAALQIPFAMQMAYRFNGIGVTQNVLYENQKLIANQFNSAIGKIQDSLSFTASALGKLQDVVNQNAQALNTLVKCLSSNFGAISSVLNDILSRLDKVEAEVQIDRLITGRLQCLQTYVTQQLIRAAEIRASANLAATKMSECVLGQSKRVDFCGKGYHLMSFPQSAPHGVVFLHVTYVPAQEKNFTTAPAICHDGKAHFPREGVFVSNGTHWFVTQRNFYEPQIITTDNTFVSGNCDVVIGIVNNTVYDPLQPELDSGGGGSDIIKLLNEQVNKEMQSSNLYMSMSSWCYTHSLDGAGLFLFDHAAEEYEHAKKLIIFLNENNVPVQLTSISAPEHKFEGLTQIFQKAYEHEQHISESINNIVDHAIKSKDHATFNFLQWYVAEQHEEEVLFKDILDKIELIGNENHGLYLADQYVKGIAKSRKS

SEQ ID NO: 9339 - protein, 1315 aa, Artificial Sequence; identical to SEQ ID NO: 9319
  SARS-CoV-2/Australia/NSW10/2020__EPI_ISL_413596 spike protein (1-1147)(Q965C_S1003C) Ferritin construct

SEQ ID NO: 9340 - protein, 1315 aa, Artificial Sequence
  SARS-CoV-2/Switzerland/1000477797/2020__EPI_ISL_413023 spike protein (1-1147)(Q965C_S1003C) Ferritin construct
MFVFLVLLPLVSSQCVNLTTRTQLPPAYTNSFTRGVYYPDKVFRSSVLHSTQDLFLPFFSNVTWFHAIHVSGTNGTKRFDNPVLPFNDGVYFASTEKSNIIRGWIFGTTLDSKTQSLLIVNNATNVVIKVCEFQFCNDPFLGVYYHKNNKSWMESEFRVYSSANNCTFEYVSQPFLMDLEGKQGNFKNLREFVFKNIDGYFNIYSKHTPINLVRDLPQGFSALEPLVDLPIGINITRFQTLLALHRSYLTPGDSSSGWTAGAAAYYVGYLQPRTFLLKYNENGTITDAVDCALDPLSETKCTLKSFTVEKGIYQTSNFRVQPTESIVRFPNITNLCPFGEVFNATRFASVYAWNRKRISNCVADYSVLYNSASFSTFKCYGVSPTKLNDLCFTNVYADSFVIRGDEVRQIAPGQTGKIADYNYKLPDDFTGCVIAWNSNNLDSKVGGNYNYLYRLFRKSNLKPFERDISTEIYQAGSTPCNGVEGFNCYFPLQSYGFQPTNGVGYQPYRVVVLSFELLHAPATVCGPKKSTNLVKNKCVNFNFNGLTGTGVLTESNKKFLPFQQFGRDIADTTDAVRDPQTLEILDITPCSFGGVSVITPGTNTSNQVAVLYQGVNCTEVPVAIHADQLTPTWRVYSTGSNVFQTRAGCLIGAEHVNNSYECDIPIGAGICASYQTQTNSPRRARSVASQSIIAYTMSLGAENSVAYSNNSIAIPTNFTISVTTEILPVSMTKTSVDCTMYICGDSTECSNLLLQYGSFCTQLNRALTGIAVEQDKNTQEVFAQVKQIYKTPPIKDFGGFNFSQILPDPSKPSKRSFIEDLLFNKVTLADAGFIKQYGDCLGDIAARDLICAQKFNGLTVLPPLLTDEMIAQYTSALLAGTITSGWTFGAGAALQIPFAMQMAYRFNGIGVTQNVLYENQKLIANQFNSAIGKIQDSLSSTASALGKLQDVVNQNAQALNTLVKCLSSNFGAISSVLNDILSRLDKVEAEVQIDRLITGRLQCLQTYVTQQLIRAAEIRASANLAATKMSECVLGQSKRVDFCGKGYHLMSFPQSAPHGVVFLHVTYVPAQEKNFTTAPAICHDGKAHFPREGVFVSNGTHWFVTQRNFYEPQIITTDNTFVSGNCDVVIGIVNNTVYDPLQPELDSGGGGSDIIKLLNEQVNKEMQSSNLYMSMSSWCYTHSLDGAGLFLFDHAAEEYEHAKKLIIFLNENNVPVQLTSISAPEHKFEGLTQIFQKAYEHEQHISESINNIVDHAIKSKDHATFNFLQWYVAEQHEEEVLFKDILDKIELIGNENHGLYLADQYVKGIAKSRKS

SEQ ID NO: 9341 - protein, 1315 aa, Artificial Sequence
  SARS-CoV-2/Belgium/BA-02291/2020__EPI_ISL_415159 spike protein (1-1147)(Q965C_S1003C) Ferritin construct
MFVFLVLLPLVSSQCVNLTTRTQLPPAYTNSFTRGVYYPDKVFRSSVLHSTQDLFLPFFSNVTWFHAIHVSGTNGTKRFDNPVLPFNDGVYFASTEKSNIIRGWIFGTTLDSKTQSLLIVNNATNVVIKVCEFQFCNDPFLGVYYHKNNKSWMESEFRVYSSANNCTFEYVSQPFLMDLEGKQGNFKNLREFVFKNIDGYFKIYSKHTPINLVRDLPQGFSALEPLVDLPIGINITRFQTLLALHRSYLTPGDSSSGWTAGAAAYYVGYLQPRTFLLKYNENGTITDAVDCALDPLSETKCTLKSFTVEKGIYQTSNFRVQPTESIVRFPNITNLCPFGEVFNATRFASVYAWNRKRISNCVADYSVLYNSASFSTFKCYGVSPTKLNDLCFTNVYADSFVIRGDEVRQIAPGQTGKIADYNYKLPDDFTGCVIAWNSNNLDSKVGGNYNYLYRLFRRSNLKPFERDISTEIYQAGSTPCNGVEGFNCYFPLQSYGFQPTNGVGYQPYRVVVLSFELLPAPATVCGPKKSTNLVKNKCVNFNFNGLTGTGVLTESNKKFLPFQQFGRDIADTTDAVRDPQTLEILDITPCSFGGVSVITPGTNTSNQVAVLYQGVNCTEVPVAIHADQLTPTWRVYSTGSNVFQTRAGCLIGAEHVNNSYECDIPIGAGICASYQTQTNSPRRARSVASQSIIAYTMSLGAENSVAYSNNSIAIPTNFTISVTTEILPVSMTKTSVDCTMYICGDSTECSNLLLQYGSFCTQLNRALTGIAVEQDKNTQEVFAQVKQIYKTPPIKDFGGFNFSQILPDPSKPSKRSFIEDLLFNKVTLADAGFIKQYGDCLGDIAARDLICAQKFNGLTVLPPLLTDEMIAQYTSALLAGTITSGWTFGAGAALQIPFAMQMAYRFNGIGVTQNVLYENQKLIANQFNSAIGKIQDSLSSAAPALGKLQDVVNQNAQALNTLVKCLSSNFGAISSVLNDILSRLDKVEAEVQIDRLITGRLQCLQTYVTQQLIRAAEIRASANLAATKMSECVLGQSKRVDFCGKGYHLMSFPQSAPHGVVFLHVTYVPAQEKNFTTAPAICHDGKAHFPREGVFVSNGTHWFVTQRNFYEPQIITTDNTFVSGNCDVVIGIVNNTVYDPLQPELDSGGGGSDIIKLLNEQVNKEMQSSNLYMSMSSWCYTHSLDGAGLFLFDHAAEEYEHAKKLIIFLNENNVPVQLTSISAPEHKFEGLTQIFQKAYEHEQHISESINNIVDHAIKSKDHATFNFLQWYVAEQHEEEVLFKDILDKIELIGNENHGLYLADQYVKGIAKSRKS

SEQ ID NO: 9342 - protein, 1315 aa, Artificial Sequence
  SARS-CoV-2/USA/WA8-UW5/2020__EPI_ISL_413486 spike protein (1-1147)(Q965C_S1003C) Ferritin construct
MFVFLVLLPLVSSQCVNLTTRTQLPPAYTNSFTRGVYYPDKVFRSSVLHSTQDLFLPFFSNVTWFHAIHVSGTNGTKRFDNPVLPFNDGVYFASTEKSNIIRGWIFGTTLDSKTQSLLIVNNATNVVIKVCEFQFCNDPFLGVYYHKNNKSWMESEFRVYSSANNCTFEYVSQPFLMDLEGKQGNFKNLREFVFKNIDGYFKIYSKHTPINLVRDLPQGFSALEPLVDLPIGINITRFQTLLALHRSYLTPGDSSSGWTAGAAAYYVGYLQPRTFLLKYNENGTITDAVDCALDPLSETKCTLKSFTVEKGIYQTSNFRVQPTESIVRFPNITNLCPFGEVFNATRFASVYAWNRKRISNCVADYSVLYNSASFSTFKCYGVSPTKLNDLCFTNVYADSFVIRGDEVRQIAPGQTGKIADYNYKLPDDFTGCVIAWNSNNLDSKVGGNYNYLYRLFRKSNLKPFERDISTEIYQAGSTPCNGVEGFNCYFPLQSYGFQPTNGVGYQPYRVVVLSFELLHAPATVCGPKKSTNLVKNKCVNFNFNGLTGTGVLTESNKKFLPFQQFGRDIADTTDAVRDPQTLEILDITPCSFGGVSVITPGTNTSNQVAVLYQDVNCTEVPVAIHADQLTPTWRVYSTGSNVFQTRAGCLIGAEYVNNSYECDIPIGAGICASYQTQTNSPRRARSVASQSIIAYTMSLGAENSVAYSNNSIAIPTNFTISVTTEILPVSMTKTSVDCTMYICGDSTECSNLLLQYGSFCTQLNRALTGIAVEQDKNTQEVFAQVKQIYKTPPIKDFGGFNFSQILPDPSKPSKRSFIEDLLFNKVTLADAGFIKQYGDCLGDIAARDLICAQKFNGLTVLPPLLTDEMIAQYTSALLAGTITSGWTFGAGAALQIPFAMQMAYRFNGIGVTQNVLYENQKLIANQFNSAIGKIQDSLSSTASALGKLQDVVNQNAQALNTLVKCLSSNFGAISSVLNDILSRLDKVEAEVQIDRLITGRLQCLQTYVTQQLIRAAEIRASANLAATKMSECVLGQSKRVDFCGKGYHLMSFPQSAPHGVVFLHVTYVPAQEKNFTTAPAICHDGKAHFPREGVFVSNGTHWFVTQRNFYEPQIITTDNTFVSGNCDVVIGIVNNTVYDPLQPELDSGGGGSDIIKLLNEQVNKEMQSSNLYMSMSSWCYTHSLDGAGLFLFDHAAEEYEHAKKLIIFLNENNVPVQLTSISAPEHKFEGLTQIFQKAYEHEQHISESINNIVDHAIKSKDHATFNFLQWYVAEQHEEEVLFKDILDKIELIGNENHGLYLADQYVKGIAKSRKS

SEQ ID NO: 9343 - protein, 1315 aa, Artificial Sequence
  SARS-CoV-2/England/20102000506/2020__EPI_ISL_415147 spike protein (1-1147)(Q965C_S1003C) Ferritin construct
MFVFLVLLPLVSSQCVNLTTRTQLPPAYTNSFTRGVYYPDKVFRSSVLHSTQDLFLPFFSNVTWFHAIHVSGTNGTKRFDNPVLPFNDGVYFASTEKSNIIRGWIFGTTLDSKTQSLLIVNNATNVVIKVCEFQFCNDPFLGVYYHKNNKSWMESEFRVYSSANNCTFEYVSQPFLMDLEGKQGNFKNLREFVFKNIDGYFKIYSKHTPINLVRDLPQGFSALEPLVDLPIGINITRFQTLLALHRSYLTPGDSSSGWTAGAAAYYVGYLQPRTFLLKYNENGTITDAVDCALDPLSETKCTLKSFTVEKGIYQTSNFRVQPTESIVRFPNITNLCPFGEVFNATRFASVYAWNRKRISNCVADYSVLYNSASFSTFKCYGVSPTKLNDLCFTNVYADSFVIRGDEVRQIAPGQTGKIADYNYKLPDDFTGCVIAWNSNNLDSKVGGNYNYLYRLFRKSNLKPFERDISTEIYQAGSTPCNGVEGFNCYFPLQSYGFQPTNGVGYQPYRVVVLSFELLHAPATVCGPKKSTNLVKNKCVNFNFNGLTGTGVLTESNKKFLPFQQFGRDIADTTDAVRDPQTLEILDITPCSFGGVSVITPGTNTSNQVAVLYQGVNCTEVPVAIHADQLTPTWRVYSTGSNVFQTRAGCLIGAEHVNNSYECDIPIGAGICASYQTQTNSPRRARSVASQSIIAYTMSLGAENSVAYSNNSIAIPTNFTISVTTEILPVSMTKTSVDCTMYICGDSTECSNLLLQYGSFCTQLNRALTGIAVEQDKNTQEVFAQVKQIYKTPPIKDFGGFNFSQILPDPSKPSKRSFIEDLLFNKVTLADAGFIKQYGYCLGDIAARDLICAQKFNGLTVLPPLLTDEMIAQYTSALLAGTITSGWTFGAGAALQIPFAMQMAYRFNGIGVTQNVLYENQKLIANQFNSAIGKIQDSLSSTASALGKLQDVVNQNAQALNTLVKCLSSNFGAISSVLNDILSRLDKVEAEVQIDRLITGRLQCLQTYVTQQLIRAAEIRASANLAATKMSECVLGQSKRVDFCGKGYHLMSFPQSAPHGVVFLHVTYVPAQEKNFTTAPAICHDGKAHFPREGVFVSNGTHWFVTQRNFYEPQIITTDNTFVSGNCDVVIGIVNNTVYDPLQPELDSGGGGSDIIKLLNEQVNKEMQSSNLYMSMSSWCYTHSLDGAGLFLFDHAAEEYEHAKKLIIFLNENNVPVQLTSISAPEHKFEGLTQIFQKAYEHEQHISESINNIVDHAIKSKDHATFNFLQWYVAEQHEEEVLFKDILDKIELIGNENHGLYLADQYVKGIAKSRKS

SEQ ID NO: 9344 - protein, 1315 aa, Artificial Sequence
  SARS-CoV-2/Belgium/VAG-03013/2020__EPI_ISL_415155 spike protein (1-1147)(Q965C_S1003C) Ferritin construct
MFVFLVLLPLVSSQCVNLTTRTQLPPAYTNSFTRGVYYPDKVFRSSVLHSTQDLFLPFFSNVTWFHAIHVSGTNGTKRFDNPVLPFNDGVYFASTEKSNIIRGWIFGTTLDSKTQSLLIVNNATNVVIKVCEFQFCNDPFLGVYYHKNNKSWMESEFRVYSSANNCTFEYVSQPFLMDLEGKQGNFKNLREFVFKNIDGYFKIYSKHTPINLVRDLPQGFSALEPLVDLPIGINITRFQTLLALHRSYLTPGDSSSGWTAGAAAYYVGYLQPRTFLLKYNENGTITDAVDCALDPLSETKCTLKSFTVEKGIYQTSNFRVQPTESIVRFPNITNLCPFGEVFNATRFASVYAWNRKRISNCVADYSVLYNSASFSTFKCYGVSPTKLNDLCFTNVYADSFVIRGDEVRQIAPGQTGKIADYNYKLPDDFTGCVIAWNSNNLDSKVGGNYNYLYRLFRKSNLKPFERDISTEIYQAGSTPCNGVEGFNCYFPLQSYGFQPTNGVGYQPYRVVVLSFELLHAPATVCGPKKSTNLVKNKCVNFNFNGLTGTGVLTESNKKFLPFQQFGRDIADTTDAVRDPQTLEILDITPCSFGGVSVITPGTNTSNQVAVLYQGVNCTEVPVAIHADQLTPTWRVYSTGSNVFQTRAGCLIGAEHVNNSYECDIPIGAGICASYQTQTNSPRRARSVASQSIIAYTMSLGAENSVAYSNNSIAIPTNFTISVTTEILPVSMTKTSVDCTMYICGDSTECSNLLLQYGSFCTQLNRALTGIAVEQDKNTQEVFAQVKQIYKTPPIKDFGGFNFSQILPDPSKPSKRSFIEDLLFNKVTLADAGFIKQYGDCLGDIAARDLICAQKFNGLTVLPPLLTDEMIAQYTSALLAGTITSGWTFGAGAALQIPFAMQMAYRFNGIGVTQNVLYENQKLIANQFNSAIGKIQDSLSSTATALGKLQDVVNQNAQALNTLVKCLSSNFGAISSVLNDILSRLDKVEAEVQIDRLITGRLQCLQTYVTQQLIRAAEIRASANLAATKMSECVLGQSKRVDFCGKGYHLMSFPQSAPHGVVFLHVTYVPAQEKNFTTAPAICHDGKAHFPREGVFVSNGTHWFVTQRNFYEPQIITTDNTFVSGNCDVVIGIVNNTVYDPLQPELDSGGGGSDIIKLLNEQVNKEMQSSNLYMSMSSWCYTHSLDGAGLFLFDHAAEEYEHAKKLIIFLNENNVPVQLTSISAPEHKFEGLTQIFQKAYEHEQHISESINNIVDHAIKSKDHATFNFLQWYVAEQHEEEVLFKDILDKIELIGNENHGLYLADQYVKGIAKSRKS

SEQ ID NO: 9345 - protein, 1315 aa, Artificial Sequence
  SARS-CoV-2/Belgium/BC-03016/2020__EPI_ISL_415157 spike protein (1-1147)(Q965C_S1003C) Ferritin construct
MFVFLVLLPLVSSQCVNLTTRTQLPPAYTNSFTRGVYYPDKVFRSSVLHSTQDLFLPFFSNVTWFHAIHVSGTNGTKRFDNPVLPFNDGVYFASTEKSNIIRGWIFGTTLDSKTQSLLIVNNATNVVIKVCEFQFCNDPFLGVYYHKNNKSWMESEFRVYSSANNCTFEYVSQPFLMDLEGKQGNFKNLREFVFKNIDGYFKIYSKHTPINLVRDLPQGFSALEPLVDLPIGINITRFQTLLALHRSYLTPGDSSSGWTAGAAAYYVGYLQPRTFLLKYNENGTITDAVDCALDPLSETKCTLKSFTVEKGIYQTSNFRVQPTESIVRFPNITNLCPFGEVFNATRFASVYAWNRKRISNCVADYSVLYNSASFSTFKCYGVSPTKLNDLCFTNVYADSFVIRGDEVRQIAPGQTGKIADYNYKLPDDFTGCVIAWNSNNLDSKVGGNYNYLYRLFRKSNLKPFERDISTEIYQAGSTPCNGVEGFNCYFPLQSYGFQPTNGVGYQPYRVVVLSFELLHAPATVCGPKKSTNLVKNKCVNFNFNGLTGTGVLTESNKKFLPFQQFGRDIADTTDAVRDPQTLEILDITPCSFGGVSVITPGTNTSNQVAVLYQGVNCTEVPVAIHADQLTPTWRVYSTGSNVFQTRAGCLIGAEHVNNSYECDIPIGAGICASYQTQTNSPRRARSVASQSIIAYTMSLGAENSVAYSNNSIAIPTNFTISVTTEILPVSMTKTSVDCTMYICGDSTECSNLLLQYGSFCTQLNRALTGIAVEQDKNTQEVFAQVKQIYKTPPIKDFGGFNFSQILPDPSKPSKRSFIEDLLFNKVTLADAGFIKQYGDCLGDIAARDLICAQKFNGLTVLPPLLTDEMIAQYTSALLAGTITSGWTFGAGAALQIPFAMQMAYRFNGIGVTQNVLYENQKLIANQFNSAIGKIQDSLSSTAPALGKLQDVVNQNAQALNTLVKCLSSNFGAISSVLNDILSRLDKVEAEVQIDRLITGRLQCLQTYVTQQLIRAAEIRASANLAATKMSECVLGQSKRVDFCGKGYHLMSFPQSAPHGVVFLHVTYVPAQEKNFTTAPAICHDGKAHFPREGVFVSNGTHWFVTQRNFYEPQIITTDNTFVSGNCDVVIGIVNNTVYDPLQPELDSGGGGSDIIKLLNEQVNKEMQSSNLYMSMSSWCYTHSLDGAGLFLFDHAAEEYEHAKKLIIFLNENNVPVQLTSISAPEHKFEGLTQIFQKAYEHEQHISESINNIVDHAIKSKDHATFNFLQWYVAEQHEEEVLFKDILDKIELIGNENHGLYLADQYVKGIAKSRKS

SEQ ID NO: 9346 - protein, 1315 aa, Artificial Sequence
  SARS-CoV-2/Germany/BavPat3/2020__EPI_ISL_414521 spike protein (1-1147)(Q965C_S1003C) Ferritin construct
MFVFLVLLPLVSSQCVNLTTRTQLPPAYTNSFTRGVYYPDKVFRSSVLHSTQDLFLPFFSNVTWFHAIHVSGTNGTKRFDNPVLPFNDGVYFASTEKSNIIRGWIFGTTLDSKTQSLLIVNNATNVVIKVCEFQFCNDPFLGVYYHKNNKSWMESEFRVYSSANNCTFEYVSQPFLMDLEGKQGNFKNLREFVFKNIDGYFKIYSKHTPINLVRDLPQGFSALEPLVDLPIGINITRFQTLLALHRSYLTPGDSSSGWTAGAAAYYVGYLQPRTFLLKYNENGTITDAVDCALDPLSETKCTLKSFTVEKGIYQTSNFRVQPTESIVRFPNITNLCPFGEVFNATRFASVYAWNRKRISNCVADYSVLYNSASFSTFKCYGVSPTKLNDLCFTNVYADSFVIRGDEVRQIAPGQTGKIADYNYKLPDDFTGCVIAWNSNNLDSKVGGNYNYLYRLFRKSNLKPFERDISTEIYQAGSTPCNGVEGFNCYFPLQSYGFQPTNGVGYQPYRVVVLSFELLHAPATVCGPKKSTNLVKNKCVNFNFNGLTGTGVLTESNKKFLPFQQFGRDIADTTDAVRDPQTLEILDITPCSFGGVSVITPGTNTSNQVAVLYQDVNCTEVPVAIHADQLTPTWRVYSTGSNVFQTRAGCLIGAEHVNNSYECDIPIGAGICASYQTQTNSPRRARSVASQSIIAYTMSLGAENSVAYSNNSIAIPTNFTISVTTEILPVSMTKTSVDCTMYICGDSTECSNLLLQYGSFCTQLNRALTGIAVEQDKNTQQVFAQVKQIYKTPPIKDFGGFNFSQILPDPSKPSKRSFIEDLLFNKVTLADAGFIKQYGDCLGDIAARDLICAQKFNGLTVLPPLLTDEMIAQYTSALLAGTITSGWTFGAGAALQIPFAMQMAYRFNGIGVTQNVLYENQKLIANQFNSAIGKIQDSLSSTASALGKLQDVVNQNAQALNTLVKCLSSNFGAISSVLNDILSRLDKVEAEVQIDRLITGRLQCLQTYVTQQLIRAAEIRASANLAATKMSECVLGQSKRVDFCGKGYHLMSFPQSAPHGVVFLHVTYVPAQEKNFTTAPAICHDGKAHFPREGVFVSNGTHWFVTQRNFYEPQIITTDNTFVSGNCDVVIGIVNNTVYDPLQPELDSGGGGSDIIKLLNEQVNKEMQSSNLYMSMSSWCYTHSLDGAGLFLFDHAAEEYEHAKKLIIFLNENNVPVQLTSISAPEHKFEGLTQIFQKAYEHEQHISESINNIVDHAIKSKDHATFNFLQWYVAEQHEEEVLFKDILDKIELIGNENHGLYLADQYVKGIAKSRKS

SEQ ID NO: 9347 - protein, 1315 aa, Artificial Sequence
  SARS-CoV-2/France/HF1805/2020__EPI_ISL_414628 spike protein (1-1147)(Q965C_S1003C) Ferritin construct
MFVFLVLLPLVSSQCVNLTTRTQLPPAYTNSFTRGVYYPDKVFRSSVLHSTQDLFLPFFSNVTWFHAIHVSGTNGTKRFDNPVLPFNDGVYFASTEKSNIIRGWIFGTTLDSKTQSLLIVNNATNVVIKVCEFQFCNDPFLGVYYHKNNKSWMESEFRVYSSANNCTFEYVSQPFLMDLEGKQGNFKNLREFVFKNIDGYFKIYSKHTPINLVRDLPQGFSALEPLVDLPIGINITRFQTLLALHRSYLTPGDSSSGWTAGAAAYYVGYLQPRTFLLKYNENGTITDAVDCALDPLSETKCTLKSFTVEKGIYQTSNFRVQPTESIVRFPNITNLCPFGEVFNATRFASVYAWNRKRISNCVADYSVLYNSASFSTFKCYGVSPTKLNDLCFTNVYADSFVIRGDEVRQIAPGQTGKIADYNYKLPDDFTGCVIAWNSNNLDSKVGGNYNYLYRLFRKSNLKPFERDISTEIYQAGSTPCNGVEGFNCYFPLQSYGFQPTNGVGYQPYRVVVLSFELLHAPATVCGPKKSTNLVKNKCVNFNFNGLTGTGVLTESNKKFLPFQQFGRDIADTTDAVRDPQTLEILDITPCSFGGVSVITPGTNTSNQVAVLYQGVNCTEVPVAIHADQLTPTWRVYSTGSNVFQTRAGCLIGAEHVNNSYECDIPIGAGICASYQTQTNSPRRARSVASQSIIAYTMSLGAENSVAYSNNSIAIPTNFTISVTTEILPVSMTKTSVDCTMYICGDSTECSNLLLQYGSFCTQLNRALTGIAVEQDKNTQEVFAQVKQIYKTPPIKDFGGFNFSQILPDPSKPSKRSFIEDLLFNKVTLADAGFIKQYGDCLGDIAARDLICAQKFNGLTVLPPLLTDEMIAQYTSALLAGTITSGWTFGAGAALQIPFAMQMAYRFNGIGVTQNVLYENQKLIANQFNSAIGKIQDSLSSTASALGKLQDVVNQNAQALNTLVKCLSSNFGAISSVLNDILSRLDKVEAEVQIDRLITGRLQCLQTYVTQQLIRAAEIRASANLAATKMSECVLGQSKRVDFCGKGYHLMSFPQSAPHGVVFLHVTYVPAQEKNFTTAPAICHDGKAHFPREGVFVSNGTHWFVTQRNFYEPQIITTDNTFVSGNCDVVIGVVNNTVYDPLQPELDSGGGGSDIIKLLNEQVNKEMQSSNLYMSMSSWCYTHSLDGAGLFLFDHAAEEYEHAKKLIIFLNENNVPVQLTSISAPEHKFEGLTQIFQKAYEHEQHISESINNIVDHAIKSKDHATFNFLQWYVAEQHEEEVLFKDILDKIELIGNENHGLYLADQYVKGIAKSRKS

SEQ ID NO: 9348 - protein, 1315 aa, Artificial Sequence
  SARS-CoV-2/Netherlands/ZuidHolland_9/2020__EPI_ISL_414445 spike protein (1-1147)(Q965C_S1003C) Ferritin construct
MFVFLVLLPLVSSQCVNLTTRTQLPPAYTNSFTRGVYYPDKVFRSSVLHSTQDLFLPFFSNVTWFHAIHVSGTNGTKRFDNPVLPFNDGVYFASTEKSNIIRGWIFGTTLDSKTQSLLIVNNATNVVIKVCEFQFCNDPFLGVYYHKNNKSWMESEFRVYSSANNCTFEYVSQPFLMDLEGKQGNFKNLREFVFKNIDGYFKIYSKHTPINLVRDLPQGFSALEPLVDLPIGINITRFQTLLALHRSYLTPGDSSSGWTAGAAAYYVGYLQPRTFLLKYNENGTITDAVDCALDPLSETKCTLKSFTVEKGIYQTSNFRVQPTESIVRFPNITNLCPFGEVFNATRFASVYAWNRKRISNCVADYSVLYNSASFSTFKCYGVSPTKLNDLCFTNVYADSFVIRGDEVRQIAPGQTGKIADYNYKLPDDFTGCVIAWNSNNLDSKVGGNYNYLYRLFRKSNLKPFERDISTEIYQAGSTPCNGVEGFNCYFPLQSYGFQPTNGVGYQPYRVVVLSFELLHAPATVCGPKKSTNLVKNKCVNFNFNGLTGTGVLTESNKKFLPFQQFGRDIADTTDAVRDPQTLEILDITPCSFGGVSVITPGTNTSNQVAVLYQGVNCTEVPVAIHADQLTPTWRVYSTGSNVFQTRAGCLIGAEHVNNSYECDIPIGAGICASYQTQTNSPRRARSVASQSIIAYTMSLGAENSVAYSNNSIAIPTNFTISVTTEILPVSMTKTSVDCTMYICGDSTECSNLLLQYGSFCTQLNRALTGIAVEQDKNTQEVFAQVKQIYKTPPIKDFGGFNFSQILPDPSKPSKRSFIEDLLFNKVTLADAGFIKQYGDCLGDIAARDLICVQKFNGLTVLPPLLTDEMIAQYTSALLAGTITSGWTFGAGAALQIPFAMQMAYRFNGIGVTQNVLYENQKLIANQFNSAIGKIQDSLSSTASALGKLQDVVNQNAQALNTLVKCLSSNFGAISSVLNDILSRLDKVEAEVQIDRLITGRLQCLQTYVTQQLIRAAEIRASANLAATKMSECVLGQSKRVDFCGKGYHLMSFPQSAPHGVVFLHVTYVPAQEKNFTTAPAICHDGKAHFPREGVFVSNGTHWFVTQRNFYEPQIITTDNTFVSGNCDVVIGIVNNTVYDPLQPELDSGGGGSDIIKLLNEQVNKEMQSSNLYMSMSSWCYTHSLDGAGLFLFDHAAEEYEHAKKLIIFLNENNVPVQLTSISAPEHKFEGLTQIFQKAYEHEQHISESINNIVDHAIKSKDHATFNFLQWYVAEQHEEEVLFKDILDKIELIGNENHGLYLADQYVKGIAKSRKS

SEQ ID NO: 9349 - protein, 1315 aa, Artificial Sequence
  SARS-CoV-2/Finland/FIN03032020A/2020__EPI_ISL_413602 spike protein (1-1147)(Q965C_S1003C) Ferritin construct
MFVFLVLLPLVSSQCVNLTTRTQLPPAYTNSFTRGVYYPDKVFRSSVLHSTQDLFLPFFSNVTWFHAIHVSGTNGTKRFDNPVLPFNDGVYFASTEKSNIIRGWIFGTTLDSKTQSLLIVNNATNVVIKVCEFQFCNDPFLGVYYHKNNKSWMESEFRVYSSANNCTFEYVSQPFLMDLEGKQGNFKNLREFVFKNIDGYFKIYSKHTPINLVRDLPQGFSALEPLVDLPIGINITRFQTLLALHRSYLTPGDSSSGWTAGAAAYYVGYLQPRTFLLKYNENGTITDAVDCALDPLSETKCTLKSFTVEKGIYQTSNFRVQPTESIVRFPNITNLCPFGEVFNATRFASVYAWNRKRISNCVADYSVLYNSASFSTFKCYGVSPTKLNDLCFTNVYADSFVIRGDEVRQIAPGQTGKIADYNYKLPDDFTGCVISWNSNNLDSKVGGNYNYLYRLFRKSNLKPFERDISTEIYQAGSTPCNGVEGFNCYFPLQSYGFQPTNGVGYQPYRVVVLSFELLHAPATVCGPKKSTNLVKNKCVNFNFNGLTGTGVLTESNKKFLPFQQFGRDIADTTDAVRDPQTLEILDITPCSFGGVSVITPGTNTSNQVAVLYQGVNCTEVPVAIHADQLTPTWRVYSTGSNVFQTRAGCLIGAEHVNNSYECDIPIGAGICASYQTQTNSPRRARSVASQSIIAYTMSLGAENSVAYSNNSIAIPTNFTISVTTEILPVSMTKTSVDCTMYICGDSTECSNLLLQYGSFCTQLNRALTGIAVEQDKNTQEVFAQVKQIYKTPPIKDFGGFNFSQILPDPSKPSKRSFIEDLLFNKVTLADAGFIKQYGDCLGDIAARDLICAQKFNGLTVLPPLLTDEMIAQYTSALLAGTITSGWTFGAGAALQIPFAMQMAYRFNGIGVTQNVLYENQKLIANQFNSAIGKIQDSLSSTASALGKLQDVVNQNAQALNTLVKCLSSNFGAISSVLNDILSRLDKVEAEVQIDRLITGRLQCLQTYVTQQLIRAAEIRASANLAATKMSECVLGQSKRVDFCGKGYHLMSFPQSAPHGVVFLHVTYVPAQEKNFTTAPAICHDGKAHFPREGVFVSNGTHWFVTQRNFYEPQIITTDNTFVSGNCDVVIGIVNNTVYDPLQPELDSGGGGSDIIKLLNEQVNKEMQSSNLYMSMSSWCYTHSLDGAGLFLFDHAAEEYEHAKKLIIFLNENNVPVQLTSISAPEHKFEGLTQIFQKAYEHEQHISESINNIVDHAIKSKDHATFNFLQWYVAEQHEEEVLFKDILDKIELIGNENHGLYLADQYVKGIAKSRKS

SEQ ID NO: 9350 - protein, 1315 aa, Artificial Sequence
  SARS-CoV-2/France/GE1977/2020__EPI_ISL_414632 spike protein (1-1147)(Q965C_S1003C) Ferritin construct
MFVFLVLLPLVSSQCVNLTTRTQLPPAYTNSFTRGVYYPDKVFRSSVLHSTQDLFLPFFSNVTWFHAIHVSGTNGTKRFDNPVLPFNDGVYFASTEKSNIIRGWIFGTTLDSKTQSLLIVNNATNVVIKVCEFQFCNDPFLGVYYHKNNKSWMESEFRVYSSANNCTFEYVSQPFLMDLEGKQGNFKNLREFVFKNIDGYFKIYSKHTPINLVRDLPQGFSALEPLVDLPIGINITRFQTLLALHRSYLTPGDSSSGWTAGAAAYYVGYLQPRTFLLKYNENGTITDAVDCALDPLSETKCTLKSFTVEKGIYQTSNFRVQPTESIVRFPNITNLCPFGEVFNATRFASVYAWNRKRISNCVADYSVLYNSASFSTFKCYGVSPTKLNDLCFTNVYADSFVIRGDEVRQIAPGQTGKIADYNYKLPDDFTGCVIAWNSNNLDSKVGGNYNYLYRLFRKSNLKPFERDISTEIYQAGSTPCNGVEGFNCYFPLQSYGFQPTNGVGYQPYRVVVLSFELLHAPATVCGPKKSTNLVKNKCVNFNFNGLTGTGVLTESNKKFLPFQQFGRDIADTTDAVRDPQTLEILDITPCSFGGVSVITPGTNTSNQVAVLYQGVNCTEVPVAIHADQLTPTWRVYSTGSNVFQTRAGCLIGAEHVNNSYECDIPIGAGICASYQTQTNSPRRARSVASQSIIAYTMSLGAENSVAYSNNSIAIPTNFTISVTTEILPVSMTKTSVDCTMYICGDSTECSNLLLQYGSFCTQLNRALTGIAVEQDKNTQEVFAQVKQIYKTPPIKDFGGFNFSQILPDPSKPSKRSFIEDLLFNKVTLADAGFIKQYGDCLGDIAARDLICAQKFNGLTVLPPLLTDEMIAQYTSALLAGTITSGWTFGAGAALQIPFAMQMAYRFNGIGVTQNVLYENQKLIANQFNSAIGKIQDSLFSTASALGKLQDVVNQNAQALNTLVKCLSSNFGAISSVLNDILSRLDKVEAEVQIDRLITGRLQCLQTYVTQQLIRAAEIRASANLAATKMSECVLGQSKRVDFCGKGYHLMSFPQSAPHGVVFLHVTYVPAQEKNFTTAPAICHDGKAHFPREGVFVSNGTHWFVTQRNFYEPQIITTDNTFVSGNCDVVIGIVNNTVYDPLQPELDSGGGGSDIIKLLNEQVNKEMQSSNLYMSMSSWCYTHSLDGAGLFLFDHAAEEYEHAKKLIIFLNENNVPVQLTSISAPEHKFEGLTQIFQKAYEHEQHISESINNIVDHAIKSKDHATFNFLQWYVAEQHEEEVLFKDILDKIELIGNENHGLYLADQYVKGIAKSRKS

SEQ ID NO: 9351 - protein, 1315 aa, Artificial Sequence
  SARS-CoV-2/Finland/FIN-313/2020__EPI_ISL_414641 spike protein (1-1147)(Q965C_S1003C) Ferritin construct
MFVFLVLLPLVSSQCVNLTTRTQLPPAYTNSFTRGVYYPDKVFRSSVLHSTQDLFLPFFSNVTWFHAIHVSGTNGTKRFDNPVLPFNDGVYFASTEKSNIIRGWIFGTTLDSKTQSLLIVNNATNVVIKVCEFQFCNDPFLGVYYHKNNKSWMESEFRVYSSANNCTFEYVSQPFLMDLEGKQGNFKNLREFVFKNIDGYFKIYSKHTPINLVRDLPQGFSALEPLVDLPIGINITRFKTLLALHRSYLTPGDSSSGWTAGAAAYYVGYLQPRTFLLKYNENGTITDAVDCALDPLSETKCTLKSFTVEKGIYQTSNFRVQPTESIVRFPNITNLCPFGEVFNATRFASVYAWNRKRISNCVADYSVLYNSASFSTFKCYGVSPTKLNDLCFTNVYADSFVIRGDEVRQIAPGQTGKIADYNYKLPDDFTGCVIAWNSNNLDSKVGGNYNYLYRLFRKSNLKPFERDISTEIYQAGSTPCNGVEGFNCYFPLQSYGFQPTNGVGYQPYRVVVLSFELLHAPATVCGPKKSTNLVKNKCVNFNFNGLTGTGVLTESNKKFLPFQQFGRDIADTTDAVRDPQTLEILDITPCSFGGVSVITPGTNTSNQVAVLYQGVNCTEVPVAIHADQLTPTWRVYSTGSNVFQTRAGCLIGAEHVNNSYECDIPIGAGICASYQTQTNSPRRARSVASQSIIAYTMSLGAENSVAYSNNSIAIPTNFTISVTTEILPVSMTKTSVDCTMYICGDSTECSNLLLQYGSFCTQLNRALTGIAVEQDKNTQEVFAQVKQIYKTPPIKDFGGFNFSQILPDPSKPSKRSFIEDLLFNKVTLADAGFIKQYGDCLGDIAARDLICAQKFNGLTVLPPLLTDEMIAQYTSALLAGTITSGWTFGAGAALQIPFAMQMAYRFNGIGVTQNVLYENQKLIANQFNSAIGKIQDSLSSTASALGKLQDVVNQNAQALNTLVKCLSSNFGAISSVLNDILSRLDKVEAEVQIDRLITGRLQCLQTYVTQQLIRAAEIRASANLAATKMSECVLGQSKRVDFCGKGYHLMSFPQSAPHGVVFLHVTYVPAQEKNFTTAPAICHDGKAHFPREGVFVSNGTHWFVTQRNFYEPQIITTDNTFVSGNCDVVIGIVNNTVYDPLQPELDSGGGGSDIIKLLNEQVNKEMQSSNLYMSMSSWCYTHSLDGAGLFLFDHAAEEYEHAKKLIIFLNENNVPVQLTSISAPEHKFEGLTQIFQKAYEHEQHISESINNIVDHAIKSKDHATFNFLQWYVAEQHEEEVLFKDILDKIELIGNENHGLYLADQYVKGIAKSRKS

SEQ ID NO: 9352 - protein, 1315 aa, Artificial Sequence
  SARS-CoV-2/Netherlands/ZuidHolland_2/2020__EPI_ISL_414556 spike protein (1-1147)(Q965C_S1003C) Ferritin construct
MFVFLVLLPLVSSQCVNLTTRTQLPPAYTNSFTRGVYYPDKVFRSSVLHSTQDLFLPFFSNVTWFHAIHVSGTNGTKRFDNPVLPFNDGVYFASTEKSNIIRGWIFGTTLDSKTQSLLIVNNATNVVIKVCEFQFCNDPFLGVYYHKNNKSWMESEFRVYSSANNCTFEYVSQPFLMDLEGKQGNFKNLREFVFKNIDGYFKIYSKHTPINLVRDLPQGFSALEPLVDLPIGINITRFQTLLALHRSYLTPGDSSSGWTAGAAAYYVGYLQPRTFLLKYNENGTITDAVDCALDPLSETKCTLKSFTVEKGIYQTSNFRVQPTESIVRFPNITNLCPFGEVFNATRFASVYAWNRKRISNCVADYSVLYNSASFSTFKCYGVSPTKLNDLCFTNVYADSFVIRGDEVRQIAPGQTGKIADYNYKLPDDFTGCVIAWNSNNLDSKVGGNYNYLYRLFRKSNLKPFERDISTEIYQAGSTPCNGVEGFNCYFPLQSYGFQPTNGVGYQPYRVVVLSFELLHAPATVCGPKKSTNLVKNKCVNFNFNGLTGTGVLTESNKKFLPFQQFGRDIADTTDAVRDPQTLEILDITPCSFGGVSVITPGTNTSNQVAVLYQGVNCTEVPVAIHADQLTPTWRVYSTGSNVFQTRAGCLIGAEHVNNSYECDIPIGAGICASYQTQTNSPRRARSVASQSIIAYTMSLGAENSVAYSNNSIAIPTNFTISVTTEILPVSMTKTSVDCTMYICGDSTECSNLLLQYGSFCTQLNRALTGIALEQDKNTQEVFAQVKQIYKTPPIKDFGGFNFSQILPDPSKPSKRSFIEDLLFNKVTLADAGFIKQYGDCLGDIAARDLICAQKFNGLTVLPPLLTDEMIAQYTSALLAGTITSGWTFGAGAALQIPFAMQMAYRFNGIGVTQNVLYENQKLIANQFNSAIGKIQDSLSSTASALGKLQDVVNQNAQALNTLVKCLSSNFGAISSVLNDILSRLDKVEAEVQIDRLITGRLQCLQTYVTQQLIRAAEIRASANLAATKMSECVLGQSKRVDFCGKGYHLMSFPQSAPHGVVFLHVTYVPAQEKNFTTAPAICHDGKAHFPREGVFVSNGTHWFVTQRNFYEPQIITTDNTFVSGNCDVVIGIVNNTVYDPLQPELDSGGGGSDIIKLLNEQVNKEMQSSNLYMSMSSWCYTHSLDGAGLFLFDHAAEEYEHAKKLIIFLNENNVPVQLTSISAPEHKFEGLTQIFQKAYEHEQHISESINNIVDHAIKSKDHATFNFLQWYVAEQHEEEVLFKDILDKIELIGNENHGLYLADQYVKGIAKSRKS

SEQ ID NO: 9353 - protein, 1315 aa, Artificial Sequence
  SARS-CoV-2/USA/WA-UW31/2020__EPI_ISL_414618 spike protein (1-1147)(Q965C_S1003C) Ferritin construct
MFVFLVLLPLVSSQCVNLTTRTQLPPAYTNSFTRGVYYPDKVFRSSVLHSTQDLFLPFFSNVTWFHAIHVSGTNGTKRFDNPVLPFNDGVYFASTEKSNIIRGWIFGTTLDSKTQSLLIVNNATNVVIKVCEFQFCNDPFLGVYYHKNNKSWMESEFRVYSSANNCTFEYVSQPFLMDLEGKQGNFKNLREFVFKNIDGYFKIYSKHTPINLVRDLPQGFSALEPLVDLPIGINITRFQTLLALHRSYLTPGDSSSGWTAGAAAYYVGYLQPRTFLLKYNENGTITDAVDCALDPLSETKCTLKSFTVEKGIYQTSNFRVQPTESIVRFPNITNLCPFGEVFNATRFASVYAWNRKRISNCVADYSVLYNSASFSTFKCYGVSPTKLNDLCFTNVYADSFVIRGDEVRQIAPGQTGKIADYNYKLPDDFTGCVIAWNSNNLDSKVGGNYNYLYRLFRKSNLKPFERDISTEIYQAGSTPCNGAEGFNCYFPLQSYGFQPTNGVGYQPYRVVVLSFELLHAPATVCGPKKSTNLVKNKCVNFNFNGLTGTGVLTESNKKFLPFQQFGRDIADTTDAVRDPQTLEILDITPCSFGGVSVITPGTNTSNQVAVLYQDVNCTEVPVAIHADQLTPTWRVYSTGSNVFQTRAGCLIGAEHVNNSYECDIPIGAGICASYQTQTNSPRRARSVASQSIIAYTMSLGAENSVAYSNNSIAIPTNFTISVTTEILPVSMTKTSVDCTMYICGDSTECSNLLLQYGSFCTQLNRALTGIAVEQDKNTQEVFAQVKQIYKTPPIKDFGGFNFSQILPDPSKPSKRSFIEDLLFNKVTLADAGFIKQYGDCLGDIAARDLICAQKFNGLTVLPPLLTDEMIAQYTSALLAGTITSGWTFGAGAALQIPFAMQMAYRFNGIGVTQNVLYENQKLIANQFNSAIGKIQDSLSSTASALGKLQDVVNQNAQALNTLVKCLSSNFGAISSVLNDILSRLDKVEAEVQIDRLITGRLQCLQTYVTQQLIRAAEIRASANLAATKMSECVLGQSKRVDFCGKGYHLMSFPQSAPHGVVFLHVTYVPAQEKNFTTAPAICHDGKAHFPREGVFVSNGTHWFVTQRNFYEPQIITTDNTFVSGNCDVVIGIVNNTVYDPLQPELDSGGGGSDIIKLLNEQVNKEMQSSNLYMSMSSWCYTHSLDGAGLFLFDHAAEEYEHAKKLIIFLNENNVPVQLTSISAPEHKFEGLTQIFQKAYEHEQHISESINNIVDHAIKSKDHATFNFLQWYVAEQHEEEVLFKDILDKIELIGNENHGLYLADQYVKGIAKSRKS

SEQ ID NO: 9354 - protein, 1315 aa, Artificial Sequence
  SARS-CoV-2/South Korea/SNU01/2020__EPI_ISL_411929 spike protein (1-1147)(Q965C_S1003C) Ferritin construct
MFVFLVLLPLVSSQCVNLTTRTQLPPAYTNSFTRGVYYPDKVFRSSVLHSTQDLFLPFFSNVTWFHAIHVSGTNGTKRFDNPVLPFNDGVYFASTEKSNIIRGWIFGTTLDSKTQSLLIVNNATNVVIKVCEFQFCNDPFLGVYYHKNNKSWMESEFRVYSSANNCTFEYVSQPFLMDLEGKQGNFKNLREFVFKNIDGYFKIYSKHTPINLVRDLPQGFWALEPLVDLPIGINITRFQTLLALHRSYLTPGDSSSGWTAGAAAYYVGYLQPRTFLLKYNENGTITDAVDCALDPLSETKCTLKSFTVEKGIYQTSNFRVQPTESIVRFPNITNLCPFGEVFNATRFASVYAWNRKRISNCVADYSVLYNSASFSTFKCYGVSPTKLNDLCFTNVYADSFVIRGDEVRQIAPGQTGKIADYNYKLPDDFTGCVIAWNSNNLDSKVGGNYNYLYRLFRKSNLKPFERDISTEIYQAGSTPCNGVEGFNCYFPLQSYGFQPTNGVGYQPYRVVVLSFELLHAPATVCGPKKSTNLVKNKCVNFNFNGLTGTGVLTESNKKFLPFQQFGRDIADTTDAVRDPQTLEILDITPCSFGGVSVITPGTNTSNQVAVLYQDVNCTEVPVAIHADQLTPTWRVYSTGSNVFQTRAGCLIGAEHVNNSYECDIPIGAGICASYQTQTNSPRRARSVASQSIIAYTMSLGAENSVAYSNNSIAIPTNFTISVTTEILPVSMTKTSVDCTMYICGDSTECSNLLLQYGSFCTQLNRALTGIAVEQDKNTQEVFAQVKQIYKTPPIKDFGGFNFSQILPDPSKPSKRSFIEDLLFNKVTLADAGFIKQYGDCLGDIAARDLICAQKFNGLTVLPPLLTDEMIAQYTSALLAGTITSGWTFGAGAALQIPFAMQMAYRFNGIGVTQNVLYENQKLIANQFNSAIGKIQDSLSSTASALGKLQDVVNQNAQALNTLVKCLSSNFGAISSVLNDILSRLDKVEAEVQIDRLITGRLQCLQTYVTQQLIRAAEIRASANLAATKMSECVLGQSKRVDFCGKGYHLMSFPQSAPHGVVFLHVTYVPAQEKNFTTAPAICHDGKAHFPREGVFVSNGTHWFVTQRNFYEPQIITTDNTFVSGNCDVVIGIVNNTVYDPLQPELDSGGGGSDIIKLLNEQVNKEMQSSNLYMSMSSWCYTHSLDGAGLFLFDHAAEEYEHAKKLIIFLNENNVPVQLTSISAPEHKFEGLTQIFQKAYEHEQHISESINNIVDHAIKSKDHATFNFLQWYVAEQHEEEVLFKDILDKIELIGNENHGLYLADQYVKGIAKSRKS

SEQ ID NO: 9355 - protein, 1315 aa, Artificial Sequence
  SARS-CoV-2/China/WF0004/2020__EPI_ISL_413694 spike protein (1-1147)(Q965C_S1003C) Ferritin construct
MFVFLVLLPLVSSQCVNLTTRTQLPPAYTNSFTRGVYYPDKVFRSSVLHSTQDLFLPFFSNVTWFHAIHVSGTNGTKRFDNPVLPFNDGVYFASTEKSNIIRGWIFGTTLDSKTQSLLIVNNATNVVIKVCEFQFCNDPFLGVYYHKNNKSWTESEFRVYSSANNCTFEYVSQPFLMDLEGKQGNFKNLREFVFKNIDGYFKIYSKHTPINLVRDLPQGFSALEPLVDLPIGINITRFQTLLALHRSYLTPGDSSSGWTAGAAAYYVGYLQPRTFLLKYNENGTITDAVDCALDPLSETKCTLKSFTVEKGIYQTSNFRVQPTESIVRFPNITNLCPFGEVFNATRFASVYAWNRKRISNCVADYSVLYNSASFSTFKCYGVSPTKLNDLCFTNVYADSFVIRGDEVRQIAPGQTGKIADYNYKLPDDFTGCVIAWNSNNLDSKVGGNYNYLYRLFRKSNLKPFERDISTEIYQAGSTPCNGVEGFNCYFPLQSYGFQPTNGVGYQPYRVVVLSFELLHAPATVCGPKKSTNLVKNKCVNFNFNGLTGTGVLTESNKKFLPFQQFGRDIADTTDAVRDPQTLEILDITPCSFGGVSVITPGTNTSNQVAVLYQDVNCTEVPVAIHADQLTPTWRVYSTGSNVFQTRAGCLIGAEHVNNSYECDIPIGAGICASYQTQTNSPRRARSVASQSIIAYTMSLGAENSVAYSNNSIAIPTNFTISVTTEILPVSMTKTSVDCTMYICGDSTECSNLLLQYGSFCTQLNRALTGIAVEQDKNTQEVFAQVKQIYKTPPIKDFGGFNFSQILPDPSKPSKRSFIEDLLFNKVTLADAGFIKQYGDCLGDIAARDLICAQKFNGLTVLPPLLTDEMIAQYTSALLAGTITSGWTFGAGAALQIPFAMQMAYRFNGIGVTQNVLYENQKLIANQFNSAIGKIQDSLSSTASALGKLQDVVNQNAQALNTLVKCLSSNFGAISSVLNDILSRLDKVEAEVQIDRLITGRLQCLQTYVTQQLIRAAEIRASANLAATKMSECVLGQSKRFDFCGKGYHLMSFPQSAPHGVVFLHVTYVPAQEKNFTTAPAICHDGKAHFPREGVFVSNGTHWFVTQRNFYEPQIITTDNTFVSGNCDVVIGIVNNTVYDPLQPELDSGGGGSDIIKLLNEQVNKEMQSSNLYMSMSSWCYTHSLDGAGLFLFDHAAEEYEHAKKLIIFLNENNVPVQLTSISAPEHKFEGLTQIFQKAYEHEQHISESINNIVDHAIKSKDHATFNFLQWYVAEQHEEEVLFKDILDKIELIGNENHGLYLADQYVKGIAKSRKS

SEQ ID NO: 9356 - protein, 1315 aa, Artificial Sequence
  SARS-CoV-2/China/WF0028/2020__EPI_ISL_413791 spike protein (1-1147)(Q965C_S1003C) Ferritin construct
MFVFLVLLPLVSSQCVNLTTRTQLPPAYTNSFTRGVYYPDKVFRSSVLHSTQDLFLPFFSNVTWFHAIHVSGTNGTKRFDNPVLPFNDGVYFASTEKSNIIRGWIFGTTLDSKTQSLLIVNNATNVVIKVCEFQFCNDPFLGVYYHKNNKSWMESEFRVYSSANNCTFEYVSQPFLMDLEGKQGNFKNLREFVFKNIDGYFKIYSKHTPINLVRDLPQGFSALEPLVDLPIGINITRFQTLLALHRSYLTPGDSSSGWTAGAAAYYVGYLQPRTFLLKYNENGTITDAVDCALDPLSETKCTLKSFTVEKGIYQTSNFRVQPTESIVRFPNITNLCPFGEVFNATRFASVYAWNRKRISNCVADYSVLYNSASFSTFKCYGVSPTKLNDLCFTNVYADSFVIRGDEVRQIAPGQTGKIADYNYKLPDDFTGCVIAWNSNNLDSKVGGNYNYLYRLFRKSNLKPFERDISTEIYQAGSTPCNGVEGFNCYFPLQSYGFQPTNGVGYQPYRVVVLSFELLHAPATVCGPKKSTNLVKNKCVNFNFNGLTGTGVLTESNKKFLPFQQFGRDIADTTDAVRDPQTLEILDITPCSFGGVSVITPGTNTSNQVAVLYQDVNCTEVPVAIHADQLTPTWRVYSTGSNVFQTRAGCLIGAEHVNNSYECDIPIGAGICASYQTQTNSPRRARSVASQSIIAYTMSLGAENSVAYSNNSIAIPTNFTISVTTEILPVSMTKTSVDCTMYICGDSTECSNLLLQYGSFCTQLNRALTGIAVEQDKNTQEVFAQVKQIYKTPPIKDFGGFNFSQILPDPSKPSKRSFIEDLLFNKVTLADAGFIKQYGDCLGDIAARDLICAQKFNGLTVLPPLLTDEMIAQYTSALLAGTITSGWTFGAGAALQIPFAMQMAYRFNGIGVTQNVLYENQKLIANQFNSAIGKIQDSLSSTASALGKLQDVVNQNAQALNTLVKCLSSNFGAISSVLNDILSRLDKVEAEVQIDRLITGRLQCLQTYVTQQLIRAAEIRASANLAATKMSECVLGQSKRVDFCGKGYHLMSFPQSAPHGVVFLHVTYVPAQEKNFTTAPAICHDGKAHFPREGVFVSNGTHWFVTQRNFYEPQIITTDNTFVSGNCDVVIGIVNNTVYDPLQPELESGGGGSDIIKLLNEQVNKEMQSSNLYMSMSSWCYTHSLDGAGLFLFDHAAEEYEHAKKLIIFLNENNVPVQLTSISAPEHKFEGLTQIFQKAYEHEQHISESINNIVDHAIKSKDHATFNFLQWYVAEQHEEEVLFKDILDKIELIGNENHGLYLADQYVKGIAKSRKS

SEQ ID NO: 9357 - protein, 1315 aa, Artificial Sequence
  SARS-CoV-2/2019-nCoV/USA-CruiseA-18/2020__MT159716.1 spike protein (1-1147)(Q965C_S1003C) Ferritin construct
MFVFLVLLPLVSSQCVNLTTRTQLPPAYTNSFTRGVYYPDKVFRSSVLHSTQDLFLPFFSNVTWFHAIHVSGTNGTKRFDNPVLPFNDGVYFASTEKSNIIRGWIFGTTLDSKTQSLLIVNNATNVVIKVCEFQFCNDPFLGVYYHKNNKSWMESELRVYSSANNCTFEYVSQPFLMDLEGKQGNFKNLREFVFKNIDGYFKIYSKHTPINLVRDLPQGFSALEPLVDLPIGINITRFQTLLALHRSYLTPGDSSSGWTAGAAAYYVGYLQPRTFLLKYNENGTITDAVDCALDPLSETKCTLKSFTVEKGIYQTSNFRVQPTESIVRFPNITNLCPFGEVFNATRFASVYAWNRKRISNCVADYSVLYNSASFSTFKCYGVSPTKLNDLCFTNVYADSFVIRGDEVRQIAPGQTGKIADYNYKLPDDFTGCVIAWNSNNLDSKVGGNYNYLYRLFRKSNLKPFERDISTEIYQAGSTPCNGVEGFNCYFPLQSYGFQPTNGVGYQPYRVVVLSFELLHAPATVCGPKKSTNLVKNKCVNFNFNGLTGTGVLTESNKKFLPFQQFGRDIADTTDAVRDPQTLEILDITPCSFGGVSVITPGTNTSNQVAVLYQDVNCTEVPVAIHADQLTPTWRVYSTGSNVFQTRAGCLIGAEHVNNSYECDIPIGAGICASYQTQTNSPRRARSVASQSIIAYTMSLGAENSVAYSNNSIAIPTNFTISVTTEILPVSMTKTSVDCTMYICGDSTECSNLLLQYGSFCTQLNRALTGIAVEQDKNTQEVFAQVKQIYKTPPIKDFGGFNFSQILPDPSKPSKRSFIEDLLFNKVTLADAGFIKQYGDCLGDIAARDLICAQKFNGLTVLPPLLTDEMIAQYTSALLAGTITSGWTFGAGAALQIPFAMQMAYRFNGIGVTQNVLYENQKLIANQFNSAIGKIQDSLSSTASALGKLQDVVNQNAQALNTLVKCLSSNFGAISSVLNDILSRLDKVEAEVQIDRLITGRLQCLQTYVTQQLIRAAEIRASANLAATKMSECVLGQSKRVDFCGKGYHLMSFPQSAPHGVVFLHVTYVPAQEKNFTTAPAICHDGKAHFPREGVFVSNGTHWFVTQRNFYEPQIITTDNTFVSGNCDVVIGIVNNTVYDPLQPELDSGGGGSDIIKLLNEQVNKEMQSSNLYMSMSSWCYTHSLDGAGLFLFDHAAEEYEHAKKLIIFLNENNVPVQLTSISAPEHKFEGLTQIFQKAYEHEQHISESINNIVDHAIKSKDHATFNFLQWYVAEQHEEEVLFKDILDKIELIGNENHGLYLADQYVKGIAKSRKS

SEQ ID NO: 9358 - protein, 1315 aa, Artificial Sequence
  SARS-CoV-2/SARS-CoV-2/Yunnan-01/human/2020/CHN__MT049951.1 spike protein (1-1147)(Q965C_S1003C) Ferritin construct
MFVFLVLLPLVSSQCVNLTTRTQLPPANTNSFTRGVYYPDKVFRSSVLHSTQDLFLPFFSNVTWFHAIHVSGTNGTKRFDNPVLPFNDGVYFASTEKSNIIRGWIFGTTLDSKTQSLLIVNNATNVVIKVCEFQFCNDPFLGVYYHKNNKSWMESEFRVYSSANNCTFEYVSQPFLMDLEGKQGNFKNLREFVFKNIDGYFKIYSKHTPINLVRDLPQGFSALEPLVDLPIGINITRFQTLLALHRSYLTPGDSSSGWTAGAAAYYVGYLQPRTFLLKYNENGTITDAVDCALDPLSETKCTLKSFTVEKGIYQTSNFRVQPTESIVRFPNITNLCPFGEVFNATRFASVYAWNRKRISNCVADYSVLYNSASFSTFKCYGVSPTKLNDLCFTNVYADSFVIRGDEVRQIAPGQTGKIADYNYKLPDDFTGCVIAWNSNNLDSKVGGNYNYLYRLFRKSNLKPFERDISTEIYQAGSTPCNGVEGFNCYFPLQSYGFQPTNGVGYQPYRVVVLSFELLHAPATVCGPKKSTNLVKNKCVNFNFNGLTGTGVLTESNKKFLPFQQFGRDIADTTDAVRDPQTLEILDITPCSFGGVSVITPGTNTSNQVAVLYQDVNCTEVPVAIHADQLTPTWRVYSTGSNVFQTRAGCLIGAEHVNNSYECDIPIGAGICASYQTQTNSPRRARSVASQSIIAYTMSLGAENSVAYSNNSIAIPTNFTISVTTEILPVSMTKTSVDCTMYICGDSTECSNLLLQYGSFCTQLNRALTGIAVEQDKNTQEVFAQVKQIYKTPPIKDFGGFNFSQILPDPSKPSKRSFIEDLLFNKVTLADAGFIKQYGDCLGDIAARDLICAQKFNGLTVLPPLLTDEMIAQYTSALLAGTITSGWTFGAGAALQIPFAMQMAYRFNGIGVTQNVLYENQKLIANQFNSAIGKIQDSLSSTASALGKLQDVVNQNAQALNTLVKCLSSNFGAISSVLNDILSRLDKVEAEVQIDRLITGRLQCLQTYVTQQLIRAAEIRASANLAATKMSECVLGQSKRVDFCGKGYHLMSFPQSAPHGVVFLHVTYVPAQEKNFTTAPAICHDGKAHFPREGVFVSNGTHWFVTQRNFYEPQIITTDNTFVSGNCDVVIGIVNNTVYDPLQPELDSGGGGSDIIKLLNEQVNKEMQSSNLYMSMSSWCYTHSLDGAGLFLFDHAAEEYEHAKKLIIFLNENNVPVQLTSISAPEHKFEGLTQIFQKAYEHEQHISESINNIVDHAIKSKDHATFNFLQWYVAEQHEEEVLFKDILDKIELIGNENHGLYLADQYVKGIAKSRKS

SEQ ID NO: 9359 - protein, 1315 aa, Artificial Sequence
  SARS-CoV-2/USA/WA-UW292/2020__EPI_ISL_418077 spike protein (1-1147)(Q965C_S1003C) Ferritin construct
MFVFLVLLPLVSSQCVNLTTRTQLPPAYTNSFTRGVYYPDKVFRSSVLHSTQDLFLPFFSNVTWFHAIHVSGTNGTKRFDNPVLPFNDGVYFASTEKSNIIRGWIFGTTLDSKTQSLLIVNNATNVVIKVCEFQFCNDPFLGVYYHKNNKSWMESEFRVYSSANNCTFEYVSQPFLMDLEGKQGNFKNLREFVFKNIDGYFKIYSKHTPINLVRDLPQGFSALEPLVDLPIGINITRFQTLLALHRSYLTPGDSSSGWTAGAAAYYVGYLQPRTFLLKYNENGTITDAVDCALDPLSETKCTLKSFTVEKGIYQTSNFRVQPTESIVRFPNITNLCPFGEVFNATRFASVYAWNRKRISNCVADYSVLYNSASFSTFKCYGVSPTKLNDLCFTNVYADSFVIRGDEVRQIAPGQTGKIADYNYKLPDDFTGCVIAWNSNNLDSKVGGNYNYLYRLFRKSNLKPFERDISTEIYQASSTPCNGVEGFNCYFPLQSYGFQPTNGVGYQPYRVVVLSFELLHAPATVCGPKKSTNLVKNKCVNFNFNGLTGTGVLTESNKKFLPFQQFGRDIADTTDAVRDPQTLEILDITPCSFGGVSVITPGTNTSNQVAVLYQDVNCTEVPVAIHADQLTPTWRVYSTGSNVFQTRAGCLIGAEHVNNSYECDIPIGAGICASYQTQTNSPRRARSVASQSIIAYTMSLGAENSVAYSNNSIAIPTNFTISVTTEILPVSMTKTSVDCTMYICGDSTECSNLLLQYGSFCTQLNRALTGIAVEQDKNTQEVFAQVKQIYKTPPIKDFGGFNFSQILPDPSKPSKRSFIEDLLFNKVTLADAGFIKQYGDCLGDIAARDLICAQKFNGLTVLPPLLTDEMIAQYTSALLAGTITSGWTFGAGAALQIPFAMQMAYRFNGIGVTQNVLYENQKLIANQFNSAIGKIQDSLSSTASALGKLQDVVNQNAQALNTLVKCLSSNFGAISSVLNDILSRLDKVEAEVQIDRLITGRLQCLQTYVTQQLIRAAEIRASANLAATKMSECVLGQSKRVDFCGKGYHLMSFPQSAPHGVVFLHVTYVPAQEKNFTTAPAICHDGKAHFPREGVFVSNGTHWFVTQRNFYEPQIITTDNTFVSGNCDVVIGIVNNTVYDPLQPELDSGGGGSDIIKLLNEQVNKEMQSSNLYMSMSSWCYTHSLDGAGLFLFDHAAEEYEHAKKLIIFLNENNVPVQLTSISAPEHKFEGLTQIFQKAYEHEQHISESINNIVDHAIKSKDHATFNFLQWYVAEQHEEEVLFKDILDKIELIGNENHGLYLADQYVKGIAKSRKS

SEQ ID NO: 9360 - protein, 1315 aa, Artificial Sequence
  SARS-CoV-2/Iceland/192/2020__EPI_ISL_417819 spike protein (1-1147)(Q965C_S1003C) Ferritin construct
MFVFFVLLPLVSSQCVNLTTRTQLPPAYTNSFTRGVYYPDKVFRSSVLHSTQDLFLPFFSNVTWFHAIHVSGTNGTKRFDNPVLPFNDGVYFASTEKSNIIRGWIFGTTLDSKTQSLLIVNNATNVVIKVCEFQFCNDPFLGVYYHKNNKSWMESEFRVYSSANNCTFEYVSQPFLMDLEGKQGNFKNLREFVFKNIDGYFKIYSKHTPINLVRDLPQGFSALEPLVDLPIGINITRFQTLLALHRSYLTPGDSSSGWTAGAAAYYVGYLQPRTFLLKYNENGTITDAVDCALDPLSETKCTLKSFTVEKGIYQTSNFRVQPTESIVRFPNITNLCPFGEVFNATRFASVYAWNRKRISNCVADYSVLYNSASFSTFKCYGVSPTKLNDLCFTNVYADSFVIRGDEVRQIAPGQTGKIADYNYKLPDDFTGCVIAWNSNNLDSKVGGNYNYLYRLFRKSNLKPFERDISTEIYQAGSTPCNGVEGFNCYFPLQSYGFQPTNGVGYQPYRVVVLSFELLHAPATVCGPKKSTNLVKNKCVNFNFNGLTGTGVLTESNKKFLPFQQFGRDIADTTDAVRDPQTLEILDITPCSFGGVSVITPGTNTSNQVAVLYQGVNCTEVPVAIHADQLTPTWRVYSTGSNVFQTRAGCLIGAEHVNNSYECDIPIGAGICASYQTQTNSPRRARSVASQSIIAYTMSLGAENSVAYSNNSIAIPTNFTISVTTEILPVSMTKTSVDCTMYICGDSTECSNLLLQYGSFCTQLNRALTGIAVEQDKNTQEVFAQVKQIYKTPPIKDFGGFNFSQILPDPSKPSKRSFIEDLLFNKVTLADAGFIKQYGDCLGDIAARDLICAQKFNGLTVLPPLLTDEMIAQYTSALLAGTITSGWTFGAGAALQIPFAMQMAYRFNGIGVTQNVLYENQKLIANQFNSAIGKIQDSLSSTASALGKLQDVVNQNAQALNTLVKCLSSNFGAISSVLNDILSRLDKVEAEVQIDRLITGRLQCLQTYVTQQLIRAAEIRASANLAATKMSECVLGQSKRVDFCGKGYHLMSFPQSAPHGVVFLHVTYVPAQEKNFTTAPAICHDGKAHFPREGVFVSNGTHWFVTQRNFYEPQIITTDNTFVSGNCDVVIGIVNNTVYDPLQPELDSGGGGSDIIKLLNEQVNKEMQSSNLYMSMSSWCYTHSLDGAGLFLFDHAAEEYEHAKKLIIFLNENNVPVQLTSISAPEHKFEGLTQIFQKAYEHEQHISESINNIVDHAIKSKDHATFNFLQWYVAEQHEEEVLFKDILDKIELIGNENHGLYLADQYVKGIAKSRKS

SEQ ID NO: 9361 - protein, 1315 aa, Artificial Sequence
  SARS-CoV-2/Belgium/ULG-6939/2020__EPI_ISL_417020 spike protein (1-1147)(Q965C_S1003C) Ferritin construct
MFVFLVLLPLVSSQCVNLTTRTQLPPAYTNSFTRGVYYPDKVFRSSVLHSTQDLFLPFFSNVTWFHAIHVSGTNGTKRFDNPVLPFNDGVYFASTEKSNIIRGWIFGTTLDSKTQSLLIVNNATNVVIKVCEFQFCNDPFLGVYYHKNNKSWMESEFRVYSSANNCTFEYVSQPFLMDLEGKQGNFKNLREFVFKNIDGYFKIYSKHTPINLVRDLPQGFSALEPLVDLPIGINITRFQTLLALHRSYLTPGDSSSGWTAGAAAYYVGYLQPRTFLLKYNENGTITDAVDCALDPLSETKCTLKSFTVEKGIYQTSNFRVQPTESIVRFPNITNLCPFGEVFNATRFASVYAWNRKRISNCVADYSVLYNSASFSTFKCYGVSPTKLNDLCFTNVYADSFVIRGDEVRQIAPGQTGKIADYNYKLPDDFTGCVIAWNSNNLDSKVGGNYNYLYRLFRKSNLKPFERDISTEIYQAGSTPCNGVEGFNCYFPLQSYGFQPTNGVGYQPYRVVVLSFELLHAPATVCGPKKSTNLVKNKCVNFNFNGLTGTGVLTESNKKFLPFQQFGRDIADTTDAVRDPQTLEILDITPCSFGGVSVITPGTNTSNQVAVLYQGVNCTEVPVAIHADQLTPTWRVYSTGSNVFQTRAGCLIGAEHVNNSYECDIPIGAGICASYQTQTNSPRRARSVASQSIIAYTMSLGAENSVVYSNNSIAIPTNFTISVTTEILPVSMTKTSVDCTMYICGDSTECSNLLLQYGSFCTQLNRALTGIAVEQDKNTQEVFAQVKQIYKTPPIKDFGGFNFSQILPDPSKPSKRSFIEDLLFNKVTLADAGFIKQYGDCLGDIAARDLICAQKFNGLTVLPPLLTDEMIAQYTSALLAGTITSGWTFGAGAALQIPFAMQMAYRFNGIGVTQNVLYENQKLIANQFNSAIGKIQDSLSSTASALGKLQDVVNQNAQALNTLVKCLSSNFGAISSVLNDILSRLDKVEAEVQIDRLITGRLQCLQTYVTQQLIRAAEIRASANLAATKMSECVLGQSKRVDFCGKGYHLMSFPQSAPHGVVFLHVTYVPAQEKNFTTAPAICHDGKAHFPREGVFVSNGTHWFVTQRNFYEPQIITTDNTFVSGNCDVVIGIVNNTVYDPLQPELDSGGGGSDIIKLLNEQVNKEMQSSNLYMSMSSWCYTHSLDGAGLFLFDHAAEEYEHAKKLIIFLNENNVPVQLTSISAPEHKFEGLTQIFQKAYEHEQHISESINNIVDHAIKSKDHATFNFLQWYVAEQHEEEVLFKDILDKIELIGNENHGLYLADQYVKGIAKSRKS

SEQ ID NO: 9362 - protein, 1315 aa, Artificial Sequence
  SARS-CoV-2/France/HF2496/2020__EPI_ISL_418231 spike protein (1-1147)(Q965C_S1003C) Ferritin construct
MFVFLVLLPLVSSQCVNLTTRTQLPPAYTNSFTRGVYYPDKVFRSSVLHSTQDLFLPFFSNVTWFHAIHVSGTNGTKRFDNPVLPFNDGVYFASTEKSNIIRGWIFGTTLDSKTQSLLIVNNATNVVIKVCEFQFCNDPFLGVYYHKNNKSWMESEFRVYSSANNCTFEYVSQPFLMDLEGKQGNFKNLREFVFKNIDGYFKIYSKHTPINLVRDLPQGFSALEPLVDLPIGINITRFQTLLALHRSYLTPGDSSSGWTAGAAAYYVGYLQPRTFLLKYNENGTITDAVDCALDPLSETKCTLKSFTVEKGIYQTSNFRVQPTESIVRFPNITNLCPFGEVFNATRFASVYAWNRKRISNCVADYSVLYNSASFSTFKCYGVSPTKLNDLCFTNVYADSFVIRGDEVRQIAPGQTGKIADYNYKLPDDFTGCVIAWNSNNLDSKVGGNYNYLYRLFRKSNLKPFERDISTEIYQAGSTPCNGVEGFNCYFPLQSYGFQPTNGVGYQPYRVVVLSFELLHAPATVCGPKKSTNLVKNKCVNFNFNGLTGTGVLTESNKKFLPFQQFGRDIADTTDAVRDPQTLEILDITPCSFGGVSVITPGTNTSNQVAVLYQGVNCTEVPVAIHADQLTPTWRVYSTGSNVFQTRAGCLIGAEHVNNSYECDIPIGAGICASYQTQTNSPRRARSVASQSIIAYTMSLGAENSVAYSNNSIAIPTNFTISVTTEILPVSMTKTSVDCTMYICGDSTECSNLLLQYGSFCTQLNRALTGIAVEQDKNTQEVFAQVKQIYKTPPIKDFGGFNFSQILPDPSKPSKRSFIEDLLFNKVTLADAGFIKQYGDCLGDIVARDLICAQKFNGLTVLPPLLTDEMIAQYTSALLAGTITSGWTFGAGAALQIPFAMQMAYRFNGIGVTQNVLYENQKLIANQFNSAIGKIQDSLSSTASALGKLQDVVNQNAQALNTLVKCLSSNFGAISSVLNDILSRLDKVEAEVQIDRLITGRLQCLQTYVTQQLIRAAEIRASANLAATKMSECVLGQSKRVDFCGKGYHLMSFPQSAPHGVVFLHVTYVPAQEKNFTTAPAICHDGKAHFPREGVFVSNGTHWFVTQRNFYEPQIITTDNTFVSGNCDVVIGIVNNTVYDPLQPELDSGGGGSDIIKLLNEQVNKEMQSSNLYMSMSSWCYTHSLDGAGLFLFDHAAEEYEHAKKLIIFLNENNVPVQLTSISAPEHKFEGLTQIFQKAYEHEQHISESINNIVDHAIKSKDHATFNFLQWYVAEQHEEEVLFKDILDKIELIGNENHGLYLADQYVKGIAKSRKS

SEQ ID NO: 9363 - protein, 1315 aa, Artificial Sequence
  SARS-CoV-2/USA/WA-UW291/2020__EPI_ISL_418076 spike protein (1-1147)(Q965C_S1003C) Ferritin construct
MFVFLVLLPLVSSQCVNLTTRTQLPPAYTNSFTRGVYYPDKVFRSSVLHSTQDLFLPFFSNVTWFHAIHVSGTNGTKRFDNPVLPFNDGVYFASTEKSNIIRGWIFGTTLDSKTQSLLIVNNATNVVIKVCEFQFCNDPFLGVYYHKNNKSWMESEFRVYSSANNCTFEYVSQPFLMDLEGKQGNFKNLREFVFKNIDGYFKIYSKHTPINLVRDLPQGFSALEPLVDLPIGINITRFQTLLALHRSYLTPGDSSSGWTAGAAAYYVGYLQPRTFLLKYNENGTITDAVDCALDPLSETKCTLKSFTVEKGIYQTSNFRVQPTESIVRFPNITNLCPFGEVFNATRFASVYAWNRKRISNCVADYSVLYNSASFSTFKCYGVSPTKLNDLCFTNVYADSFVIRGDEVRQIAPGQTGKIADYNYKLPDDFTGCVIAWNSNNLDSKVGGNYNYLYRLFRKSNLKPFERDISTEIYQAGSTPCNGVEGFNCYFPLQSYGFQPTNGVGYQPYRVVVLSFELLHAPATVCGPKKSTNLVKNKCVNFNFNGLTGTGVLTESNKKFLPFQQFGRDIADTTDAVRDPQTLEILDITPCSFGGVSVITPGTNTSNQVAVLYQGVNCTEVPVAIHADQLTPTWRVYSTGSNVFQTRAGCLIGAEHVNNSYECDIPIGAGICASYQTQTNSPRRARSVASQSIIAYTMSLGAENSVAYSNNSIAIPTNFTISVTTEILPVSMTKTSVDCTMYICGDSTECSNLLLQYGSFCTQLNRALTGIAVEQDKNTQEVFAQVKQIYKTPPIKDFGGFNFSQILPDPSKPSKRSFIEDLLFNKVTLADAGFIKQYGDCLGDIAARDLICAQKFNGLTVLPPLLTDEMIAQYTSALLAGTITSGWTFGAGAALQIPFAMQMAYRFNGIGVTQNVLYENQKLIANQFNSAIGKIQYSLSSTASALGKLQDVVNQNAQALNTLVKCLSSNFGAISSVLNDILSRLDKVEAEVQIDRLITGRLQCLQTYVTQQLIRAAEIRASANLAATKMSECVLGQSKRVDFCGKGYHLMSFPQSAPHGVVFLHVTYVPAQEKNFTTAPAICHDGKAHFPREGVFVSNGTHWFVTQRNFYEPQIITTDNTFVSGNCDVVIGIVNNTVYDPLQPELDSGGGGSDIIKLLNEQVNKEMQSSNLYMSMSSWCYTHSLDGAGLFLFDHAAEEYEHAKKLIIFLNENNVPVQLTSISAPEHKFEGLTQIFQKAYEHEQHISESINNIVDHAIKSKDHATFNFLQWYVAEQHEEEVLFKDILDKIELIGNENHGLYLADQYVKGIAKSRKS

SEQ ID NO: 9364 - protein, 1315 aa, Artificial Sequence; identical to SEQ ID NO: 9327
  SARS-CoV-2/Portugal/PT0034/2020__EPI_ISL_418019 spike protein (1-1147)(Q965C_S1003C) Ferritin construct

SEQ ID NO: 9365 - protein, 1315 aa, Artificial Sequence; identical to SEQ ID NO: 9319
  SARS-CoV-2/Iceland/202/2020__EPI_ISL_417750 spike protein (1-1147)(Q965C_S1003C) Ferritin construct

SEQ ID NO: 9366 - protein, 1315 aa, Artificial Sequence
  SARS-CoV-2/USA/WA-UW261/2020__EPI_ISL_418046 spike protein (1-1147)(Q965C_S1003C) Ferritin construct
MFVFLVLLPLVSSQCVNLTTRTQLPPAYTNSFTRGVYYPDKVFRSSVLHSTQDLFLPFFSNVTWFHAIHVSGTNGTKRFDNPVLPFNDGVYFASTEKSNIIRGWIFGTTLDSKTQSLLIVNNATNVVIKVCEFQFCNDPFLGVYYHKNNKSWMESEFRVYSSANNCTFEYVSQPFLMDLEGKQGNFKNLREFVFKNIDGYFKIYSKHTPINLVRDLPQGFSALEPLVDLPIGINITRFQTLLALHRSYLTPGDSSSGWTAGAAAYYVGYLQPRTFLLKYNENGTITDAVDCALDPLSETKCTLKSFTVEKGIYQTSNFRVQPTESIVRFPNITNLCPFGEVFNATRFTSVYAWNRKRISNCVADYSVLYNSASFSTFKCYGVSPTKLNDLCFTNVYADSFVIRGDEVRQIAPGQTGKIADYNYKLPDDFTGCVIAWNSNNLDSKVGGNYNYLYRLFRKSNLKPFERDISTEIYQAGSTPCNGVEGFNCYFPLQSYGFQPTNGVGYQPYRVVVLSFELLHAPATVCGPKKSTNLVKNKCVNFNFNGLTGTGVLTESNKKFLPFQQFGRDIADTTDAVRDPQTLEILDITPCSFGGVSVITPGTNTSNQVAVLYQDVNCTEVPVAIHADQLTPTWRVYSTGSNVFQTRAGCLIGAEHVNNSYECDIPIGAGICASYQTQTNSPRRARSVASQSIIAYTMSLGAENSVAYSNNSIAIPTNFTISVTTEILPVSMTKTSVDCTMYICGDSTECSNLLLQYGSFCTQLNRALTGIAVEQDKNTQEVFAQVKQIYKTPPIKDFGGFNFSQILPDPSKPSKRSFIEDLLFNKVTLADAGFIKQYGDCLGDIAARDLICAQKFNGLTVLPPLLTDEMIAQYTSALLAGTITSGWTFGAGAALQIPFAMQMAYRFNGIGVTQNVLYENQKLIANQFNSAIGKIQDSLSSTASALGKLQDVVNQNAQALNTLVKCLSSNFGAISSVLNDILSRLDKVEAEVQIDRLITGRLQCLQTYVTQQLIRAAEIRASANLAATKMSECVLGQSKRVDFCGKGYHLMSFPQSAPHGVVFLHVTYVPAQEKNFTTAPAICHDGKAHFPREGVFVSNGTHWFVTQRNFYEPQIITTDNTFVSGNCDVVIGIVNNTVYDPLQPELDSGGGGSDIIKLLNEQVNKEMQSSNLYMSMSSWCYTHSLDGAGLFLFDHAAEEYEHAKKLIIFLNENNVPVQLTSISAPEHKFEGLTQIFQKAYEHEQHISESINNIVDHAIKSKDHATFNFLQWYVAEQHEEEVLFKDILDKIELIGNENHGLYLADQYVKGIAKSRKS

SEQ ID NO: 9367 - protein, 1315 aa, Artificial Sequence
  SARS-CoV-2/Portugal/PT0035/2020__EPI_ISL_418020 spike protein (1-1147)(Q965C_S1003C) Ferritin construct
MFVFLVLLPLVSSQCVNLTTRTQLPPAYTNSFTRGVYYPDKVFRSSVLHSTQDLFLPFFSNVTWFHAIHVSGTNGTKRFDNPVLPFNDGVYFASTEKSNIIRGWIFGTTLDSKTQSLLIVNNATNVVIKVCEFQFCNDPFLGVYYHKNNKSWMESEFRVYSSANNCTFEYVSQPFLMDLEGKQGNFKNLREFVFKNIDGYFKIYSKHTPINLVRDLPQGFSALEPLVDLPIGINITRFQTLLALHRSYLTPGDSSSGWTAGAAAYYVGYLQPRTFLLKYNENGTITDAVDCALDPLSETKCTLKSFTVEKGIYQTSNFRVQPTESIVRFPNITNLCPFGEVFNATRFASVYAWNRKRISNCVADYSVLYNSASFSTFKCYGVSPTKLNDLCFTNVYADSFVIRGDEVRQIAPGQTGKIADYNYKLPDDFTGCVIAWNSNNLDSKVGGNYNYLYRLFRKSNLKPFERDISTEIYQAGSTPCNGVEGFNCYFPLQSYGFQPTNGVGYQPYRVVVLSFELLHAPATVCGPKKSTNLVKNKCVNFNFNGLTGTGVLTESNKKFLPFQQFGRDIADTTDAVRDPQTLEILDITPCSFGGVSVITPGTNTSNQVAVLYQDVNCTEVPVAIHADQLTPTWRVYSTGSNVFQTRAGCLIGAEHVNNSYECDIPIGAGICASYQTQTNSPRRARSVASQSIIAYTMSLGAENSVAYSNNSIAIPTNFTISVTTEILPVSMTKTSVDCTMYICGDSTECSNLLLQYGSFCTQLNRALTGIAVEQDKNTQEVFAQVKQIYKTPPIKDFGGFNFSQILPDPSKPSKRSFIEDLLFNKVTLADAGFIKQYGDCLGDISARDLICAQKFNGLTVLPPLLTDEMIAQYTSALLAGTITSGWTFGAGAALQIPFAMQMAYRFNGIGVTQNVLYENQKLIANQFNSAIGKIQDSLSSTASALGKLQDVVNQNAQALNTLVKCLSSNFGAISSVLNDILSRLDKVEAEVQIDRLITGRLQCLQTYVTQQLIRAAEIRASANLAATKMSECVLGQSKRVDFCGKGYHLMSFPQSAPHGVVFLHVTYVPAQEKNFTTAPAICHDGKAHFPREGVFVSNGTHWFVTQRNFYEPQIITTDNTFVSGNCDVVIGIVNNTVYDPLQPELDSGGGGSDIIKLLNEQVNKEMQSSNLYMSMSSWCYTHSLDGAGLFLFDHAAEEYEHAKKLIIFLNENNVPVQLTSISAPEHKFEGLTQIFQKAYEHEQHISESINNIVDHAIKSKDHATFNFLQWYVAEQHEEEVLFKDILDKIELIGNENHGLYLADQYVKGIAKSRKS

SEQ ID NO: 9368 - protein, 1315 aa, Artificial Sequence
  SARS-CoV-2/USA/NY-NYUMC7/2020__EPI_ISL_418192 spike protein (1-1147)(Q965C_S1003C) Ferritin construct
MFVFLVLLPLVSSQCVNLTTRTQLPPAYTNSFTRGVYYPDKVFRSSVLHSTQDLFLPFFSNVTWFHAIHVSGTNGTKRFDNPVLPFNDGVYFASTEKSNIIRGWIFGTTLDSKTQSLLIVNNATNVVIKVCEFQFCNDPFLGVYHHKNNKSWMESEFRVYSSANNCTFEYVSQPFLMDLEGKQGNFKNLREFVFKNIDGYFKIYSKHTPINLVRDLPQGFSALEPLVDLPIGINITRFQTLLALHRSYLTPGDSSSGWTAGAAAYYVGYLQPRTFLLKYNENGTITDAVDCALDPLSETKCTLKSFTVEKGIYQTSNFRVQPTESIVRFPNITNLCPFGEVFNATRFASVYAWNRKRISNCVADYSVLYNSASFSTFKCYGVSPTKLNDLCFTNVYADSFVIRGDEVRQIAPGQTGKIADYNYKLPDDFTGCVIAWNSNNLDSKVGGNYNYLYRLFRKSNLKPFERDISTEIYQAGSTPCNGVEGFNCYFPLQSYGFQPTNGVGYQPYRVVVLSFELLHAPATVCGPKKSTNLVKNKCVNFNFNGLTGTGVLTESNKKFLPFQQFGRDIADTTDAVRDPQTLEILDITPCSFGGVSVITPGTNTSNQVAVLYQGVNCTEVPVAIHADQLTPTWRVYSTGSNVFQTRAGCLIGAEHVNNSYECDIPIGAGICASYQTQTNSPRRARSVASQSIIAYTMSLGAENSVAYSNNSIAIPTNFTISVTTEILPVSMTKTSVDCTMYICGDSTECSNLLLQYGSFCTQLNRALTGIAVEQDKNTQEVFAQVKQIYKTPPIKDFGGFNFSQILPDPSKPSKRSFIEDLLFNKVTLADAGFIKQYGDCLGDIAARDLICAQKFNGLTVLPPLLTDEMIAQYTSALLAGTITSGWTFGAGAALQIPFAMQMAYRFNGIGVTQNVLYENQKLIANQFNSAIGKIQDSLSSTASALGKLQDVVNQNAQALNTLVKCLSSNFGAISSVLNDILSRLDKVEAEVQIDRLITGRLQCLQTYVTQQLIRAAEIRASANLAATKMSECVLGQSKRVDFCGKGYHLMSFPQSAPHGVVFLHVTYVPAQEKNFTTAPAICHDGKAHFPREGVFVSNGTHWFVTQRNFYEPQIITTDNTFVSGNCDVVIGIVNNTVYDPLQPELDSGGGGSDIIKLLNEQVNKEMQSSNLYMSMSSWCYTHSLDGAGLFLFDHAAEEYEHAKKLIIFLNENNVPVQLTSISAPEHKFEGLTQIFQKAYEHEQHISESINNIVDHAIKSKDHATFNFLQWYVAEQHEEEVLFKDILDKIELIGNENHGLYLADQYVKGIAKSRKS

SEQ ID NO: 9369 - protein, 1315 aa, Artificial Sequence
  SARS-CoV-2/Iceland/189/2020__EPI_ISL_417709 spike protein (1-1147)(Q965C_S1003C) Ferritin construct
MFVFLVLLPLVSSQCVNLTTRTQLPPAYTNSFTRGVYYPDKVFRSSVLHSTQDLFLPFFSNVTWFHAIHVSGTNGTKRFDNPVLPFNDGVYFASTEKSNIIRGWIFGTTLDSKTQSLLIVNNATNVVIKVCEFQFCNDPFLGVYYHKNNKSWMESEFRVYSSANNCTFEYVSQPFLMDLEGKQGNFKNLREFVFKNIDGYFKIYSKHTPINLVRDLPQGFSALEPLVDLPIGINITRFQTLLALHRSYLTPGDSSSGWTAGAAAYYVGYLQPRTFLLKYNENGTITDAVDCALDPLSETKCTLKSFTVEKGIYQTSNFRVQPTESIVRFPNITNLCPFGEVFNATRFASVYAWNRKRISNCVADYSVLYNSASFSTFKCYGVSPTKLNDLCFTNVYADSFVIRGDEVRQIAPGQTGKIADYNYKLPDDFTGCVIAWNSNNLDSKVGGNYNYLYRLFRKSNLKPFERDISTEIYQAGSTPCNGVEGFNCYFPLQSYGFQPTNGVGYQPYRVVVLSFELLHAPATVCGPKKSTNLVKNKCVNFNFNGLTGTGVLTESNKKFLPFQQFGRDIADTTDAVRDPQTLEILDITPCSFGGVSVITPGTNTSNQVAVLYQGVNCTEVPVAIHADQLTPTWRVYSTGSNVFQTRAGCLIGAEHVNNSYECDIPIGAGICASYQTQTNSPRRARSVASQSIIAYTMSLGAENSVAYSNNSIAIPTNFTISVTTEILPVSMTKTSVDCTMYICGDSTECSNLLLQYGSFCTQLNRALTGIAVEQDKNTQEVFAQVKQIYKTPPIKDFGGFNFSQILPDPSKPSKRSFIEDLLFNKVTLADAGFTKQYGDCLGDIAARDLICAQKFNGLTVLPPLLTDEMIAQYTSALLAGTITSGWTFGAGAALQIPFAMQMAYRFNGIGVTQNVLYENQKLIANQFNSAIGKIQDSLSSTASALGKLQDVVNQNAQALNTLVKCLSSNFGAISSVLNDILSRLDKVEAEVQIDRLITGRLQCLQTYVTQQLIRAAEIRASANLAATKMSECVLGQSKRVDFCGKGYHLMSFPQSAPHGVVFLHVTYVPAQEKNFTTAPAICHDGKAHFPREGVFVSNGTHWFVTQRNFYEPQIITTDNTFVSGNCDVVIGIVNNTVYDPLQPELDSGGGGSDIIKLLNEQVNKEMQSSNLYMSMSSWCYTHSLDGAGLFLFDHAAEEYEHAKKLIIFLNENNVPVQLTSISAPEHKFEGLTQIFQKAYEHEQHISESINNIVDHAIKSKDHATFNFLQWYVAEQHEEEVLFKDILDKIELIGNENHGLYLADQYVKGIAKSRKS

SEQ ID NO: 9370 - protein, 1315 aa, Artificial Sequence
  SARS-CoV-2/Australia/NSW56/2020__EPI_ISL_417408 spike protein (1-1147)(Q965C_S1003C) Ferritin construct
MFVFLVLLPLVSSQCVNLTTRTQLPPAYTNSFTRGVYYPDKVFRSSVLHSTQDLFLPFFSNVTWFHAIHVSGTNGTKRFDNPVLPFNDGVYFASTEKSNIIRGWIFGTTLDSKTQSLLIVNNATNVVIKVCEFQFCNDPFLGVYYHKNNKSWMESEFRVYSSANNCTFEYVSQPFLMDLEGKQGNFKNLREFVFKNIDGYFKIYSKHTPINLVRDLPQGFSALEPLVDLPIGINITRFQTLLALHRSYLTPGDSSSGWTAGAAAYYVGYLQPRTFLLKYNENGTITDAVDCALDPLSETKCTLKSFTVEKGIYQTSNFRVQPTESIVRFPNITNLCPFGEVFNATRFASVYAWNRKRISNCVADYSVLYNSASFSTFKCYGVSPTKLNDLCFTNVYADSFVIRGDEVRQIAPGQTGKIADYNYKLPDDFTGCVIAWNSNNLDSKVGGNYNYLYRLFRKSNLKPFERDISTEIYQAGSTPCNGVEGFNCYFPLQSYGFQPTNGVGYQPYRVVVLSFELLHAPATVCGPKKSTNLVKNKCVNFNFNGLTGTGVLTESNKKFLPFQQFGRDIADTTDAVRDPQTLEILDITPCSFGGVSVITPGTNTSNQVAVLYQDVNCTEVPVAIHADQLTPTWRVYSTGSNVFQTRAGCLIGAEHVNNSYECDIPIGAGICASYQTQTNSPRRARSVASQSIIAYTMSLGAENSVAYSNNSIAIPTNFTISVTTEILPVSMTKTSVDCTMYICGDSTECSNLLLQYGSFCTQLNRALTGIAVEQDKNTQEVFAQVKQIYKTPPIKDFGGFNFSQILPDSSKPSKRSFIEDLLFNKVTLADAGFIKQYGDCLGDIAARDLICAQKFNGLTVLPPLLTDEMIAQYTSALLAGTITSGWTFGAGAALQIPFAMQMAYRFNGIGVTQNVLYENQKLIANQFNSAIGKIQDSLSSTASALGKLQDVVNQNAQALNTLVKCLSSNFGAISSVLNDILSRLDKVEAEVQIDRLITGRLQCLQTYVTQQLIRAAEIRASANLAATKMSECVLGQSKRVDFCGKGYHLMSFPQSAPHGVVFLHVTYVPAQEKNFTTAPAICHDGKAHFPREGVFVSNGTHWFVTQRNFYEPQIITTDNTFVSGNCDVVIGIVNNTVYDPLQPELDSGGGGSDIIKLLNEQVNKEMQSSNLYMSMSSWCYTHSLDGAGLFLFDHAAEEYEHAKKLIIFLNENNVPVQLTSISAPEHKFEGLTQIFQKAYEHEQHISESINNIVDHAIKSKDHATFNFLQWYVAEQHEEEVLFKDILDKIELIGNENHGLYLADQYVKGIAKSRKS

SEQ ID NO: 9371 - protein, 1315 aa, Artificial Sequence
  SARS-CoV-2/Iceland/280/2020__EPI_ISL_417608 spike protein (1-1147)(Q965C_S1003C) Ferritin construct
MFVFLVLLPLVSSQCVNLTTRTQLPPAYTNSFTRGVYYPDKVFRSSVLHSTQDLFLPFFSNVTWFHAIHVSGTNGTKRFDNPVLPFNDGVYFASTEKSNIIRGWIFGTTLDSKTQSLLIVNNATNVVIKVCEFQFCNDPFLGVYYHKNNKSWMESEFRVYSSANNCTFEYVSQPFLMDLEGKQGNFKNLREFVFKNIDGYFKIYSKHTPINLVRDLPQGFSALEPLVDLPIGINITRFQTLLALHRSYLTPGDSSSGWTAGAAAYYVGYLQPRTFLLKYNENGTITDAVDCALDPLSETKCTLKSFTVEKGIYQTSNFRVQPTESIVRFPNITNLCPFGEVFNATRFASVYAWNRKRISNCVADYSVLYNSASFSTFKCYGVSPTKLNDLCFTNVYADSFVIRGDEVRQIAPGQTGKIADYNYKLPDDFTGCVIAWNSNNLDSKVGGNYNYLYRLFRKSNLKPFERDISTEIYQAGSTPCNGVEGFNCYFPLQSYGFQPTNGVGYQPYRVVVLSFELLHAPATVCGPKKSTNLVKNKCVNFNFNGLTGTGVLTESNKKFLPFQQFGRDIADTTDAVRDPQTLEILDITPCSFGGVSVITPGTNTSNQVAVLYQGVNCTEVPVAIHADQLTPTWRVYSTGSNVFQTRAGCLIGAEHVNNSYECDIPIGAGICASYHTQTNSPRRARSVASQSIIAYTMSLGAENSVAYSNNSIAIPTNFTISVTTEILPVSMTKTSVDCTMYICGDSTECSNLLLQYGSFCTQLNRALTGIAVEQDKNTQEVFAQVKQIYKTPPIKDFGGFNFSQILPDPSKPSKRSFIEDLLFNKVTLADAGFIKQYGDCLGDIAARDLICAQKFNGLTVLPPLLTDEMIAQYTSALLAGTITSGWTFGAGAALQIPFAMQMAYRFNGIGVTQNVLYENQKLIANQFNSAIGKIQDSLSSTASALGKLQDVVNQNAQALNTLVKCLSSNFGAISSVLNDILSRLDKVEAEVQIDRLITGRLQCLQTYVTQQLIRAAEIRASANLAATKMSECVLGQSKRVDFCGKGYHLMSFPQSAPHGVVFLHVTYVPAQEKNFTTAPAICHDGKAHFPREGVFVSNGTHWFVTQRNFYEPQIITTDNTFVSGNCDVVIGIVNNTVYDPLQPELDSGGGGSDIIKLLNEQVNKEMQSSNLYMSMSSWCYTHSLDGAGLFLFDHAAEEYEHAKKLIIFLNENNVPVQLTSISAPEHKFEGLTQIFQKAYEHEQHISESINNIVDHAIKSKDHATFNFLQWYVAEQHEEEVLFKDILDKIELIGNENHGLYLADQYVKGIAKSRKS

SEQ ID NO: 9372 - protein, 1315 aa, Artificial Sequence; identical to SEQ ID NO: 9327
  SARS-CoV-2/Iceland/247/2020__EPI_ISL_417575 spike protein (1-1147)(Q965C_S1003C) Ferritin construct

SEQ ID NO: 9373 - protein, 1315 aa, Artificial Sequence
  SARS-CoV-2/Iceland/238/2020__EPI_ISL_417566 spike protein (1-1147)(Q965C_S1003C) Ferritin construct
MFVFLVLLPLVSSQCVNLTTRTQLPPAYTNSFTRGVYYPDKVFRSSVLHSTQDLFLPFFSNVTWFHAIHVSGTNGTKRFDNPVLPFNDGVYFASTEKSNIIRGWIFGTTLDSKTQSLLIVNNATNVVIKVCEFQFCNDPFLGVYYHKNNKSWMESEFRVYSSANNCTFEYVSQPFLMDLEGKQGNFKNLREFVFKNIDGYFKIYSKHTPINLVRDLPQGFSALEPLVDLPIGINITRFQTLLALHRSYLTPGDSSSGWTAGAAAYYVGYLQPRTFLLKYNENGTITDAVDCALDPLSETKCTLKSFTVEKGIYQTSNFRVQPTESIVRFPNITNLCPFGEVFNATRFASVYAWNRKRISNCVADYSVLYNSASFSTFKCYGVSPTKLNDLCFTNVYADSFVIRGDEVRQIAPGQTGKIADYNYKLPDDFTGCVIAWNSNNLDSKVGGNYNYLYRLFRKSNLKPFERDISTEIYQAGSTPCNGVEGFNCYFPLQSYGFQPTNGVGYQPYRVVVLSFELLHAPATVCGPKKSTNLVKNKCVNFNFNGLTGTGVLTESNKKFLPFQQFGRDIADTTDAVRDPQTLEILDITPCSFGGVSVITPGTNTSNQVAVLYQGVNCTEVPVAIHADQLTPTWRVYSTGSNVFQTRAGCLIGAEHVNNSYECDIPIGAGICASYQTQTNSPRRARSVASQSIIAYTMSLGAENSVAYSNNSIAIPTNFTISVTTEILPVSMTKTSVDCTMYICGDSTECSNLLLQYGSFCTQLNRALTGIAVEQDKNTQEVFAQVKQIYKTPPIKDFGGFNFSQILPDPSKPSKRSFIEDLLFNKVTLADVGFIKQYGDCLGDIAARDLICAQKFNGLTVLPPLLTDEMIAQYTSALLAGTITSGWTFGAGAALQIPFAMQMAYRFNGIGVTQNVLYENQKLIANQFNSAIGKIQDSLSSTASALGKLQDVVNQNAQALNTLVKCLSSNFGAISSVLNDILSRLDKVEAEVQIDRLITGRLQCLQTYVTQQLIRAAEIRASANLAATKMSECVLGQSKRVDFCGKGYHLMSFPQSAPHGVVFLHVTYVPAQEKNFTTAPAICHDGKAHFPREGVFVSNGTHWFVTQRNFYEPQIITTDNTFVSGNCDVVIGIVNNTVYDPLQPELDSGGGGSDIIKLLNEQVNKEMQSSNLYMSMSSWCYTHSLDGAGLFLFDHAAEEYEHAKKLIIFLNENNVPVQLTSISAPEHKFEGLTQIFQKAYEHEQHISESINNIVDHAIKSKDHATFNFLQWYVAEQHEEEVLFKDILDKIELIGNENHGLYLADQYVKGIAKSRKS

SEQ ID NO: 9374 - protein, 1315 aa, Artificial Sequence
  SARS-CoV-2/Greece/16/2020__EPI_ISL_418265 spike protein (1-1147)(Q965C_S1003C) Ferritin construct
MFVFLVLLPLVSSQCVNLTTRTQLPPAYTNSFTRGVYYPDKVFRSSVLHSTQDLFLPFFSNVTWFHAIHVSGTNGTKRFDNPVLPFNDGVYFASTEKSNIIRGWIFGTTLDSKTQSLLIVNNATNVVIKVCEFQFCNDPFLGVYYHKNNKSWMESEFRVYSSANNCTFEYVSQPFLMDLEGKQGNFKNLREFVFKNVDGYFKIYSKHTPINLVRDLPQGFSALEPLVDLPIGINITRFQTLLALHRSYLTPGDSSSGWTAGAAAYYVGYLQPRTFLLKYNENGTITDAVDCALDPLSETKCTLKSFTVEKGIYQTSNFRVQPTESIVRFPNITNLCPFGEVFNATRFASVYAWNRKRISNCVADYSVLYNSASFSTFKCYGVSPTKLNDLCFTNVYADSFVIRGDEVRQIAPGQTGKIADYNYKLPDDFTGCVIAWNSNNLDSKVGGNYNYLYRLFRKSNLKPFERDISTEIYQAGSTPCNGVEGFNCYFPLQSYGFQPTNGVGYQPYRVVVLSFELLHAPATVCGPKKSTNLVKNKCVNFNFNGLTGTGVLTESNKKFLPFQQFGRDIADTTDAVRDPQTLEILDITPCSFGGVSVITPGTNTSNQVAVLYQDVNCTEVPVAIHADQLTPTWRVYSTGSNVFQTRAGCLIGAEHVNNSYECDIPIGAGICASYQTQTNSPRRARSVASQSIIAYTMSLGAENSVAYSNNSIAIPTNFTISVTTEILPVSMTKTSVDCTMYICGDSTECSNLLLQYGSFCTQLNRALTGIAVEQDKNTQEVFAQVKQIYKTPPIKDFGGFNFSQILPDPSKPSKRSFIEDLLFNKVTLADAGFIKQYGDCLGDIAARDLICAQKFNGLTVLPPLLTDEMIAQYTSALLAGTITSGWTFGAGAALQIPFAMQMAYRFNGIGVTQNVLYENQKLIANQFNSAIGKIQDSLSSTASALGKLQDVVNQNAQALNTLVKCLSSNFGAISSVLNDILSRLDKVEAEVQIDRLITGRLQCLQTYVTQQLIRAAEIRASANLAATKMSECVLGQSKRVDFCGKGYHLMSFPQSAPHGVVFLHVTYVPAQEKNFTTAPAICHDGKAHFPREGVFVSNGTHWFVTQRNFYEPQIITTDNTFVSGNCDVVIGIVNNTVYDPLQPELDSGGGGSDIIKLLNEQVNKEMQSSNLYMSMSSWCYTHSLDGAGLFLFDHAAEEYEHAKKLIIFLNENNVPVQLTSISAPEHKFEGLTQIFQKAYEHEQHISESINNIVDHAIKSKDHATFNFLQWYVAEQHEEEVLFKDILDKIELIGNENHGLYLADQYVKGIAKSRKS

SEQ ID NO: 9375 - protein, 1315 aa, Artificial Sequence
  SARS-CoV-2/Iceland/319/2020__EPI_ISL_417648 spike protein (1-1147)(Q965C_S1003C) Ferritin construct
MFVFLVLLPLVSSQCVNLTTRTQLPPAYTNSFTRGVYYPDKVFRSSVLHSTQDLFLPFFSNVTWFHAIHVSGTNGTKRFDNPVLPFNDGVYFASTEKSNIIRGWIFGTTLDSKTQSLLIVNNATNVVIKVCEFQFCNDPFLGVYYHKNNKSWMESEFRVYSSANNCTFEYVSQPFLIDLEGKQGNFKNLREFVFKNIDGYFKIYSKHTPINLVRDLPQGFSALEPLVDLPIGINITRFQTLLALHRSYLTPGDSSSGWTAGAAAYYVGYLQPRTFLLKYNENGTITDAVDCALDPLSETKCTLKSFTVEKGIYQTSNFRVQPTESIVRFPNITNLCPFGEVFNATRFASVYAWNRKRISNCVADYSVLYNSASFSTFKCYGVSPTKLNDLCFTNVYADSFVIRGDEVRQIAPGQTGKIADYNYKLPDDFTGCVIAWNSNNLDSKVGGNYNYLYRLFRKSNLKPFERDISTEIYQAGSTPCNGVEGFNCYFPLQSYGFQPTNGVGYQPYRVVVLSFELLHAPATVCGPKKSTNLVKNKCVNFNFNGLTGTGVLTESNKKFLPFQQFGRDIADTTDAVRDPQTLEILDITPCSFGGVSVITPGTNTSNQVAVLYQGVNCTEVPVAIHADQLTPTWRVYSTGSNVFQTRAGCLIGAEHVNNSYECDIPIGAGICASYQTQTNSPRRARSVASQSIIAYTMSLGAENSVAYSNNSIAIPTNFTISVTTEILPVSMTKTSVDCTMYICGDSTECSNLLLQYGSFCTQLNRALTGIAVEQDKNTQEVFAQVKQIYKTPPIKDFGGFNFSQILPDPSKPSKRSFIEDLLFNKVTLADAGFIKQYGDCLGDIAARDLICAQKFNGLTVLPPLLTDEMIAQYTSALLAGTITSGWTFGAGAALQIPFAMQMAYRFNGIGVTQNVLYENQKLIANQFNSAIGKIQDSLSSTASALGKLQDVVNQNAQALNTLVKCLSSNFGAISSVLNDILSRLDKVEAEVQIDRLITGRLQCLQTYVTQQLIRAAEIRASANLAATKMSECVLGQSKRVDFCGKGYHLMSFPQSAPHGVVFLHVTYVPAQEKNFTTAPAICHDGKAHFPREGVFVSNGTHWFVTQRNFYEPQIITTDNTFVSGNCDVVIGIVNNTVYDPLQPELDSGGGGSDIIKLLNEQVNKEMQSSNLYMSMSSWCYTHSLDGAGLFLFDHAAEEYEHAKKLIIFLNENNVPVQLTSISAPEHKFEGLTQIFQKAYEHEQHISESINNIVDHAIKSKDHATFNFLQWYVAEQHEEEVLFKDILDKIELIGNENHGLYLADQYVKGIAKSRKS

SEQ ID NO: 9376 - protein, 1315 aa, Artificial Sequence
  SARS-CoV-2/Congo/94/2020__EPI_ISL_417947 spike protein (1-1147)(Q965C_S1003C) Ferritin construct
MFVFLVLLPLVSSQCVNLTTRTQLPPAYTNSFTRGVYYPDKVFRSSVLHSTQDLFLPFFSNVTWFHAIHVSGTNGTKRFDNPVLPFNDGVYFASTEKSNIIRGWIFGTTLDSKTQSLLIVNNATNVVIKVCEFQFCNDPFLGVYYHKNNKSWMESEFRVYSSANNCTFEYVSQPFLMDLEGKQGNFKNLREFVFKNIDGYFKIYSKHTPINLVRDLPQGFSALEPLVDLPIGINITRFQTLLALHRSYLTPGDSSSGWTAGAAAYYVGYLQPRTFLLKYNENGTITDAVDCALDPLSETKCTLKSFTVEKGIYQTSNFRVQPTESIVRFPNITNLCPFGEVFNATRFASVYAWNRKRISNCVADYSVLYNSASFSTFKCYGVSPTKLNDLCFTNVYADSFVIRGDEVRQIAPGQTGKIADYNYKLPDDFTGCVIAWNSNNLDSKVGGNYNYLYRLFRKSNLKPFERDISTEIYQAGSTPCNGVEGFNCYFPLQSYGFQPTNGVGYQPYRVVVLSFELLHAPATVCGPKKSTNLVKNKCVNFNFNGLTGTGVLTESNKKFLPFQQFGRDIADTTDAVRDPQTLEILDITPCSFGGVSVITPGTNTSNQVAVLYQGVNCTEVPVAIHADQLTPTWRVYSTGSNVFQTRAGCLIGAEHVNNSYECDIPIGAGICASYQTQTNSPRRARSVASQSIIAYTMSLGAENSVAYSNNSIAIPTNFTISVTTEILPVSMTKTSVDCTMYICGDSTECSNLLLQYGSFCTQLNRALTGIAVEQDKNTQEVFAQVKQIYKTPPIKDFGGFNFSQILPDPSKPSKRSFIEDILFNKVTLADAGFIKQYGDCLGDIAARDLICAQKFNGLTVLPPLLTDEMIAQYTSALLAGTITSGWTFGAGAALQIPFAMQMAYRFNGIGVTQNVLYENQKLIANQFNSAIGKIQDSLSSTASALGKLQDVVNQNAQALNTLVKCLSSNFGAISSVLNDILSRLDKVEAEVQIDRLITGRLQCLQTYVTQQLIRAAEIRASANLAATKMSECVLGQSKRVDFCGKGYHLMSFPQSAPHGVVFLHVTYVPAQEKNFTTAPAICHDGKAHFPREGVFVSNGTHWFVTQRNFYEPQIITTDNTFVSGNCDVVIGIVNNTVYDPLQPELDSGGGGSDIIKLLNEQVNKEMQSSNLYMSMSSWCYTHSLDGAGLFLFDHAAEEYEHAKKLIIFLNENNVPVQLTSISAPEHKFEGLTQIFQKAYEHEQHISESINNIVDHAIKSKDHATFNFLQWYVAEQHEEEVLFKDILDKIELIGNENHGLYLADQYVKGIAKSRKS

SEQ ID NO: 9377 - protein, 1315 aa, Artificial Sequence
  SARS-CoV-2/Congo/158/2020__EPI_ISL_417950 spike protein (1-1147)(Q965C_S1003C) Ferritin construct
MFVFLVLLPLVSSQCVNLTTRTQLPPAYTNSFTRGVYYPDKVFRSSVLHSTQDLFLPFFSNVTWFHAIHVSGTNGTKRFDNPVLPFNDGVYFASTEKSNIIRGWIFGTTLDSKTQSLLIVNNATNVVIKVCEFQFCNDPFLGVYYHKNNKSWMESEFRVYSSANNCTFEYVSQPFLMDLEGKQGNFKNLREFVFKNIDGYFKIYSKHTPINLVRDLPQGFSALEPLVDLPIGINITRFQTLLALHRSYLTPGDSSSGWTAGAAAYYVGYLQPRTFLLKYNENGTITDAVDCALDPLSETKCTLKSFTVEKGIYQTSNFRVQPTESIVRFPNITNLCPFGEVFNATRFASVYAWNRKRISNCVADYSVLYNSASFSTFKCYGVSPTKLNDLCFTNVYADSFVIRGDEVRQIAPGQTGKIADYNYKLPDDFTGCVIAWNSNNLDSKVGGNYNYLYRLFRKSNLKPFERDISTEIYQAGSTPCNGVEGFNCYFPLQSYGFQPTNGVGYQPYRVVVLSFELLHAPATVCGPKKSTNLVKNKCVNFNFNGLTGTGVLTESNKKFLPFQQFGRDIADTTDAVRDPQTLEILDITPCSFGGVSVITPGTNTSNQVAVLYQDVNCTEVPVAIHADQLTPTWRVYSTGSNVFQTRAGCLIGAEHVNNSYECDIPIGAGICASYQTQTNSPRRARSVASQSIIAYTMSLGAENSVAYSNNSIAIPTNFTISVTTEILPVSMTKTSVDCTMYICGDSTECSNLLLQYGSFCTQLNRALTGIAVEQDKNTQEVFAQVKQIYKTPPIKDFGGFNFSQILPDPSKPSKRSFIEDLLFNKVTLADAGFIKQYGDCLGDIAARDLICAQKFNGLTVLPPLLTDEMIAQYTSALLAGTITSGWTFGAGAALQIPFAMQMAYRFNGIGVTQNVLYENQKLIANQFNSAIGKIQDSLSSTASALGKLQDVVNQNAQALNTLVKCLSSNFGAISSVLNDILSRLDKVEAEVQIDRLITGRLQCLQTYVTQQLIRAAEIRASANLAATKMSECVLGQSKRVDFCGKGYHLMSFPQSAPHGVVFLHVTYVPAQEKNFTTAPAICHDGKAHFPREGVFVSNGTHWFVTQRNFYEPQIITTDNTFLSGNCDVVIGIVNNTVYDPLQPELDSGGGGSDIIKLLNEQVNKEMQSSNLYMSMSSWCYTHSLDGAGLFLFDHAAEEYEHAKKLIIFLNENNVPVQLTSISAPEHKFEGLTQIFQKAYEHEQHISESINNIVDHAIKSKDHATFNFLQWYVAEQHEEEVLFKDILDKIELIGNENHGLYLADQYVKGIAKSRKS

SEQ ID NO: 9378 - protein, 1315 aa, Artificial Sequence
  SARS-CoV-2/USA/UT-00034/2020__EPI_ISL_417977 spike protein (1-1147)(Q965C_S1003C) Ferritin construct
MFVFLVLLPLVSSQCVNLTTRTQLPPAYTNSFTRGVYYPDKVFRSSVLHSTQDLFLPFFSNVTWFHAIHVSGTNGTKRFDNPVLPFNDGVYFASTEKSNIIRGWIFGTTLDSKTQSLLIVNNATNVVIKVCEFQFCNDPFLGVYYYKNNKSWMESEFRVYSSANNCTFEYVSQPFLMDLEGKQGNFKNLREFVFKNIDGYFKIYSKHTPINLVRDLPQGFSALEPLVDLPIGINITRFQTLLALHRSYLTPGDSSSGWTAGAAAYYVGYLQPRTFLLKYNENGTITDAVDCALDPLSETKCTLKSFTVEKGIYQTSNFRVQPTESIVRFPNITNLCPFGEVFNATRFASVYAWNRKRISNCVADYSVLYNSASFSTFKCYGVSPTKLNDLCFTNVYADSFVIRGDEVRQIAPGQTGKIADYNYKLPDDFTGCVIAWNSNNLDSKVGGNYNYLYRLFRKSNLKPFERDISTEIYQAGSTPCNGVEGFNCYFPLQSYGFQPTNGVGYQPYRVVVLSFELLHAPATVCGPKKSTNLVKNKCVNFNFNGLTGTGVLTESNKKFLPFQQFGRDIADTTDAVRDPQTLEILDITPCSFGGVSVITPGTNTSNQVAVLYQGVNCTEVPVAIHADQLTPTWRVYSTGSNVFQTRAGCLIGAEHVNNSYECDIPIGAGICASYQTQTNSPRRARSVASQSIIAYTMSLGAENSVAYSNNSIAIPTNFTISVTTEILPVSMTKTSVDCTMYICGDSTECSNLLLQYGSFCTQLNRALTGIAVEQDKNTQEVFAQVKQIYKTPPIKDFGGFNFSQILPDPSKPSKRSFIEDLLFNKVTLADAGFIKQYGDCLGDIAARDLICAQKFNGLTVLPPLLTDEMIAQYTSALLAGTITSGWTFGAGAALQIPFAMQMAYRFNGIGVTQNVLYENQKLIANQFNSAIGKIQDSLSSTASALGKLQDVVNQNAQALNTLVKCLSSNFGAISSVLNDILSRLDKVEAEVQIDRLITGRLQCLQTYVTQQLIRAAEIRASANLAATKMSECVLGQSKRVDFCGKGYHLMSFPQSAPHGVVFLHVTYVPAQEKNFTTAPAICHDGKAHFPREGVFVSNGTHWFVTQRNFYEPQIITTDNTFVSGNCDVVIGIVNNTVYDPLQPELDSGGGGSDIIKLLNEQVNKEMQSSNLYMSMSSWCYTHSLDGAGLFLFDHAAEEYEHAKKLIIFLNENNVPVQLTSISAPEHKFEGLTQIFQKAYEHEQHISESINNIVDHAIKSKDHATFNFLQWYVAEQHEEEVLFKDILDKIELIGNENHGLYLADQYVKGIAKSRKS

SEQ ID NO: 9379 - protein, 1315 aa, Artificial Sequence
  SARS-CoV-2/USA/UT-00033/2020__EPI_ISL_417976 spike protein (1-1147)(Q965C_S1003C) Ferritin construct
MFVFLVLLPLVSSQCVNLTTRTQLPPAYTNSFTRGVYYPDKVFRSSVLHSTQDLFLPFFSNVTWFHAIHVSGTNGTKRFDNPVLPFNDGVYFASTEKSNIIRGWIFGTTLDSKTQSLLIVNNATNVVIKVCEFQFCNDPFLGVYYHKNNKSWMESEFRVYSSANNCTFEYVSQPFLMDLEGKQGNFKNLREFVFKNIDGYFKIYSKHTPINLVRDLPQGFSALEPLVDLPIGINITRFQTLLALHRSYLTPGDSSSGLTAGAAAYYVGYLQPRTFLLKYNENGTITDAVDCALDPLSETKCTLKSFTVEKGIYQTSNFRVQPTESIVRFPNITNLCPFGEVFNATRFASVYAWNRKRISNCVADYSVLYNSASFSTFKCYGVSPTKLNDLCFTNVYADSFVIRGDEVRQIAPGQTGKIADYNYKLPDDFTGCVIAWNSNNLDSKVGGNYNYLYRLFRKSNLKPFERDISTEIYQAGSTPCNGVEGFNCYFPLQSYGFQPTNGVGYQPYRVVVLSFELLHAPATVCGPKKSTNLVKNKCVNFNFNGLTGTGVLTESNKKFLPFQQFGRDIADTTDAVRDPQTLEILDITPCSFGGVSVITPGTNTSNQVAVLYQGVNCTEVPVAIHADQLTPTWRVYSTGSNVFQTRAGCLIGAEHVNNSYECDIPIGAGICASYQTQTNSPRRARSVASQSIIAYTMSLGAENSVAYSNNSIAIPTNFTISVTTEILPVSMTKTSVDCTMYICGDSTECSNLLLQYGSFCTQLNRALTGIAVEQDKNTQEVFAQVKQIYKTPPIKDFGGFNFSQILPDPSKPSKRSFIEDLLFNKVTLADAGFIKQYGDCLGDIAARDLICAQKFNGLTVLPPLLTDEMIAQYTSALLAGTITSGWTFGAGAALQIPFAMQMAYRFNGIGVTQNVLYENQKLIANQFNSAIGKIQDSLSSTASALGKLQDVVNQNAQALNTLVKCLSSNFGAISSVLNDILSRLDKVEAEVQIDRLITGRLQCLQTYVTQQLIRAAEIRASANLAATKMSECVLGQSKRVDFCGKGYHLMSFPQSAPHGVVFLHVTYVPAQEKNFTTAPAICHDGKAHFPREGVFVSNGTHWFVTQRNFYEPQIITTDNTFVSGNCDVVIGIVNNTVYDPLQPELDSGGGGSDIIKLLNEQVNKEMQSSNLYMSMSSWCYTHSLDGAGLFLFDHAAEEYEHAKKLIIFLNENNVPVQLTSISAPEHKFEGLTQIFQKAYEHEQHISESINNIVDHAIKSKDHATFNFLQWYVAEQHEEEVLFKDILDKIELIGNENHGLYLADQYVKGIAKSRKS

SEQ ID NO: 9380 - protein, 1315 aa, Artificial Sequence
  SARS-CoV-2/USA/WI-13/2020__EPI_ISL_417516 spike protein (1-1147)(Q965C_S1003C) Ferritin construct
MFVFLVLLPLVSSQCVNLTTRTQLPPAYTNSFTRGVYYPDKVFRSSVLHSTQDLFLPFFSNVTWFHAIHVSGTNGTKRFDNPVLPFNDGVYFASTEKSNIIRGWIFGTTLDSKTQSLLIVNNATNVVIKVCEFQFCNDPFLGVYYHKNNKSWMESEFRVYSSANNCTFEYVSQPFLMDLEGKQGNFKNLREFVFKNIDGYFKIYSKHTPINLVRDLPQGFSALEPLVDLPIGINITRFQTLLALHRSYLTPGDSSSGWTAGAAAYYVGYLQPRTFLLKYNENGTITDAVDCALDPLSETKCTLKSFTVEKGIYQTSNFRVLPTESIVRFPNITNLCPFGEVFNATRFASVYAWNRKRISNCVADYSVLYNSASFSTFKCYGVSPTKLNDLCFTNVYADSFVIRGDEVRQIAPGQTGKIADYNYKLPDDFTGCVIAWNSNNLDSKVGGNYNYLYRLFRKSNLKPFERDISTEIYQAGSTPCNGVEGFNCYFPLQSYGFQPTNGVGYQPYRVVVLSFELLHAPATVCGPKKSTNLVKNKCVNFNFNGLTGTGVLTESNKKFLPFQQFGRDIADTTDAVRDPQTLEILDITPCSFGGVSVITPGTNTSNQVAVLYQGVNCTEVPVAIHADQLTPTWRVYSTGSNVFQTRAGCLIGAEHVNNSYECDIPIGAGICASYQTQTNSPRRARSVASQSIIAYTMSLGAENSVAYSNNSIAIPTNFTISVTTEILPVSMTKTSVDCTMYICGDSTECSNLLLQYGSFCTQLNRALTGIAVEQDKNTQEVFAQVKQIYKTPPIKDFGGFNFSQILPDPSKPSKRSFIEDLLFNKVTLADAGFIKQYGDCLGDIAARDLICAQKFNGLTVLPPLLTDEMIAQYTSALLAGTITSGWTFGAGAALQIPFAMQMAYRFNGIGVTQNVLYENQKLIANQFNSAIGKIQDSLSSTASALGKLQDVVNQNAQALNTLVKCLSSNFGAISSVLNDILSRLDKVEAEVQIDRLITGRLQCLQTYVTQQLIRAAEIRASANLAATKMSECVLGQSKRVDFCGKGYHLMSFPQSAPHGVVFLHVTYVPAQEKNFTTAPAICHDGKAHFPREGVFVSNGTHWFVTQRNFYEPQIITTDNTFVSGNCDVVIGIVNNTVYDPLQPELDSGGGGSDIIKLLNEQVNKEMQSSNLYMSMSSWCYTHSLDGAGLFLFDHAAEEYEHAKKLIIFLNENNVPVQLTSISAPEHKFEGLTQIFQKAYEHEQHISESINNIVDHAIKSKDHATFNFLQWYVAEQHEEEVLFKDILDKIELIGNENHGLYLADQYVKGIAKSRKS

SEQ ID NO: 9381 - protein, 1314 aa, Artificial Sequence
  SARS-CoV-2/India/1-27/2020__EPI_ISL_413522 spike protein (1-1146)(Q964C_S1002C) Ferritin construct
MFVFLVLLPLVSSQCVNLTTRTQLPPAYTNSFTRGVYYPDKVFRSSVLHSTQDLFLPFFSNVTWFHAIHVSGTNGTKRFDNPVLPFNDGVYFASTEKSNIIRGWIFGTTLDSKTQSLLIVNNATNVVIKVCEFQFCNDPFLGVYHKNNKSWMESEFRVYSSANNCTFEYVSQPFLMDLEGKQGNFKNLREFVFKNIDGYFKIYSKHTPINLVRDLPQGFSALEPLVDLPIGINITRFQTLLALHRSYLTPGDSSSGWTAGAAAYYVGYLQPRTFLLKYNENGTITDAVDCALDPLSETKCTLKSFTVEKGIYQTSNFRVQPTESIVRFPNITNLCPFGEVFNATRFASVYAWNRKRISNCVADYSVLYNSASFSTFKCYGVSPTKLNDLCFTNVYADSFVIRGDEVIQIAPGQTGKIADYNYKLPDDFTGCVIAWNSNNLDSKVGGNYNYLYRLFRKSNLKPFERDISTEIYQAGSTPCNGVEGFNCYFPLQSYGFQPTNGVGYQPYRVVVLSFELLHAPATVCGPKKSTNLVKNKCVNFNFNGLTGTGVLTESNKKFLPFQQFGRDIADTTDAVRDPQTLEILDITPCSFGGVSVITPGTNTSNQVAVLYQDVNCTEVPVAIHADQLTPTWRVYSTGSNVFQTRAGCLIGAEHVNNSYECDIPIGAGICASYQTQTNSPRRARSVASQSIIAYTMSLGAENSVAYSNNSIAIPTNFTISVTTEILPVSMTKTSVDCTMYICGDSTECSNLLLQYGSFCTQLNRALTGIAVEQDKNTQEVFAQVKQIYKTPPIKDFGGFNFSQILPDPSKPSKRSFIEDLLFNKVTLADAGFIKQYGDCLGDIAARDLICAQKFNGLTVLPPLLTDEMIAQYTSALLAGTITSGWTFGAGAALQIPFAMQMAYRFNGIGVTQNVLYENQKLIANQFNSAIGKIQDSLSSTASALGKLQDVVNQNAQALNTLVKCLSSNFGAISSVLNDILSRLDKVEAEVQIDRLITGRLQCLQTYVTQQLIRAAEIRASANLAATKMSECVLGQSKRVDFCGKGYHLMSFPQSAPHGVVFLHVTYVPAQEKNFTTAPAICHDGKAHFPREGVFVSNGTHWFVTQRNFYEPQIITTDNTFVSGNCDVVIGIVNNTVYDPLQPELDSGGGGSDIIKLLNEQVNKEMQSSNLYMSMSSWCYTHSLDGAGLFLFDHAAEEYEHAKKLIIFLNENNVPVQLTSISAPEHKFEGLTQIFQKAYEHEQHISESINNIVDHAIKSKDHATFNFLQWYVAEQHEEEVLFKDILDKIELIGNENHGLYLADQYVKGIAKSRKS

SEQ ID NO: 9382 - protein, 1309 aa, Artificial Sequence
  SARS-CoV-2/pangolin/Guangxi/P4L/2017__EPI_ISL_410538 spike protein (1-1141)(Q959C_S997C) Ferritin construct
MFVFLFVLPLVSSQCVNLTTRTGIPPGYTNSSTRGVYYPDKVFRSSILHLTQDLFLPFFSNVTWFNTINYQGGFKKFDNPVLPFNDGVYFASTEKSNIIRGWIFGTTLDARTQSLLIVNNATNVVIKVCEFQFCTDPFLGVYYHNNNKTWVENEFRVYSSANNCTFEYISQPFLMDLEGKQGNFKNLREFVFKNVDGYFKIYSKHTPIDLVRDLPRGFAALEPLVDLPIGINITRFQTLLALHRSYLTPGNLESGWTTGAAAYYVGYLQQRTFLLSYNQNGTITDAVDCSLDPLSETKCTLKSLTVEKGIYQTSNFRVQPTISIVRFPNITNLCPFGEVFNASKFASVYAWNRKRISNCVADYSVLYNSTSFSTFKCYGVSPTKLNDLCFTNVYADSFVVKGDEVRQIAPGQTGVIADYNYKLPDDFTGCVIAWNSVKQDALTGGNYGYLYRLFRKSKLKPFERDISTEIYQAGSTPCNGQVGLNCYYPLERYGFHPTTGVNYQPFRVVVLSFELLNGPATVCGPKLSTTLVKDKCVNFNFNGLTGTGVLTTSKKQFLPFQQFGRDISDTTDAVRDPQTLEILDITPCSFGGVSVITPGTNTSNQVAVLYQDVNCTEVPMAIHAEQLTPAWRVYSAGANVFQTRAGCLVGAEHVNNSYECDIPVGAGICASYHSMSSLRSVNQRSIIAYTMSLGAENSVAYSNNSIAIPTNFTISVTTEILPVSMTKTSVDCTMYICGDSIECSNLLLQYGSFCTQLNRALTGIAVEQDKNTQEVFAQVKQIYKTPPIKDFGGFNFSQILPDPSKPSKRSFIEDLLFNKVTLADAGFIKQYGDCLGDIAARDLICAQKFNGLTVLPPLLTDEMIAQYTSALLAGTITSGWTFGAGAALQIPFAMQMAYRFNGIGVTQNVLYENQKLIANQFNSAIGKIQDSLSSTASALGKLQDVVNQNAQALNTLVKCLSSNFGAISSVLNDILSRLDKVEAEVQIDRLITGRLQCLQTYVTQQLIRAAEIRASANLAATKMSECVLGQSKRVDFCGKGYHLMSFPQSAPHGVVFLHVTYVPAQEKNFTTAPAICHEGKAHFPREGVFVSNGTHWFITQRNFYEPQIITTDNTFVSGSCDVVIGIVNNTVYDPLQPELDSGGGGSDIIKLLNEQVNKEMQSSNLYMSMSSWCYTHSLDGAGLFLFDHAAEEYEHAKKLIIFLNENNVPVQLTSISAPEHKFEGLTQIFQKAYEHEQHISESINNIVDHAIKSKDHATFNFLQWYVAEQHEEEVLFKDILDKIELIGNENHGLYLADQYVKGIAKSRKS

SEQ ID NO: 9383 - protein, 1309 aa, Artificial Sequence
  SARS-CoV-2/pangolin/Guangxi/P5L/2017__EPI_ISL_410540 spike protein (1-1141)(Q959C_S997C) Ferritin construct
MFVFLFVLPLVSSQCVNLTTRTGIPPGYTNSSTRGVYYPDKVFRSSILHLTQDLFLPFFSNVTWFNTINYQGGFKKFDNPVLPFNDGVYFASTEKSNIIRGWIFGTTLDARTQSLLIVNNATNVVIKVCEFQFCTDPFLGVYYHNNNKTWVENEFRVYSSANNCTFEYISQPFLMDLEGKQGNFKNLREFVFKNVDGYFKIYSKHTPIDLVRDLPRGFAALEPLVDLPIGINITRFQTLLALHRSYLTPGKLESGWTTGAAAYYVGYLQQRTFLLSYNQNGTITDAVDCSLDPLSETKCTLKSLTVEKGIYQTSNFRVQPTISIVRFPNITNLCPFGEVFNASKFASVYAWNRKRISNCVADYSVLYNSTSFSTFKCYGVSPTKLNDLCFTNVYADSFVVKGDEVRQIAPGQTGVIADYNYKLPDDFTGCVIAWNSVKQDALTGGNYGYLYRLFRKSKLKPFERDISTEIYQAGSTPCNGQVGLNCYYPLERYGFHPTTGVNYQPFRVVVLSFELLNGPATVCGPKLSTTLVKDKCVNFNFNGLTGTGVLTTSKKQFLPFQQFGRDISDTTDAVRDPQTLEILDITPCSFGGVSVITPGTNTSNQVAVLYQDVNCTEVPMAIHAEQLTPAWRVYSAGANVFQTRAGCLVGAEHVNNSYECDIPVGAGICASYHSMSSFRSVNQRSIIAYTMSLGAENSVAYSNNSIAIPTNFTISVTTEILPVSMTKTSVDCTMYICGDSIECSNLLLQYGSFCTQLNRALTGIAVEQDKNTQEVFAQVKQIYKTPPIKDFGGFNFSQILPDPSKPSKRSFIEDLLFNKVTLADAGFIKQYGDCLGDIAARDLICAQKFNGLTVLPPLLTDEMIAQYTSALLAGTITSGWTFGAGAALQIPFAMQMAYRFNGIGVTQNVLYENQKLIANQFNSAIGKIQDSLSSTASALGKLQDVVNQNAQALNTLVKCLSSNFGAISSVLNDILSRLDKVEAEVQIDRLITGRLQCLQTYVTQQLIRAAEIRASANLAATKMSECVLGQSKRVDFCGKGYHLMSFPQSAPHGVVFLHVTYVPAQEKNFTTAPAICHEGKAHFPREGVFVSNGTHWFITQRNFYEPQIITTDNTFVSGSCDVVIGIVNNTVYDPLQPELDSGGGGSDIIKLLNEQVNKEMQSSNLYMSMSSWCYTHSLDGAGLFLFDHAAEEYEHAKKLIIFLNENNVPVQLTSISAPEHKFEGLTQIFQKAYEHEQHISESINNIVDHAIKSKDHATFNFLQWYVAEQHEEEVLFKDILDKIELIGNENHGLYLADQYVKGIAKSRKS

SEQ ID NO: 9384 - protein, 1309 aa, Artificial Sequence
  SARS-CoV-2/pangolin/Guangxi/P5E/2017__EPI_ISL_410541 spike protein (1-1141)(Q959C_S997C) Ferritin construct
MFVFLFVLPLVSSQCVNLTTRTGIPPGYTNSSTRGVYYPDKVFRSSILHLTQDLFLPFFSNVTWFNTITYQGGSKKFDNPVLPFNDGVYFASTEKSNIIRGWIFGTTLDARTQSLLIVNNATNVVIKVCEFQFCTDPFLGVYYHNNNKTWVENEFRVYSSANNCTFEYISQPFLMDLEGKQGNFKNLREFVFKNVDGYFKIYSKHTPIDLVRDLPRGFAALEPLVDLPIGINITRFQTLLALHRSYLTPGKLESGWTTGAAAYYVGYLQQRTFLLSYNQNGTITDAVDCSLDPLSETKCTLKSLTVEKGIYQTSNFRVQPTISIVRFPNITNLCPFGEVFNASKFASVYAWNRKRISNCVADYSVLYNSTSFSTFKCYGVSPTKLNDLCFTNVYADSFVVKGDEVRQIAPGQTGVIADYNYKLPDDFTGCVIAWNSVKQDALTGDNYGYLYRLFRKSKLKPFERDISTEIYQAGSTPCNGQVGLNCYYPLERYGFHPTTGVNYQPFRVVVLSFELLNGPATVCGPKLSTTLVKDKCVNFNFNGLTGTGVLTTSKKQFLPFQQFGRDISDTTDAVRDPQTLEILDITPCSFGGVSVITPGTNTSNQVAVLYQDVNCTEVPMAIHAEQLTPAWRVYSAGANVFQTRAGCLVGAEHVNNSYECDIPVGAGICASYHSMSSFRSVNQRSIIAYTMSLGAENSVAYSNNSIAIPTNFTISVTTEILPVSMTKTSVDCTMYICGDSIECSNLLLQYGSFCTQLNRALTGIAVEQDKNTQEVFAQVKQIYKTPPIKDFGGFNFSQILPDPSKPSKRSFIEDLLFNKVTLADAGFIKQYGDCLGDIAARDLICAQKFNGLTVLPPLLTDEMIAQYTSALLAGTITSGWTFGAGAALQIPFAMQMAYRFNGIGVTQNVLYENQKLIANQFNSAIGKIQDSLSSTASALGKLQDVVNQNAQALNTLVKCLSSNFGAISSVLNDILSRLDKVEAEVQIDRLITGRLQCLQTYVTQQLIRAAEIRASANLAATKMSECVLGQSKRVDFCGKGYHLMSFPQSAPHGVVFLHVTYVPAQEKNFTTAPAICHEGKAHFPREGVFVSNGTHWFITQRNFYEPQIITTDNTFVSGSCDVVIGIVNNTVYDPLQPELDSGGGGSDIIKLLNEQVNKEMQSSNLYMSMSSWCYTHSLDGAGLFLFDHAAEEYEHAKKLIIFLNENNVPVQLTSISAPEHKFEGLTQIFQKAYEHEQHISESINNIVDHAIKSKDHATFNFLQWYVAEQHEEEVLFKDILDKIELIGNENHGLYLADQYVKGIAKSRKS

SEQ ID NO: 9385 - protein, 1307 aa, Artificial Sequence
  SARS-CoV-2/pangolin/Guangxi/P1E/2017__EPI_ISL_410539 spike protein (1-1139)(Q957C_S995C) Ferritin construct
MFVFLFVLPLVSSQCVNLTTRTGIQPGYTNSSTRGVYYPDKVFRSSILHLTQDLFLPFFSNVTWFNTINYQGGFKKFDNPVLPFNDGVYFASTEKSNIIRGWIFGTTLDARTQSLLIVNNATNVVIKVCEFQFCTDPFLGVYYHNNNKTWVENEFRVYSSANNCTFEYISQPFLMDLEGKQGNFKNLREFVFKNVDGYFKIYSKHTPIDLVRDLPRGFAALEPLVDLPIGINITRFQTLLALHRSYLTPGKLESGWTTGAAAYYVGYLQQRTFLLSYNQNGTITDAVDCSLDPLSETKCTLKSLTVEKGIYQTSNFRVQPTISIVRFPNITNLCPFGEVFNASKFASVYAWNRKRISNCVADYSVLYNSTSFSTFKCYGVSPTKLNDLCFTNVYADSFVVKGDEVRQIAPGQTGVIADYNYKLPDDFTGCVIAWNSVKQDALTGGNYLYRLFRKSKLKPFERDISTEIYQAGSTPCNGQVGLNCYYPLERYGFHPTTGVNYQPFRVVVLSFELLNGPATVCGPKLSTTLVKDKCVNFNFNGLTGTGVLTTSKKQFLPFQQFGRDISDTTDAVRDPQTLEILDITPCSFGGVSVITPGTNTSNQVAVLYQDVNCTEVPMAIHAEQLTPAWRVYSAGANVFQTRAGCLVGAEHVNNSYECDIPVGAGICASYHSMSSLRSVNQRSIIAYTMSLGAENSVAYSNNSIAIPTNFTISVTTEILPVSMTKTSVDCTMYICGDSIECSNLLLQYGSFCTQLNRALTGIAVEQDKNTQEVFAQVKQIYKTPPIKDFGGFNFSQILPDPSKPSKRSFIEDLLFNKVTLADAGFIKQYGDCLGDIAARDLICAQKFNGLTVLPPLLTDEMIAQYTSALLAGTITSGWTFGAGAALQIPFAMQMAYRFNGIGVTQNVLYENQKLIANQFNSAIGKIQDSLSSTASALGKLQDVVNQNAQALNTLVKCLSSNFGAISSVLNDILSRLDKVEAEVQIDRLITGRLQCLQTYVTQQLIRAAEIRASANLAATKMSECVLGQSKRVDFCGKGYHLMSFPQSAPHGVVFLHVTYVPAQEKNFTTAPAICHEGKAHFPREGVFVSNGTHWFITQRNFYEPQIITTDNTFVSGSCDVVIGIVNNTVYDPLQPELDSGGGGSDIIKLLNEQVNKEMQSSNLYMSMSSWCYTHSLDGAGLFLFDHAAEEYEHAKKLIIFLNENNVPVQLTSISAPEHKFEGLTQIFQKAYEHEQHISESINNIVDHAIKSKDHATFNFLQWYVAEQHEEEVLFKDILDKIELIGNENHGLYLADQYVKGIAKSRKS

SEQ ID NO: 9386 - protein, 1315 aa, Artificial Sequence
  SARS-CoV-2/Wuhan/WIV05/2019__EPI_ISL_402128 spike protein (1-1147)(F970C_G999C) Ferritin construct
MFVFLVLLPLVSSQCVNLTTRTQLPPAYTNSFTRGVYYPDKVFRSSVLHSTQDLFLPFFSNVTWFHAIHVSGTNGTKRFDNPVLPFNDGVYFASTEKSNIIRGWIFGTTLDSKTQSLLIVNNATNVVIKVCEFQFCNDPFLGVYYHKNNKSWMESEFRVYSSANNCTFEYVSQPFLMDLEGKQGNFKNLREFVFKNIDGYFKIYSKHTPINLVRDLPQGFSALEPLVDLPIGINITRFQTLLALHRSYLTPGDSSSGWTAGAAAYYVGYLQPRTFLLKYNENGTITDAVDCALDPLSETKCTLKSFTVEKGIYQTSNFRVQPTESIVRFPNITNLCPFGEVFNATRFASVYAWNRKRISNCVADYSVLYNSASFSTFKCYGVSPTKLNDLCFTNVYADSFVIRGDEVRQIAPGQTGKIADYNYKLPDDFTGCVIAWNSNNLDSKVGGNYNYLYRLFRKSNLKPFERDISTEIYQAGSTPCNGVEGFNCYFPLQSYGFQPTNGVGYQPYRVVVLSFELLHAPATVCGPKKSTNLVKNKCVNFNFNGLTGTGVLTESNKKFLPFQQFGRDIADTTDAVRDPQTLEILDITPCSFGGVSVITPGTNTSNQVAVLYQDVNCTEVPVAIHADQLTPTWRVYSTGSNVFQTRAGCLIGAEHVNNSYECDIPIGAGICASYQTQTNSPRRARSVASQSIIAYTMSLGAENSVAYSNNSIAIPTNFTISVTTEILPVSMTKTSVDCTMYICGDSTECSNLLLQYGSFCTQLNRALTGIAVEQDKNTQEVFAQVKQIYKTPPIKDFGGFNFSQILPDPSKPSKRSFIEDLLFNKVTLADAGFIKQYGDCLGDIAARDLICAQKFNGLTVLPPLLTDEMIAQYTSALLAGTITSGWTFGAGAALQIPFAMQMAYRFNGIGVTQNVLYENQKLIANQFNSAIGKIQDSLSSTASALGKLQDVVNQNAQALNTLVKQLSSNCGAISSVLNDILSRLDKVEAEVQIDRLITCRLQSLQTYVTQQLIRAAEIRASANLAATKMSECVLGQSKRVDFCGKGYHLMSFPQSAPHGVVFLHVTYVPAQEKNFTTAPAICHDGKAHFPREGVFVSNGTHWFVTQRNFYEPQIITTDNTFVSGNCDVVIGIVNNTVYDPLQPELDSGGGGSDIIKLLNEQVNKEMQSSNLYMSMSSWCYTHSLDGAGLFLFDHAAEEYEHAKKLIIFLNENNVPVQLTSISAPEHKFEGLTQIFQKAYEHEQHISESINNIVDHAIKSKDHATFNFLQWYVAEQHEEEVLFKDILDKIELIGNENHGLYLADQYVKGIAKSRKS

SEQ ID NO: 9387 - protein, 1311 aa, Artificial Sequence
  SARS-CoV-2/bat/Yunnan/RaTG13/2013__EPI_ISL_402131 spike protein (1-1143)(F966C_G995C) Ferritin construct
MFVFLVLLPLVSSQCVNLTTRTQLPPAYTNSSTRGVYYPDKVFRSSVLHLTQDLFLPFFSNVTWFHAIHVSGTNGIKRFDNPVLPFNDGVYFASTEKSNIIRGWIFGTTLDSKTQSLLIVNNATNVVIKVCEFQFCNDPFLGVYYHKNNKSWMESEFRVYSSANNCTFEYVSQPFLMDLEGKQGNFKNLREFVFKNIDGYFKIYSKHTPINLVRDLPPGFSALEPLVDLPIGINITRFQTLLALHRSYLTPGDSSSGWTAGAAAYYVGYLQPRTFLLKYNENGTITDAVDCALDPLSETKCTLKSFTVEKGIYQTSNFRVQPTDSIVRFPNITNLCPFGEVFNATTFASVYAWNRKRISNCVADYSVLYNSTSFSTFKCYGVSPTKLNDLCFTNVYADSFVITGDEVRQIAPGQTGKIADYNYKLPDDFTGCVIAWNSKHIDAKEGGNFNYLYRLFRKANLKPFERDISTEIYQAGSKPCNGQTGLNCYYPLYRYGFYPTDGVGHQPYRVVVLSFELLNAPATVCGPKKSTNLVKNKCVNFNFNGLTGTGVLTESNKKFLPFQQFGRDIADTTDAVRDPQTLEILDITPCSFGGVSVITPGTNASNQVAVLYQDVNCTEVPVAIHADQLTPTWRVYSTGSNVFQTRAGCLIGAEHVNNSYECDIPIGAGICASYQTQTNSRSVASQSIIAYTMSLGAENSVAYSNNSIAIPTNFTISVTTEILPVSMTKTSVDCTMYICGDSTECSNLLLQYGSFCTQLNRALTGIAVEQDKNTQEVFAQVKQIYKTPPIKDFGGFNFSQILPDPSKPSKRSFIEDLLFNKVTLADAGFIKQYGDCLGDIAARDLICAQKFNGLTVLPPLLTDEMIAQYTSALLAGTITSGWTFGAGAALQIPFAMQMAYRFNGIGVTQNVLYENQKLIANQFNSAIGKIQDSLSSTASALGKLQDVVNQNAQALNTLVKQLSSNCGAISSVLNDILSRLDKVEAEVQIDRLITCRLQSLQTYVTQQLIRAAEIRASANLAATKMSECVLGQSKRVDFCGKGYHLMSFPQSAPHGVVFLHVTYVPAQEKNFTTAPAICHDGKAHFPREGVFVSNGTHWFVTQRNFYEPQIITTDNTFVSGSCDVVIGIVNNTVYDPLQPELDSGGGGSDIIKLLNEQVNKEMQSSNLYMSMSSWCYTHSLDGAGLFLFDHAAEEYEHAKKLIIFLNENNVPVQLTSISAPEHKFEGLTQIFQKAYEHEQHISESINNIVDHAIKSKDHATFNFLQWYVAEQHEEEVLFKDILDKIELIGNENHGLYLADQYVKGIAKSRKS

SEQ ID NO: 9388 - protein, 1315 aa, Artificial Sequence
  SARS-CoV-2/Wuhan/HBCDC-HB-01/2019__EPI_ISL_402132 spike protein (1-1147)(F970C_G999C) Ferritin construct
MFVFLVLLPLVSSQCVNLTTRTQLPPAYTNSITRGVYYPDKVFRSSVLHSTQDLFLPFFSNVTWFHAIHVSGTNGTKRFDNPVLPFNDGVYFASTEKSNIIRGWIFGTTLDSKTQSLLIVNNATNVVIKVCEFQFCNDPFLGVYYHKNNKSWMESEFRVYSSANNCTFEYVSQPFLMDLEGKQGNFKNLREFVFKNIDGYFKIYSKHTPINLVRDLPQGFSALEPLVDLPIGINITRFQTLLALHRSYLTPGDSSSGWTAGAAAYYVGYLQPRTFLLKYNENGTITDAVDCALDPLSETKCTLKSFTVEKGIYQTSNFRVQPTESIVRFPNITNLCPFGEVFNATRFASVYAWNRKRISNCVADYSVLYNSASFSTFKCYGVSPTKLNDLCFTNVYADSFVIRGDEVRQIAPGQTGKIADYNYKLPDDFTGCVIAWNSNNLDSKVGGNYNYLYRLFRKSNLKPFERDISTEIYQAGSTPCNGVEGFNCYFPLQSYGFQPTNGVGYQPYRVVVLSFELLHAPATVCGPKKSTNLVKNKCVNFNFNGLTGTGVLTESNKKFLPFQQFGRDIADTTDAVRDPQTLEILDITPCSFGGVSVITPGTNTSNQVAVLYQDVNCTEVPVAIHADQLTPTWRVYSTGSNVFQTRAGCLIGAEHVNNSYECDIPIGAGICASYQTQTNSPRRARSVASQSIIAYTMSLGAENSVAYSNNSIAIPTNFTISVTTEILPVSMTKTSVDCTMYICGDSTECSNLLLQYGSFCTQLNRALTGIAVEQDKNTQEVFAQVKQIYKTPPIKDFGGFNFSQILPDPSKPSKRSFIEDLLFNKVTLADAGFIKQYGDCLGDIAARDLICAQKFNGLTVLPPLLTDEMIAQYTSALLAGTITSGWTFGAGAALQIPFAMQMAYRFNGIGVTQNVLYENQKLIANQFNSAIGKIQDSLSSTASALGKLQDVVNQNAQALNTLVKQLSSNCGAISSVLNDILSRLDKVEAEVQIDRLITCRLQSLQTYVTQQLIRAAEIRASANLAATKMSECVLGQSKRVDFCGKGYHLMSFPQSAPHGVVFLHVTYVPAQEKNFTTAPAICHDGKAHFPREGVFVSNGTHWFVTQRNFYEPQIITTDNTFVSGNCDVVIGIVNNTVYDPLQPELDSGGGGSDIIKLLNEQVNKEMQSSNLYMSMSSWCYTHSLDGAGLFLFDHAAEEYEHAKKLIIFLNENNVPVQLTSISAPEHKFEGLTQIFQKAYEHEQHISESINNIVDHAIKSKDHATFNFLQWYVAEQHEEEVLFKDILDKIELIGNENHGLYLADQYVKGIAKSRKS

SEQ ID NO: 9389 - protein, 1315 aa, Artificial Sequence
  SARS-CoV-2/Guangdong/20SF028/2020__EPI_ISL_403936 spike protein (1-1147)(F970C_G999C) Ferritin construct
MFVFLVLLPLVSSQCVNLTTRTQLPPAYTNSFTRGVYYPDKVFRSSVLYSTQDLFLPFFSNVTWFHAIHVSGTNGTKRFDNPVLPFNDGVYFASTEKSNIIRGWIFGTTLDSKTQSLLIVNNATNVVIKVCEFQFCNDPFLGVYYHKNNKSWMESEFRVYSSANNCTFEYVSQPFLMDLEGKQGNFKNLREFVFKNIDGYFKIYSKHTPINLVRDLPQGFSALEPLVDLPIGINITRFQTLLALHRSYLTPGDSSSGWTAGAAAYYVGYLQPRTFLLKYNENGTITDAVDCALDPLSETKCTLKSFTVEKGIYQTSNFRVQPTESIVRFPNITNLCPFGEVFNATRFASVYAWNRKRISNCVADYSVLYNSASFSTFKCYGVSPTKLNDLCFTNVYADSFVIRGDEVRQIAPGQTGKIADYNYKLPDDFTGCVIAWNSNNLDSKVGGNYNYLYRLFRKSNLKPFERDISTEIYQAGSTPCNGVEGFNCYFPLQSYGFQPTNGVGYQPYRVVVLSFELLHAPATVCGPKKSTNLVKNKCVNFNFNGLTGTGVLTESNKKFLPFQQFGRDIADTTDAVRDPQTLEILDITPCSFGGVSVITPGTNTSNQVAVLYQDVNCTEVPVAIHADQLTPTWRVYSTGSNVFQTRAGCLIGAEHVNNSYECDIPIGAGICASYQTQTNSPRRARSVASQSIIAYTMSLGAENSVAYSNNSIAIPTNFTISVTTEILPVSMTKTSVDCTMYICGDSTECSNLLLQYGSFCTQLNRALTGIAVEQDKNTQEVFAQVKQIYKTPPIKDFGGFNFSQILPDPSKPSKRSFIEDLLFNKVTLADAGFIKQYGDCLGDIAARDLICAQKFNGLTVLPPLLTDEMIAQYTSALLAGTITSGWTFGAGAALQIPFAMQMAYRFNGIGVTQNVLYENQKLIANQFNSAIGKIQDSLSSTASALGKLQDVVNQNAQALNTLVKQLSSNCGAISSVLNDILSRLDKVEAEVQIDRLITCRLQSLQTYVTQQLIRAAEIRASANLAATKMSECVLGQSKRVDFCGKGYHLMSFPQSAPHGVVFLHVTYVPAQEKNFTTAPAICHDGKAHFPREGVFVSNGTHWFVTQRNFYEPQIITTDNTFVSGNCDVVIGIVNNTVYDPLQPELDSGGGGSDIIKLLNEQVNKEMQSSNLYMSMSSWCYTHSLDGAGLFLFDHAAEEYEHAKKLIIFLNENNVPVQLTSISAPEHKFEGLTQIFQKAYEHEQHISESINNIVDHAIKSKDHATFNFLQWYVAEQHEEEVLFKDILDKIELIGNENHGLYLADQYVKGIAKSRKS

SEQ ID NO: 9390 - protein, 1315 aa, Artificial Sequence
  SARS-CoV-2/Shenzhen/SZTH-001/2020__EPI_ISL_406592 spike protein (1-1147)(F970C_G999C) Ferritin construct
MFVFLVLLPLVSSQCVNLTTRTQLPPAYTNSFTRGVYYPDKVFRSSVLHSTQDLFLPFFSNVTWFHAIHVSGTNGTKRFDNPVLPFNDGVYFASTEKSNIIRGWIFGTTLDSKTQSLLIVNNATNVVIKVCEFQFCNDPFLGVYYHKNNKSWMESEFRVYSSANNCTFEYVSQPFLMDLEGKQGNFKNLREFVFKNIDGYFKIYSKHTPINLVRDLPQGFSALEPLVDLPIGINITRFQTLLALHRSYLTPGDSSSGWTAGAAAYYVGYLQPRTFLLKYNENGTITDAVDCALDPLSETKCTLKSFTVEKGIYQTSNFRVQPTESIVRFPNITNLCPFGEVFNATRFASVYAWNRKRISNCVADYSVLYNSASFSTFKCYGVSPTKLNDLCFTNVYADSFVIRGDEVRQIAPGQTGKIADYNYKLPDDFTGCVIAWNSNNLDSKVGGNYNYLYRLFRKSNLKPFERDISTEIYQAGSTPCNGVEGFNCYFPLQSYGFQPTNGVGYQPYRVVVLSFELLHAPATVCGPKKSTNLVKNKCVNFNFNGLTGTGVLTESNKKFLPFQQFGRDIADTTDAVRDPQTLEILDITPCSFGGVSVITPGTNTSNQVAVLYQDVNCTEVPVAIHADQLTPTWRVYSTGSNVFQTRAGCLIGAEHVNNSYECDIPIGAGICASYQTQTNSPRRARSVASQSIIAYTMSLGAENSVAYSNNSIAIPTNFTISVTTEILPVSMTKTSVDCTMYICGDSTECSNLLLQYGSFCTQLNRALTGIAVEQDKNTQEVFAQVKQIYKTPPIKDFGGFNFSQILPDPSKPSKRSFIEDLLFNKVTLADAGFIKQYGDCLGDIAARDLICAQKFNGLTVLPPLLTDEMIAQYTSALLAGTITSGWTFGAGAALQIPFAMQMAYRFNGIGVTQNVLYENQKLIANQFNSAIGKIQDSLSSTASALGKLQDVVNQNAQALNTLVKQLSSNCGAISSVLNDILSRLDKVEAEVQIDRLITCRLQSLQTYVTQQLIRAAEIRASANLAATKMSECVLGQSKRVDFCGKGYHLMSFPQSAPHGVVFLHVTYVPAQEKNFTTAPAICHDGKAHFPREGVFVSNGTHWFVTQRNFYEPQIITTDNTFVSGNCDVLIGIVNNTVYDPLQPELDSGGGGSDIIKLLNEQVNKEMQSSNLYMSMSSWCYTHSLDGAGLFLFDHAAEEYEHAKKLIIFLNENNVPVQLTSISAPEHKFEGLTQIFQKAYEHEQHISESINNIVDHAIKSKDHATFNFLQWYVAEQHEEEVLFKDILDKIELIGNENHGLYLADQYVKGIAKSRKS

SEQ ID NO: 9391 - protein, 1315 aa, Artificial Sequence
  SARS-CoV-2/Shenzhen/SZTH-004/2020__EPI_ISL_406595 spike protein (1-1147)(F970C_G999C) Ferritin construct
MFVFLVLLPLVSSQCVNLTTRTQLPPAYTNSFTRGVYYPDKVFRSSVLHSTQDLFLPFFSNVTWFHAIHVSGTNGTKRFDNPVLPFNDGVYFASTEKSNIIRGWIFGTTLDSKTQSLLIVNNATNVVIKVCEFQFCNDPFLGVYYHKNNKSWMESEFRVYSSANNCTFEYVSQPFLMDLEGKQGNFKNLREFVFKNIDGYFKIYSKHTPINLVRDLPQGFSALEPLVDLPIGINITRFQTLLALHRSYLTPGDSSSGWTAGAAAYYVGYLQPRTFLLKYNENGTITDAVDCALDPLSETKCTLKSFTVEKGIYQTSNFRVQPTESIVRFPNITNLCPFGEVFNATRFASVYAWDRKRISNCVAYYSVLYNSASFSTFKCYGVSPTKLNDLCFTNVYADSFVIRGDEVRQIAPGQTGKIADYNYKLPDDFTGCVIAWNSNNLDSKVGGNYNYLYRLFRKSNLKPFERDISTEIYQAGSTPCNGVEGFNCYFPLQSYGFQPTNGVGYQPYRVVVLSFELLHAPATVCGPKKSTNLVKNKCVNFNFNGLTGTGVLTESNKKFLPFQQFGRDIADTTDAVRDPQTLEILDITPCSFGGVSVITPGTNTSNQVAVLYQDVNCTEVPVAIHADQLTPTWRVYSTGSNVFQTRAGCLIGAEHVNNSYECDIPIGAGICASYQTQTNSPRRARSVASQSIIAYTMSLGAENSVAYSNNSIAIPTNFTISVTTEILPVSMTKTSVDCTMYICGDSTECSNLLLQYGSFCTQLNRALTGIAVEQDKNTQEVFAQVKQIYKTPPIKDFGGFNFSQILPDPSKPSKRSFIEDLLFNKVTLADAGFIKQYGDCLGDIAARDLICAQKFNGLTVLPPLLTDEMIAQYTSALLAGTITSGWTFGAGAALQIPFAMQMAYRFNGIGVTQNVLYENQKLIANQFNSAIGKIQDSLSSTASALGKLQDVVNQNAQALNTLVKQLSSNCGAISSVLNDILSRLDKVEAEVQIDRLITCRLQSLQTYVTQQLIRAAEIRASANLAATKMSECVLGQSKRVDFCGKGYHLMSFPQSAPHGVVFLHVTYVPAQEKNFTTAPAICHDGKAHFPREGVFVSNGTHWFVTQRNFYEPQIITTDNTFVSGNCDVVIGIVNNTVYDPLQPELDSGGGGSDIIKLLNEQVNKEMQSSNLYMSMSSWCYTHSLDGAGLFLFDHAAEEYEHAKKLIIFLNENNVPVQLTSISAPEHKFEGLTQIFQKAYEHEQHISESINNIVDHAIKSKDHATFNFLQWYVAEQHEEEVLFKDILDKIELIGNENHGLYLADQYVKGIAKSRKS

SEQ ID NO: 9392 - protein, 1315 aa, Artificial Sequence
  SARS-CoV-2/France/IDF0372/2020__EPI_ISL_406596 spike protein (1-1147)(F970C_G999C) Ferritin construct
MFVFLVLLPLVSSQCVNLTTRTQLPPAYTNSFTRGVYYPDKVFRSSVLHSTQDLFLPFFSNVTWFHAIHVSGTNGTKRFDNPVLPFNDGVYFASTEKSNIIRGWIFGTTLDSKTQSLLIVNNATNVVIKVCEFQFCNDPFLGVYYHKNNKSWMESEFRVYSSANNCTFEYVSQPFLMDLEGKQGNFKNLREFVFKNIDGYFKIYSKHTPINLVRDLPQGFSALEPLVDLPIGINITRFQTLLALHRSYLTPGDSSSGWTAGAAAYYVGYLQPRTFLLKYNENGTITDAVDCALDPLSETKCTLKSFTVEKGIYQTSNFRVQPTESIVRFPNITNLCPFGEVFNATRFASVYAWNRKRISNCVADYSFLYNSASFSTFKCYGVSPTKLNDLCFTNVYADSFVIRGDEVRQIAPGQTGKIADYNYKLPDDFTGCVIAWNSNNLDSKVGGNYNYLYRLFRKSNLKPFERDISTEIYQAGSTPCNGVEGFNCYFPLQSYGFQPTNGVGYQPYRVVVLSFELLHAPATVCGPKKSTNLVKNKCVNFNFNGLTGTGVLTESNKKFLPFQQFGRDIADTTDAVRDPQTLEILDITPCSFGGVSVITPGTNTSNQVAVLYQDVNCTEVPVAIHADQLTPTWRVYSTGSNVFQTRAGCLIGAEHVNNSYECDIPIGAGICASYQTQTNSPRRARSVASQSIIAYTMSLGAENSVAYSNNSIAIPTNFTISVTTEILPVSMTKTSVDCTMYICGDSTECSNLLLQYGSFCTQLNRALTGIAVEQDKNTQEVFAQVKQIYKTPPIKDFGGFNFSQILPDPSKPSKRSFIEDLLFNKVTLADAGFIKQYGDCLGDIAARDLICAQKFNGLTVLPPLLTDEMIAQYTSALLAGTITSGWTFGAGAALQIPFAMQMAYRFNGIGVTQNVLYENQKLIANQFNSAIGKIQDSLSSTASALGKLQDVVNQNAQALNTLVKQLSSNCGAISSVLNDILSRLDKVEAEVQIDRLITCRLQSLQTYVTQQLIRAAEIRASANLAATKMSECVLGQSKRVDFCGKGYHLMSFPQSAPHGVVFLHVTYVPAQEKNFTTAPAICHDGKAHFPREGVFVSNGTHWFVTQRNFYEPQIITTDNTFVSGNCDVVIGIVNNTVYDPLQPELDSGGGGSDIIKLLNEQVNKEMQSSNLYMSMSSWCYTHSLDGAGLFLFDHAAEEYEHAKKLIIFLNENNVPVQLTSISAPEHKFEGLTQIFQKAYEHEQHISESINNIVDHAIKSKDHATFNFLQWYVAEQHEEEVLFKDILDKIELIGNENHGLYLADQYVKGIAKSRKS

SEQ ID NO: 9393 - protein, 1315 aa, Artificial Sequence
  SARS-CoV-2/Australia/VIC01/2020__EPI_ISL_406844 spike protein (1-1147)(F970C_G999C) Ferritin construct
MFVFLVLLPLVSSQCVNLTTRTQLPPAYTNSFTRGVYYPDKVFRSSVLHSTQDLFLPFFSNVTWFHAIHVSGTNGTKRFDNPVLPFNDGVYFASTEKSNIIRGWIFGTTLDSKTQSLLIVNNATNVVIKVCEFQFCNDPFLGVYYHKNNKSWMESEFRVYSSANNCTFEYVSQPFLMDLEGKQGNFKNLREFVFKNIDGYFKIYSKHTPINLVRDLPQGFSALEPLVDLPIGINITRFQTLLALHRRYLTPGDSSSGWTAGAAAYYVGYLQPRTFLLKYNENGTITDAVDCALDPLSETKCTLKSFTVEKGIYQTSNFRVQPTESIVRFPNITNLCPFGEVFNATRFASVYAWNRKRISNCVADYSVLYNSASFSTFKCYGVSPTKLNDLCFTNVYADSFVIRGDEVRQIAPGQTGKIADYNYKLPDDFTGCVIAWNSNNLDSKVGGNYNYLYRLFRKSNLKPFERDISTEIYQAGSTPCNGVEGFNCYFPLQSYGFQPTNGVGYQPYRVVVLSFELLHAPATVCGPKKSTNLVKNKCVNFNFNGLTGTGVLTESNKKFLPFQQFGRDIADTTDAVRDPQTLEILDITPCSFGGVSVITPGTNTSNQVAVLYQDVNCTEVPVAIHADQLTPTWRVYSTGSNVFQTRAGCLIGAEHVNNSYECDIPIGAGICASYQTQTNSPRRARSVASQSIIAYTMSLGAENSVAYSNNSIAIPTNFTISVTTEILPVSMTKTSVDCTMYICGDSTECSNLLLQYGSFCTQLNRALTGIAVEQDKNTQEVFAQVKQIYKTPPIKDFGGFNFSQILPDPSKPSKRSFIEDLLFNKVTLADAGFIKQYGDCLGDIAARDLICAQKFNGLTVLPPLLTDEMIAQYTSALLAGTITSGWTFGAGAALQIPFAMQMAYRFNGIGVTQNVLYENQKLIANQFNSAIGKIQDSLSSTASALGKLQDVVNQNAQALNTLVKQLSSNCGAISSVLNDILSRLDKVEAEVQIDRLITCRLQSLQTYVTQQLIRAAEIRASANLAATKMSECVLGQSKRVDFCGKGYHLMSFPQSAPHGVVFLHVTYVPAQEKNFTTAPAICHDGKAHFPREGVFVSNGTHWFVTQRNFYEPQIITTDNTFVSGNCDVVIGIVNNTVYDPLQPELDSGGGGSDIIKLLNEQVNKEMQSSNLYMSMSSWCYTHSLDGAGLFLFDHAAEEYEHAKKLIIFLNENNVPVQLTSISAPEHKFEGLTQIFQKAYEHEQHISESINNIVDHAIKSKDHATFNFLQWYVAEQHEEEVLFKDILDKIELIGNENHGLYLADQYVKGIAKSRKS

SEQ ID NO: 9394 - protein, 1315 aa, Artificial Sequence
  SARS-CoV-2/Germany/BavPat1/2020__EPI_ISL_406862 spike protein (1-1147)(F970C_G999C) Ferritin construct
MFVFLVLLPLVSSQCVNLTTRTQLPPAYTNSFTRGVYYPDKVFRSSVLHSTQDLFLPFFSNVTWFHAIHVSGTNGTKRFDNPVLPFNDGVYFASTEKSNIIRGWIFGTTLDSKTQSLLIVNNATNVVIKVCEFQFCNDPFLGVYYHKNNKSWMESEFRVYSSANNCTFEYVSQPFLMDLEGKQGNFKNLREFVFKNIDGYFKIYSKHTPINLVRDLPQGFSALEPLVDLPIGINITRFQTLLALHRSYLTPGDSSSGWTAGAAAYYVGYLQPRTFLLKYNENGTITDAVDCALDPLSETKCTLKSFTVEKGIYQTSNFRVQPTESIVRFPNITNLCPFGEVFNATRFASVYAWNRKRISNCVADYSVLYNSASFSTFKCYGVSPTKLNDLCFTNVYADSFVIRGDEVRQIAPGQTGKIADYNYKLPDDFTGCVIAWNSNNLDSKVGGNYNYLYRLFRKSNLKPFERDISTEIYQAGSTPCNGVEGFNCYFPLQSYGFQPTNGVGYQPYRVVVLSFELLHAPATVCGPKKSTNLVKNKCVNFNFNGLTGTGVLTESNKKFLPFQQFGRDIADTTDAVRDPQTLEILDITPCSFGGVSVITPGTNTSNQVAVLYQGVNCTEVPVAIHADQLTPTWRVYSTGSNVFQTRAGCLIGAEHVNNSYECDIPIGAGICASYQTQTNSPRRARSVASQSIIAYTMSLGAENSVAYSNNSIAIPTNFTISVTTEILPVSMTKTSVDCTMYICGDSTECSNLLLQYGSFCTQLNRALTGIAVEQDKNTQEVFAQVKQIYKTPPIKDFGGFNFSQILPDPSKPSKRSFIEDLLFNKVTLADAGFIKQYGDCLGDIAARDLICAQKFNGLTVLPPLLTDEMIAQYTSALLAGTITSGWTFGAGAALQIPFAMQMAYRFNGIGVTQNVLYENQKLIANQFNSAIGKIQDSLSSTASALGKLQDVVNQNAQALNTLVKQLSSNCGAISSVLNDILSRLDKVEAEVQIDRLITCRLQSLQTYVTQQLIRAAEIRASANLAATKMSECVLGQSKRVDFCGKGYHLMSFPQSAPHGVVFLHVTYVPAQEKNFTTAPAICHDGKAHFPREGVFVSNGTHWFVTQRNFYEPQIITTDNTFVSGNCDVVIGIVNNTVYDPLQPELDSGGGGSDIIKLLNEQVNKEMQSSNLYMSMSSWCYTHSLDGAGLFLFDHAAEEYEHAKKLIIFLNENNVPVQLTSISAPEHKFEGLTQIFQKAYEHEQHISESINNIVDHAIKSKDHATFNFLQWYVAEQHEEEVLFKDILDKIELIGNENHGLYLADQYVKGIAKSRKS

SEQ ID NO: 9395 - protein, 1315 aa, Artificial Sequence
  SARS-CoV-2/Wuhan/HBCDC-HB-02/2020__EPI_ISL_412978 spike protein (1-1147)(F970C_G999C) Ferritin construct
MFVFLVLLPLVSSQCVNLTTRTQLPPAYTNSFTRGVYYPDKVFRSSVLHSTQDLFLPFFSNVTWFHAIHVSGTNGTKRFDNPVLPFNDGVYFASTEKSNIIRGWIFGTTLDSKTQSLLIVNNATNVVIKVCEFQFCNDPFLGVYYHKNNKSWMESEFRVYSSANNCTFEYVSQPFLMDLEGKQGNFKNLREFVFKNIDGYFKIYSKHTPINLVRDLPQGFSALEPLVDLPIGINITRFQTLLALHRSYLTPGDSSSGWTAGAAAYYVGYLQPRTFLLKYNENGTITDAVDCALDPLSETKCTLKSFTVEKGIYQTSNFRVQPTESIVRFPNITNLCPFGEVFNATRFASVYAWNRKRISNCVADYSVLYNSASFSTFKCYGVSPTKLNDLCFTNVYADSFVIRGDEVRQIAPGQTGKIADYNYKLPDDFTGCVIAWNSNNLDSKVGGNYNYLYRLFRKSNLKPFERDISTEIYQAGSTPCNGVEGFNCYFPLQSYGFQPTNGVGYQPYRVVVLSFELLHAPATVCGPKKSTNLVKNKCVNFNFNGLTGTGVLTESNKKFLPFQQFGRDIADTTDAVRDPQTLEILDITPCSFGGVSVITPGTNTSNQVAVLYQDVNCTEVPVAIHADQLTPTWRVYSTGSNVFQTRAGCLIGAEHVNNSYECDIPIGAGICASYQTQTNSPRRARSVASQSIIAYTMSLGAENSVAYSNNSIAIPTNFTISVTTEILPVSMTKTSVDCTMYICGDSTECSNFLLQYGSFCTQLNRALTGIAVEQDKNTQEVFAQVKQIYKTPPIKDFGGFNFSQILPDPSKPSKRSFIEDLLFNKVTLADAGFIKQYGDCLGDIAARDLICAQKFNGLTVLPPLLTDEMIAQYTSALLAGTITSGWTFGAGAALQIPFAMQMAYRFNGIGVTQNVLYENQKLIANQFNSAIGKIQDSLSSTASALGKLQDVVNQNAQALNTLVKQLSSNCGAISSVLNDILSRLDKVEAEVQIDRLITCRLQSLQTYVTQQLIRAAEIRASANLAATKMSECVLGQSKRVDFCGKGYHLMSFPQSAPHGVVFLHVTYVPAQEKNFTTAPAICHDGKAHFPREGVFVSNGTHWFVTQRNFYEPQIITTDNTFVSGNCDVVIGIVNNTVYDPLQPELDSGGGGSDIIKLLNEQVNKEMQSSNLYMSMSSWCYTHSLDGAGLFLFDHAAEEYEHAKKLIIFLNENNVPVQLTSISAPEHKFEGLTQIFQKAYEHEQHISESINNIVDHAIKSKDHATFNFLQWYVAEQHEEEVLFKDILDKIELIGNENHGLYLADQYVKGIAKSRKS

SEQ ID NO: 9396 - protein, 1315 aa, Artificial Sequence
  SARS-CoV-2/Australia/QLD02/2020__EPI_ISL_407896 spike protein (1-1147)(F970C_G999C) Ferritin construct
MFVFLVLLPLVSSQCVNLTTRTQLPPAYTNSFTRGVYYPDKVFRSSVLHSTQDLFLPFFSNVTWFHAIHVSGTNGTKRFDNPVLPFNDGVYFASTEKSNIIRGWIFGTTLDSKTQSLLIVNNATNVVIKVCEFQFCNDPFLGVYYHKNNKSWMESEFRVYSSANNCTFEYVSQPFLMDLEGKQGNFKNLREFVFKNIDGYFKIYSKHTPINLVRDLPQGFSALEPLVDLPIGINITRFQTLLALHRSYLTPGDSSSGWTAGAAAYYVGYLQPRTFLLKYNENGTITDAVDCALDPLSETKCTLKSFTVEKGIYQTSNFRVQPTESIVRFPNITNLCPFGEVFNATRFASVYAWNRKRISNCVADYSVLYNSASFSTFKCYGVSPTKLNDLCFTNVYADSFVIRGDEVRQIAPGQTGKIADYNYKLPDDFTGCVIAWNSNNLDSKVGGNYNYLYRLFRKSNLKPFERDISTEIYQAGSTPCNGVEGFNCYFPLQSYGFQPTNGVGYQPYRVVVLSFELLHAPATVCGPKKSTNLVKNKCVNFNFNGLTGTGVLTESNKKFLPFQQFGRDIADTTDAVRDPQTLEILDITPCSFGGVSVITPGTNTSNQVAVLYQDVNCTEVPVAIHADQLTPTWRVYSTGSNVFQTRAGCLIGAEHVNNSYECDIPIGAGICASYQTQTNSPRRARSVASQSIIAYTMSLGAENSVAYSNNSIAIPTNFTISVTTEILPVSMTKTSVDCTMYICGDSTECSNLLLQYGSFCTQLNRALTGIAVEQDKNTQEVFAQVKQIYKTPPIKDFGGFNFSQILPDPSKPSKRSFIEDLLFNKVTLADAGFIKQYGDCLGDIAARDLICAQKFNGLTVLPPLLTDEMIAQYTSALLAGTITSGWTFGAGAALQIPFAMQMAYRFNGIGVTQNVLYENQKLIANQFNSAIGKIQDSLSSTASALGKLQDVVNQNAQALNTLVKQLSSNCGAISSVLNDILSRLDKVEAEVQIDRLITCRLQSLQTYVTQQLIRAAEIRASANLAATKMSECVLGQSKRVDFCGKGYHLMSFPQSAPHGVVFLHVTYVPAQEKNFTTAPAICHDGKAHFPREGVFVSNGTHWFVTQRNFYEPQIITTDNTFVSGNCDVVIGIVNNTVYDPLQLELDSGGGGSDIIKLLNEQVNKEMQSSNLYMSMSSWCYTHSLDGAGLFLFDHAAEEYEHAKKLIIFLNENNVPVQLTSISAPEHKFEGLTQIFQKAYEHEQHISESINNIVDHAIKSKDHATFNFLQWYVAEQHEEEVLFKDILDKIELIGNENHGLYLADQYVKGIAKSRKS

SEQ ID NO: 9397 - protein, 1315 aa, Artificial Sequence
  SARS-CoV-2/India/1-31/2020__EPI_ISL_413523 spike protein (1-1147)(F970C_G999C) Ferritin construct
MFVFLVLLPLVSSQCVNLTTRTQLPPAYTNSFTRGVYYPDKVFRSSVLHSTQDLFLPFFSNVTWFHAIHVSGTNGTKRFDNPVLPFNDGVYFASTEKSNIIRGWIFGTTLDSKTQSLLIVNNATNVVIKVCEFQFCNDPFLGVYYHKNNKSWMESEFRVYSSANNCTFEYVSQPFLMDLEGKQGNFKNLREFVFKNIDGYFKIYSKHTPINLVRDLPQGFSALEPLVDLPIGINITRFQTLLALHRSYLTPGDSSSGWTAGAAAYYVGYLQPRTFLLKYNENGTITDAVDCALDPLSETKCTLKSFTVEKGIYQTSNFRVQPTESIVRFPNITNLCPFGEVFNATRFASVYAWNRKRISNCVADYSVLYNSASFSTFKCYGVSPTKLNDLCFTNVYADSFVIRGDEVRQIAPGQTGKIADYNYKLPDDFTGCVIAWNSNNLDSKVGGNYNYLYRLFRKSNLKPFERDISTEIYQAGSTPCNGVEGFNCYFPLQSYGFQPTNGVGYQPYRVVVLSFELLHAPATVCGPKKSTNLVKNKCVNFNFNGLTGTGVLTESNKKFLPFQQFGRDIADTTDAVRDPQTLEILDITPCSFGGVSVITPGTNTSNQVAVLYQDVNCTEVPVAIHADQLTPTWRVYSTGSNVFQTRAGCLIGAEHVNNSYECDIPIGAGICASYQTQTNSPRRARSVASQSIIAYTMSLGAENSVAYSNNSIAIPTNFTISVTTEILPVSMTKTSVDCTMYICGDSTECSNLLLQYGSFCTQLNRALTGIAVEQDKNTQEVFAQVKQIYKTPPIKDFGGFNFSQILPDPSKPSKRSFIEDLLFNKVTLADAGFIKQYGDCLGDIAARDLICAQKFNGLTVLPPLLTDEMIAQYTSALLAGTITSGWTFGAGAALQIPFAMQMAYRFNGIGVTQNVLYENQKLIANQFNSVIGKIQDSLSSTASALGKLQDVVNQNAQALNTLVKQLSSNCGAISSVLNDILSRLDKVEAEVQIDRLITCRLQSLQTYVTQQLIRAAEIRASANLAATKMSECVLGQSKRVDFCGKGYHLMSFPQSAPHGVVFLHVTYVPAQEKNFTTAPAICHDGKAHFPREGVFVSNGTHWFVTQRNFYEPQIITTDNTFVSGNCDVVIGIVNNTVYDPLQPELDSGGGGSDIIKLLNEQVNKEMQSSNLYMSMSSWCYTHSLDGAGLFLFDHAAEEYEHAKKLIIFLNENNVPVQLTSISAPEHKFEGLTQIFQKAYEHEQHISESINNIVDHAIKSKDHATFNFLQWYVAEQHEEEVLFKDILDKIELIGNENHGLYLADQYVKGIAKSRKS

SEQ ID NO: 9398 - protein, 1315 aa, Artificial Sequence
  SARS-CoV-2/Guangdong/GD2020087-P0008/2020__EPI_ISL_413863 spike protein (1-1147)(F970C_G999C) Ferritin construct
MFVFLVLLPLVSSQCVNLTTRTQLPPAYTNSFTRGVYYPDKVFRSSVLHSTQDLFLPFFSNVTWFHAIHVSGTNGTKRFDNPVLPFNDGVYFASTEKSNIIRGWIFGTTLDSKTQSLLIVNNATNVVIKVCEFQFCNDPFLGVYYHKNNKSWMESEFRVYSSANNCTFEYVSQPFLMDLEGKQGNFKNLREFVFKNIDGYFKIYSKHTPINLVRDLPQGFSALEPLVDLPIGINITRFQTLLALHRSYLTPGDSSSGWTAGAAAYYVGYLQPRTFLLKYNENGTITDAVDCALDPLSETKCTLKSFTVEKGIYQTSNFRVQPTESIVRFPNITNLCPFGEVFNATRFASVYAWNRKRISNCVADYSVLYNSASFSTFKCYGVSPTKLNDLCFTNVYADSFVIRGDEVREIAPGQTGKIADYNYKLPDDFTGCVIAWNSNNLDSKVGGNYNYLYRLFRKSNLKPFERDISTEIYQAGSTPCNGVEGFNCYFPLQSYGFQPTNGVGYQPYRVVVLSFELLHAPATVCGPKKSTNLVKNKCVNFNFNGLTGTGVLTESNKKFLPFQQFGRDIADTTDAVRDPQTLEILDITPCSFGGVSVITPGTNTSNQVAVLYQDVNCTEVPVAIHADQLTPTWRVYSTGSNVFQTRAGCLIGAEHVNNSYECDIPIGAGICASYQTQTNSPRRARSVASQSIIAYTMSLGAENSVAYSNNSIAIPTNFTISVTTEILPVSMTKTSVDCTMYICGDSTECSNLLLQYGSFCTQLNRALTGIAVEQDKNTQEVFAQVKQIYKTPPIKDFGGFNFSQILPDPSKPSKRSFIEDLLFNKVTLADAGFIKQYGDCLGDIAARDLICAQKFNGLTVLPPLLTDEMIAQYTSALLAGTITSGWTFGAGAALQIPFAMQMAYRFNGIGVTQNVLYENQKLIANQFNSAIGKIQDSLSSTASALGKLQDVVNQNAQALNTLVKQLSSNCGAISSVLNDILSRLDKVEAEVQIDRLITCRLQSLQTYVTQQLIRAAEIRASANLAATKMSECVLGQSKRVDFCGKGYHLMSFPQSAPHGVVFLHVTYVPAQEKNFTTAPAICHDGKAHFPREGVFVSNGTHWFVTQRNFYEPQIITTDNTFVSGNCDVVIGIVNNTVYDPLQPELDSGGGGSDIIKLLNEQVNKEMQSSNLYMSMSSWCYTHSLDGAGLFLFDHAAEEYEHAKKLIIFLNENNVPVQLTSISAPEHKFEGLTQIFQKAYEHEQHISESINNIVDHAIKSKDHATFNFLQWYVAEQHEEEVLFKDILDKIELIGNENHGLYLADQYVKGIAKSRKS

SEQ ID NO: 9399 - protein, 1315 aa, Artificial Sequence
  SARS-CoV-2/Sweden/01/2020__EPI_ISL_411951 spike protein (1-1147)(F970C_G999C) Ferritin construct
MFVFLVLLPLVSSQCVNLTTRTQLPPAYTNSFTRGVYYPDKVFRSSVLHSTQDLFLPFFSNVTWFHAIHVSGTNGTKRFDNPVLPFNDGVYFASTEKSNIIRGWIFGTTLDSKTQSLLIVNNATNVVIKVCEFQFCNDPFLGVYYHKNNKSWMESEFRVYSSANNCTFEYVSQPFLMDLEGKQGNFKNLREFVFKNIDGYFKIYSKHTPINLVRDLPQGFSALEPLVDLPIGINITRFQTLLALHRSYLTPGDSSSGWTAGAAAYYVGYLQPRTFLLKYNENGTITDAVDCALDPLSETKCTLKSFTVEKGIYQTSNFRVQPTESIVRFPNITNLCPFGEVFNATRFASVYAWNRKRISNCVADYSVLYNSASFSTFKCYGVSPTKLNDLCFTNVYADSFVIRGDEVRQIAPGQTGKIADYNYKLPDDFTGCVIAWNSNNLDSKVGGNYNYLYRLFRKSNLKPFERDISTEIYQAGSTPCNGVEGFNCYFPLQSYGFQPTNGVGYQPYRVVVLSFELLHAPATVCGPKKSTNLVKNKCVNFNFNGLTGTGVLTESNKKFLPFQQFGRDIADTTDAVRDPQTLEILDITPCSFGGVSVITPGTNTSNQVAVLYQDVNCTEVPVAIHADQLTPTWRVYSTGSNVFQTRAGCLIGAEHVNNSYECDIPIGAGICASYQTQTNSPRRARSVASQSIIAYTMSLGAENSVAYSNNSIAIPTNFTISVTTEILPVSMTKTSVDCTMYICGDSTECSNLLLQYGSFCTQLNRALTGIAVEQDKNTQEVFAQVKQIYKTPPIKDCGGFNFSQILPDPSKPSKRSFIEDLLFNKVTLADAGFIKQYGDCLGDIAARDLICAQKFNGLTVLPPLLTDEMIAQYTSALLAGTITSGWTFGAGAALQIPFAMQMAYRFNGIGVTQNVLYENQKLIANQFNSAIGKIQDSLSSTASALGKLQDVVNQNAQALNTLVKQLSSNCGAISSVLNDILSRLDKVEAEVQIDRLITCRLQSLQTYVTQQLIRAAEIRASANLAATKMSECVLGQSKRVDFCGKGYHLMSFPQSAPHGVVFLHVTYVPAQEKNFTTAPAICHDGKAHFPREGVFVSNGTHWFVTQRNFYEPQIITTDNTFVSGNCDVVIGIVNNTVYDPLQPELDSGGGGSDIIKLLNEQVNKEMQSSNLYMSMSSWCYTHSLDGAGLFLFDHAAEEYEHAKKLIIFLNENNVPVQLTSISAPEHKFEGLTQIFQKAYEHEQHISESINNIVDHAIKSKDHATFNFLQWYVAEQHEEEVLFKDILDKIELIGNENHGLYLADQYVKGIAKSRKS

SEQ ID NO: 9400 - protein, 1315 aa, Artificial Sequence
  SARS-CoV-2/Tianmen/HBCDC-HB-07/2020__EPI_ISL_412983 spike protein (1-1147)(F970C_G999C) Ferritin construct
MFVFLVLLPLVSSQCVNLTTRTQLPPAYTNSFTRGVYYPDKVFRSSVLHSTQDLFLPFFSNVTWFHAIHVSGTNGTKRFDNPVLPFNDGVYFASTEKSNIIRGWIFGTTLDSKTQSLLIVNNATNVVIKVCEFQFCNDPFLGVYYHKNNKSWMESEFRVYSSANNCTFEYVSQPFLMDLEGKQGNFKNLREFVFKNIDGYFKIYSKHTPINLVRDLPQGFSALEPLVDLPIGINITRFQTLLALHRSYLTPGDSSSGWTAGAAAYYVGYLQPRTFLLKYNENGTITDAVDCALDPLSETKCTLKSFTVEKGIYQTSNFRVQPTESIVRFPNITNLCPFGEVFNATRFASVYAWNRKRISNCVADYSVLYNSASFSTFKCYGVSPTKLNDLCFTNVYADSFVIRGDEVRQIAPGQTGKIADYNYKLPDDFTGCVIAWNSNNLDSKVGGNYNYLYRLFRKSNLKPFERDISTEIYQAGSTPCNGVEGFNCYFPLQSYGFQPTNGVGYQPYRVVVLSFELLHAPATVCGPKKSTNLVKNKCVNFNFNGLTGTGVLTESNKKFLPFQQFGRDIADTTDAVRDPQTLEILDITPCSFGGVSVITPGTNTSNQVAVLYQDLNCTEVPVAIHADQLTPTWRVYSTGSNVFQTRAGCLIGAEHVNNSYECDIPIGAGICASYQTQTNSPRRARSVASQSIIAYTMSLGAENSVAYSNNSIAIPTNFTISVTTEILPVSMTKTSVDCTMYICGDSTECSNLLLQYGSFCTQLNRALTGIAVEQDKNTQEVFAQVKQIYKTPPIKDFGGFNFSQILPDPSKPSKRSFIEDLLFNKVTLADAGFIKQYGDCLGDIAARDLICAQKFNGLTVLPPLLTDEMIAQYTSALLAGTITSGWTFGAGAALQIPFAMQMAYRFNGIGVTQNVLYENQKLIANQFNSAIGKIQDSLSSTASALGKLQDVVNQNAQALNTLVKQLSSNCGAISSVLNDILSRLDKVEAEVQIDRLITCRLQSLQTYVTQQLIRAAEIRASANLAATKMSECVLGQSKRVDFCGKGYHLMSFPQSAPHGVVFLHVTYVPAQEKNFTTAPAICHDGKAHFPREGVFVSNGTHWFVTQRNFYEPQIITTDNTFVSGNCDVVIGIVNNTVYDPLQPELDSGGGGSDIIKLLNEQVNKEMQSSNLYMSMSSWCYTHSLDGAGLFLFDHAAEEYEHAKKLIIFLNENNVPVQLTSISAPEHKFEGLTQIFQKAYEHEQHISESINNIVDHAIKSKDHATFNFLQWYVAEQHEEEVLFKDILDKIELIGNENHGLYLADQYVKGIAKSRKS

SEQ ID NO: 9401 - protein, 1315 aa, Artificial Sequence
  SARS-CoV-2/Hong Kong/case42_VM20002493/2020__EPI_ISL_414527 spike protein (1-1147)(F970C_G999C) Ferritin construct
MFVFLVLLPLVSSQCVNLTTRTQLPPAYTNSFTRGVYYPDKVFRSSVLHSTQDLFLPFFSNVTWFHAIHVSGTNGTKRFDNPVLPFNDGVYFASTEKSNIIRGWIFGTTLDSKTQSLLIVNNATNVVIKVCEFQFCNDPFLGVYYHKNNKSWMESEFRVYSSANNCTFEYVSQPFLMDLEGKQGNFKNLREFVFKNIDGYFKIYSKHTPINLVRDLPQGFSALEPLVDLPIGINITRFQTLLALHRSYLTPGDSSSGWTAGAAAYYVGYLQPRTFLLKYNENGTITDAVDCALDPLSETKCTLKSFTVEKGIYQTSNFRVQPTESIVRFPNITNLCPFGEVFNATRFASVYAWNRKRISNCVADYSVLYNSASFSTFKCYGVSPTKLNDLCFTNVYADSFVIRGDEVRQIAPGQTGKIADYNYKLPDDFTGCVIAWNSNNLDSKVGGNYNYLYRLFRKSNLKPFERDISTEIYQAGSTPCNGVEGFNCYFPLQSYGFQPTNGVGYQPYRVVVLSFELLHAPATVCGPKKSTNLVKNKCVNFNFNGLTGTGVLTESNKKFLPFQQFGRDIADTTDAVRDPQTLEILDITPCSFGGVSVITPGTNTSNQVAVLYQDVNCTEVPVAIHADQLTPTWRVYSTGSNVFQTRAGCLIGAEHVNNSYECDIPIGAGICASYQTQTNSPRRARSVASQSIIAYTMSLGAENSVAYSNNSIAIPTNFAISVTTEILPVSMTKTSVDCTMYICGDSTECSNLLLQYGSFCTQLNRALTGIAVEQDKNTQEVFAQVKQIYKTPPIKDFGGFNFSQILPDPSKPSKRSFIEDLLFNKVTLADAGFIKQYGDCLGDIAARDLICAQKFNGLTVLPPLLTDEMIAQYTSALLAGTITSGWTFGAGAALQIPFAMQMAYRFNGIGVTQNVLYENQKLIANQFNSAIGKIQDSLSSTASALGKLQDVVNQNAQALNTLVKQLSSNCGAISSVLNDILSRLDKVEAEVQIDRLITCRLQSLQTYVTQQLIRAAEIRASANLAATKMSECVLGQSKRVDFCGKGYHLMSFPQSAPHGVVFLHVTYVPAQEKNFTTAPAICHDGKAHFPREGVFVSNGTHWFVTQRNFYEPQIITTDNTFVSGNCDVVIGIVNNTVYDPLQPELDSGGGGSDIIKLLNEQVNKEMQSSNLYMSMSSWCYTHSLDGAGLFLFDHAAEEYEHAKKLIIFLNENNVPVQLTSISAPEHKFEGLTQIFQKAYEHEQHISESINNIVDHAIKSKDHATFNFLQWYVAEQHEEEVLFKDILDKIELIGNENHGLYLADQYVKGIAKSRKS

SEQ ID NO: 9402 - protein, 1315 aa, Artificial Sequence
  SARS-CoV-2/USA/CruiseA-23/2020__EPI_ISL_414482 spike protein (1-1147)(F970C_G999C) Ferritin construct
MFVFLVLLPLVSSQCVNLTTRTQLPPAYTNSFTRGVYYPDKVFRSSVLHSTQDLFLPFFSNVTWFHAIHVSGTNGTKRFDNPVLPFNDGVYFASTEKSNIIRGWIFGTTLDSKTQSLLIVNNATNVVIKVCEFQFCNDPFLGVYYHKNNKSWMESEFRVYSSANNCTFEYVSQPFLMDLEVKQGNFKNLREFVFKNIDGYFKIYSKHTPINLVRDLPQGFSALEPLVDLPIGINITRFQTLLALHRSYLTPGDSSSGWTAGAAAYYVGYLQPRTFLLKYNENGTITDAVDCALDPLSETKCTLKSFTVEKGIYQTSNFRVQPTESIVRFPNITNLCPFGEVFNATRFASVYAWNRKRISNCVADYSVLYNSASFSTFKCYGVSPTKLNDLCFTNVYADSFVIRGDEVRQIAPGQTGKIADYNYKLPDDFTGCVIAWNSNNLDSKVGGNYNYLYRLFRKSNLKPFERDISTEIYQAGSTPCNGVEGFNCYFPLQSYGFQPTNGVGYQPYRVVVLSFELLHAPATVCGPKKSTNLVKNKCVNFNFNGLTGTGVLTESNKKFLPFQQFGRDIADTTDAVRDPQTLEILDITPCSFGGVSVITPGTNTSNQVAVLYQDVNCTEVPVAIHADQLTPTWRVYSTGSNVFQTRAGCLIGAEHVNNSYECDIPIGAGICASYQTQTNSPRRARSVASQSIIAYTMSLGAENSVAYSNNSIAIPTNFTISVTTEILPVSMTKTSVDCTMYICGDSTECSNLLLQYGSFCTQLNRALTGIAVEQDKNTQEVFAQVKQIYKTPPIKDFGGFNFSQILPDPSKPSKRSFIEDLLFNKVTLADAGFIKQYGDCLGDIAARDLICAQKFNGLTVLPPLLTDEMIAQYTSALLAGTITSGWTFGAGAALQIPFAMQMAYRFNGIGVTQNVLYENQKLIANQFNSAIGKIQDSLSSTASALGKLQDVVNQNAQALNTLVKQLSSNCGAISSVLNDILSRLDKVEAEVQIDRLITCRLQSLQTYVTQQLIRAAEIRASANLAATKMSECVLGQSKRVDFCGKGYHLMSFPQSAPHGVVFLHVTYVPAQEKNFTTAPAICHDGKAHFPREGVFVSNGTHWFVTQRNFYEPQIITTDNTFVSGNCDVVIGIVNNTVYDPLQPELDSGGGGSDIIKLLNEQVNKEMQSSNLYMSMSSWCYTHSLDGAGLFLFDHAAEEYEHAKKLIIFLNENNVPVQLTSISAPEHKFEGLTQIFQKAYEHEQHISESINNIVDHAIKSKDHATFNFLQWYVAEQHEEEVLFKDILDKIELIGNENHGLYLADQYVKGIAKSRKS

SEQ ID NO: 9403 - protein, 1315 aa, Artificial Sequence
  SARS-CoV-2/Hong Kong/case85_VM20002868/2020__EPI_ISL_414519 spike protein (1-1147)(F970C_G999C) Ferritin construct
MFVFLVLVPLVSSQCVNLTTRTQLPPAYTNSFTRGVYYPDKVFRSSVLHSTQDLFLPFFSNVTWFHAIHVSGTNGTKRFDNPVLPFNDGVYFASTEKSNIIRGWIFGTTLDSKTQSLLIVNNATNVVIKVCEFQFCNDPFLGVYYHKNNKSWMESEFRVYSSANNCTFEYVSQPFLMDLEGKQGNFKNLREFVFKNIDGYFKIYSKHTPINLVRDLPQGFSALEPLVDLPIGINITRFQTLLALHRSYLTPGDSSSGWTAGAAAYYVGYLQPRTFLLKYNENGTITDAVDCALDPLSETKCTLKSFTVEKGIYQTSNFRVQPTESIVRFPNITNLCPFGEVFNATRFASVYAWNRKRISNCVADYSVLYNSASFSTFKCYGVSPTKLNDLCFTNVYADSFVIRGDEVRQIAPGQTGKIADYNYKLPDDFTGCVIAWNSNNLDSKVGGNYNYLYRLFRKSNLKPFERDISTEIYQAGSTPCNGVEGFNCYFPLQSYGFQPTNGVGYQPYRVVVLSFELLHAPATVCGPKKSTNLVKNKCVNFNFNGLTGTGVLTESNKKFLPFQQFGRDIADTTDAVRDPQTLEILDITPCSFGGVSVITPGTNTSNQVAVLYQDVNCTEVPVAIHADQLTPTWRVYSTGSNVFQTRAGCLIGAEHVNNSYECDIPIGAGICASYQTQTNSPRRARSVASQSIIAYTMSLGAENSVAYSNNSIAIPTNFTISVTTEILPVSMTKTSVDCTMYICGDSTECSNLLLQYGSFCTQLNRALTGIAVEQDKNTQEVFAQVKQIYKTPPIKDFGGFNFSQILPDPSKPSKRSFIEDLLFNKVTLADAGFIKQYGDCLGDIAARDLICAQKFNGLTVLPPLLTDEMIAQYTSALLAGTITSGWTFGAGAALQIPFAMQMAYRFNGIGVTQNVLYENQKLIANQFNSAIGKIQDSLSSTASALGKLQDVVNQNAQALNTLVKQLSSNCGAISSVLNDILSRLDKVEAEVQIDRLITCRLQSLQTYVTQQLIRAAEIRASANLAATKMSECVLGQSKRVDFCGKGYHLMSFPQSAPHGVVFLHVTYVPAQEKNFTTAPAICHDGKAHFPREGVFVSNGTHWFVTQRNFYEPQIITTDNTFVSGNCDVVIGIVNNTVYDPLQPELDSGGGGSDIIKLLNEQVNKEMQSSNLYMSMSSWCYTHSLDGAGLFLFDHAAEEYEHAKKLIIFLNENNVPVQLTSISAPEHKFEGLTQIFQKAYEHEQHISESINNIVDHAIKSKDHATFNFLQWYVAEQHEEEVLFKDILDKIELIGNENHGLYLADQYVKGIAKSRKS

SEQ ID NO: 9404 - protein, 1315 aa, Artificial Sequence; identical to SEQ ID NO: 9394
  SARS-CoV-2/England/200990660/2020__EPI_ISL_414523 spike protein (1-1147)(F970C_G999C) Ferritin construct

SEQ ID NO: 9405 - protein, 1315 aa, Artificial Sequence
  SARS-CoV-2/Australia/NSW09/2020__EPI_ISL_413595 spike protein (1-1147)(F970C_G999C) Ferritin construct
MFVFLVLLPLVSSQCVNLTTRTQLPPAYTNSFTRGVYYPDKVFRSSVLHSTQDLFLPFFSNVTWFHAIHVSGTNGTKRFDNPVLPFNDGVYFASTEKSNIIRGWIFGTTLDSKTQSLLIVNNATNVVIKVCEFQFCNDPFLGVYYHKNNKSWMESEFRVYSSANNCTFEYVSQPFLMDLEGKQGNFKNLREFVFKNIDGYFKIYSKHTPINLVRDLPQGFSALEPLVDLPIGINITRFQTLLALHRSYLTPGDSSSGWTAGAAAYYVGYLQPRTFLLKYNENGTITDAVDCALDPLSETKCTLKSFTVEKGIYQTSNFRVQPTESIVRFPNITNLCPFGEVFNATRFASVYAWNRKRISNCVADYSVLYNSASFSTFKCYGVSPTKLNDLCFTNVYADSFVIRGDEVRQIAPGQTGKIADYNYKLPDDFTGCVIAWNSNNLDSKVGGNYNYLYRLFRKSNLKPFERDISTEIYQAGSTPCNGVEGFNCYFPLQSYGFQPTNGVGYQPYRVVVLSFELLHAPATVCGPKKSTNLVKNKCVNFNFNGLTGTGVLTESNKKFLPFQQFGRDIADTTDAVRDPQTLEILDITPCSFGGVSVITPGTNTSNQVAVLYQDVNCTEVPVAIHADQLTPTWRVYSTGSNVFQTRAGCLIGAEHVNNSYECDIPIGAGICASYQTQTNSPRRARSVASQSIIAYTMSLGAENSVAYSNNSIAIPTNFTISVTTEILPVSMTKTSVDCTMYICGDSTECSNLLLQYGSFCTQLNRALTGIAVEQDKNTQEVFAQVKQIYKTPPIKDFGGFNFSQILPDPSKPSKRSFIEDLLFNKVTLADAGFIKQYGDCLGDIAARDLICAQKFNGLTVLPPLLTDEMIAQYTSALLAGTITSGWTFGAGAALQIPFAMQMAYRFNGIGVTQNVLYENQKLIANQFNSAIGKIQDSLSFTASALGKLQDVVNQNAQALNTLVKQLSSNCGAISSVLNDILSRLDKVEAEVQIDRLITCRLQSLQTYVTQQLIRAAEIRASANLAATKMSECVLGQSKRVDFCGKGYHLMSFPQSAPHGVVFLHVTYVPAQEKNFTTAPAICHDGKAHFPREGVFVSNGTHWFVTQRNFYEPQIITTDNTFVSGNCDVVIGIVNNTVYDPLQPELDSGGGGSDIIKLLNEQVNKEMQSSNLYMSMSSWCYTHSLDGAGLFLFDHAAEEYEHAKKLIIFLNENNVPVQLTSISAPEHKFEGLTQIFQKAYEHEQHISESINNIVDHAIKSKDHATFNFLQWYVAEQHEEEVLFKDILDKIELIGNENHGLYLADQYVKGIAKSRKS

SEQ ID NO: 9406 - protein, 1315 aa, Artificial Sequence; identical to SEQ ID NO: 9386
  SARS-CoV-2/Australia/NSW10/2020__EPI_ISL_413596 spike protein (1-1147)(F970C_G999C) Ferritin construct

SEQ ID NO: 9407 - protein, 1315 aa, Artificial Sequence
  SARS-CoV-2/Switzerland/1000477797/2020__EPI_ISL_413023 spike protein (1-1147)(F970C_G999C) Ferritin construct
MFVFLVLLPLVSSQCVNLTTRTQLPPAYTNSFTRGVYYPDKVFRSSVLHSTQDLFLPFFSNVTWFHAIHVSGTNGTKRFDNPVLPFNDGVYFASTEKSNIIRGWIFGTTLDSKTQSLLIVNNATNVVIKVCEFQFCNDPFLGVYYHKNNKSWMESEFRVYSSANNCTFEYVSQPFLMDLEGKQGNFKNLREFVFKNIDGYFNIYSKHTPINLVRDLPQGFSALEPLVDLPIGINITRFQTLLALHRSYLTPGDSSSGWTAGAAAYYVGYLQPRTFLLKYNENGTITDAVDCALDPLSETKCTLKSFTVEKGIYQTSNFRVQPTESIVRFPNITNLCPFGEVFNATRFASVYAWNRKRISNCVADYSVLYNSASFSTFKCYGVSPTKLNDLCFTNVYADSFVIRGDEVRQIAPGQTGKIADYNYKLPDDFTGCVIAWNSNNLDSKVGGNYNYLYRLFRKSNLKPFERDISTEIYQAGSTPCNGVEGFNCYFPLQSYGFQPTNGVGYQPYRVVVLSFELLHAPATVCGPKKSTNLVKNKCVNFNFNGLTGTGVLTESNKKFLPFQQFGRDIADTTDAVRDPQTLEILDITPCSFGGVSVITPGTNTSNQVAVLYQGVNCTEVPVAIHADQLTPTWRVYSTGSNVFQTRAGCLIGAEHVNNSYECDIPIGAGICASYQTQTNSPRRARSVASQSIIAYTMSLGAENSVAYSNNSIAIPTNFTISVTTEILPVSMTKTSVDCTMYICGDSTECSNLLLQYGSFCTQLNRALTGIAVEQDKNTQEVFAQVKQIYKTPPIKDFGGFNFSQILPDPSKPSKRSFIEDLLFNKVTLADAGFIKQYGDCLGDIAARDLICAQKFNGLTVLPPLLTDEMIAQYTSALLAGTITSGWTFGAGAALQIPFAMQMAYRFNGIGVTQNVLYENQKLIANQFNSAIGKIQDSLSSTASALGKLQDVVNQNAQALNTLVKQLSSNCGAISSVLNDILSRLDKVEAEVQIDRLITCRLQSLQTYVTQQLIRAAEIRASANLAATKMSECVLGQSKRVDFCGKGYHLMSFPQSAPHGVVFLHVTYVPAQEKNFTTAPAICHDGKAHFPREGVFVSNGTHWFVTQRNFYEPQIITTDNTFVSGNCDVVIGIVNNTVYDPLQPELDSGGGGSDIIKLLNEQVNKEMQSSNLYMSMSSWCYTHSLDGAGLFLFDHAAEEYEHAKKLIIFLNENNVPVQLTSISAPEHKFEGLTQIFQKAYEHEQHISESINNIVDHAIKSKDHATFNFLQWYVAEQHEEEVLFKDILDKIELIGNENHGLYLADQYVKGIAKSRKS

SEQ ID NO: 9408 - protein, 1315 aa, Artificial Sequence
  SARS-CoV-2/Belgium/BA-02291/2020__EPI_ISL_415159 spike protein (1-1147)(F970C_G999C) Ferritin construct
MFVFLVLLPLVSSQCVNLTTRTQLPPAYTNSFTRGVYYPDKVFRSSVLHSTQDLFLPFFSNVTWFHAIHVSGTNGTKRFDNPVLPFNDGVYFASTEKSNIIRGWIFGTTLDSKTQSLLIVNNATNVVIKVCEFQFCNDPFLGVYYHKNNKSWMESEFRVYSSANNCTFEYVSQPFLMDLEGKQGNFKNLREFVFKNIDGYFKIYSKHTPINLVRDLPQGFSALEPLVDLPIGINITRFQTLLALHRSYLTPGDSSSGWTAGAAAYYVGYLQPRTFLLKYNENGTITDAVDCALDPLSETKCTLKSFTVEKGIYQTSNFRVQPTESIVRFPNITNLCPFGEVFNATRFASVYAWNRKRISNCVADYSVLYNSASFSTFKCYGVSPTKLNDLCFTNVYADSFVIRGDEVRQIAPGQTGKIADYNYKLPDDFTGCVIAWNSNNLDSKVGGNYNYLYRLFRRSNLKPFERDISTEIYQAGSTPCNGVEGFNCYFPLQSYGFQPTNGVGYQPYRVVVLSFELLPAPATVCGPKKSTNLVKNKCVNFNFNGLTGTGVLTESNKKFLPFQQFGRDIADTTDAVRDPQTLEILDITPCSFGGVSVITPGTNTSNQVAVLYQGVNCTEVPVAIHADQLTPTWRVYSTGSNVFQTRAGCLIGAEHVNNSYECDIPIGAGICASYQTQTNSPRRARSVASQSIIAYTMSLGAENSVAYSNNSIAIPTNFTISVTTEILPVSMTKTSVDCTMYICGDSTECSNLLLQYGSFCTQLNRALTGIAVEQDKNTQEVFAQVKQIYKTPPIKDFGGFNFSQILPDPSKPSKRSFIEDLLFNKVTLADAGFIKQYGDCLGDIAARDLICAQKFNGLTVLPPLLTDEMIAQYTSALLAGTITSGWTFGAGAALQIPFAMQMAYRFNGIGVTQNVLYENQKLIANQFNSAIGKIQDSLSSAAPALGKLQDVVNQNAQALNTLVKQLSSNCGAISSVLNDILSRLDKVEAEVQIDRLITCRLQSLQTYVTQQLIRAAEIRASANLAATKMSECVLGQSKRVDFCGKGYHLMSFPQSAPHGVVFLHVTYVPAQEKNFTTAPAICHDGKAHFPREGVFVSNGTHWFVTQRNFYEPQIITTDNTFVSGNCDVVIGIVNNTVYDPLQPELDSGGGGSDIIKLLNEQVNKEMQSSNLYMSMSSWCYTHSLDGAGLFLFDHAAEEYEHAKKLIIFLNENNVPVQLTSISAPEHKFEGLTQIFQKAYEHEQHISESINNIVDHAIKSKDHATFNFLQWYVAEQHEEEVLFKDILDKIELIGNENHGLYLADQYVKGIAKSRKS

SEQ ID NO: 9409 - protein, 1315 aa, Artificial Sequence
  SARS-CoV-2/USA/WA8-UW5/2020__EPI_ISL_413486 spike protein (1-1147)(F970C_G999C) Ferritin construct
MFVFLVLLPLVSSQCVNLTTRTQLPPAYTNSFTRGVYYPDKVFRSSVLHSTQDLFLPFFSNVTWFHAIHVSGTNGTKRFDNPVLPFNDGVYFASTEKSNIIRGWIFGTTLDSKTQSLLIVNNATNVVIKVCEFQFCNDPFLGVYYHKNNKSWMESEFRVYSSANNCTFEYVSQPFLMDLEGKQGNFKNLREFVFKNIDGYFKIYSKHTPINLVRDLPQGFSALEPLVDLPIGINITRFQTLLALHRSYLTPGDSSSGWTAGAAAYYVGYLQPRTFLLKYNENGTITDAVDCALDPLSETKCTLKSFTVEKGIYQTSNFRVQPTESIVRFPNITNLCPFGEVFNATRFASVYAWNRKRISNCVADYSVLYNSASFSTFKCYGVSPTKLNDLCFTNVYADSFVIRGDEVRQIAPGQTGKIADYNYKLPDDFTGCVIAWNSNNLDSKVGGNYNYLYRLFRKSNLKPFERDISTEIYQAGSTPCNGVEGFNCYFPLQSYGFQPTNGVGYQPYRVVVLSFELLHAPATVCGPKKSTNLVKNKCVNFNFNGLTGTGVLTESNKKFLPFQQFGRDIADTTDAVRDPQTLEILDITPCSFGGVSVITPGTNTSNQVAVLYQDVNCTEVPVAIHADQLTPTWRVYSTGSNVFQTRAGCLIGAEYVNNSYECDIPIGAGICASYQTQTNSPRRARSVASQSIIAYTMSLGAENSVAYSNNSIAIPTNFTISVTTEILPVSMTKTSVDCTMYICGDSTECSNLLLQYGSFCTQLNRALTGIAVEQDKNTQEVFAQVKQIYKTPPIKDFGGFNFSQILPDPSKPSKRSFIEDLLFNKVTLADAGFIKQYGDCLGDIAARDLICAQKFNGLTVLPPLLTDEMIAQYTSALLAGTITSGWTFGAGAALQIPFAMQMAYRFNGIGVTQNVLYENQKLIANQFNSAIGKIQDSLSSTASALGKLQDVVNQNAQALNTLVKQLSSNCGAISSVLNDILSRLDKVEAEVQIDRLITCRLQSLQTYVTQQLIRAAEIRASANLAATKMSECVLGQSKRVDFCGKGYHLMSFPQSAPHGVVFLHVTYVPAQEKNFTTAPAICHDGKAHFPREGVFVSNGTHWFVTQRNFYEPQIITTDNTFVSGNCDVVIGIVNNTVYDPLQPELDSGGGGSDIIKLLNEQVNKEMQSSNLYMSMSSWCYTHSLDGAGLFLFDHAAEEYEHAKKLIIFLNENNVPVQLTSISAPEHKFEGLTQIFQKAYEHEQHISESINNIVDHAIKSKDHATFNFLQWYVAEQHEEEVLFKDILDKIELIGNENHGLYLADQYVKGIAKSRKS

SEQ ID NO: 9410 - protein, 1315 aa, Artificial Sequence
  SARS-CoV-2/England/20102000506/2020__EPI_ISL_415147 spike protein (1-1147)(F970C_G999C) Ferritin construct
MFVFLVLLPLVSSQCVNLTTRTQLPPAYTNSFTRGVYYPDKVFRSSVLHSTQDLFLPFFSNVTWFHAIHVSGTNGTKRFDNPVLPFNDGVYFASTEKSNIIRGWIFGTTLDSKTQSLLIVNNATNVVIKVCEFQFCNDPFLGVYYHKNNKSWMESEFRVYSSANNCTFEYVSQPFLMDLEGKQGNFKNLREFVFKNIDGYFKIYSKHTPINLVRDLPQGFSALEPLVDLPIGINITRFQTLLALHRSYLTPGDSSSGWTAGAAAYYVGYLQPRTFLLKYNENGTITDAVDCALDPLSETKCTLKSFTVEKGIYQTSNFRVQPTESIVRFPNITNLCPFGEVFNATRFASVYAWNRKRISNCVADYSVLYNSASFSTFKCYGVSPTKLNDLCFTNVYADSFVIRGDEVRQIAPGQTGKIADYNYKLPDDFTGCVIAWNSNNLDSKVGGNYNYLYRLFRKSNLKPFERDISTEIYQAGSTPCNGVEGFNCYFPLQSYGFQPTNGVGYQPYRVVVLSFELLHAPATVCGPKKSTNLVKNKCVNFNFNGLTGTGVLTESNKKFLPFQQFGRDIADTTDAVRDPQTLEILDITPCSFGGVSVITPGTNTSNQVAVLYQGVNCTEVPVAIHADQLTPTWRVYSTGSNVFQTRAGCLIGAEHVNNSYECDIPIGAGICASYQTQTNSPRRARSVASQSIIAYTMSLGAENSVAYSNNSIAIPTNFTISVTTEILPVSMTKTSVDCTMYICGDSTECSNLLLQYGSFCTQLNRALTGIAVEQDKNTQEVFAQVKQIYKTPPIKDFGGFNFSQILPDPSKPSKRSFIEDLLFNKVTLADAGFIKQYGYCLGDIAARDLICAQKFNGLTVLPPLLTDEMIAQYTSALLAGTITSGWTFGAGAALQIPFAMQMAYRFNGIGVTQNVLYENQKLIANQFNSAIGKIQDSLSSTASALGKLQDVVNQNAQALNTLVKQLSSNCGAISSVLNDILSRLDKVEAEVQIDRLITCRLQSLQTYVTQQLIRAAEIRASANLAATKMSECVLGQSKRVDFCGKGYHLMSFPQSAPHGVVFLHVTYVPAQEKNFTTAPAICHDGKAHFPREGVFVSNGTHWFVTQRNFYEPQIITTDNTFVSGNCDVVIGIVNNTVYDPLQPELDSGGGGSDIIKLLNEQVNKEMQSSNLYMSMSSWCYTHSLDGAGLFLFDHAAEEYEHAKKLIIFLNENNVPVQLTSISAPEHKFEGLTQIFQKAYEHEQHISESINNIVDHAIKSKDHATFNFLQWYVAEQHEEEVLFKDILDKIELIGNENHGLYLADQYVKGIAKSRKS

SEQ ID NO: 9411 - protein, 1315 aa, Artificial Sequence
  SARS-CoV-2/Belgium/VAG-03013/2020__EPI_ISL_415155 spike protein (1-1147)(F970C_G999C) Ferritin construct
MFVFLVLLPLVSSQCVNLTTRTQLPPAYTNSFTRGVYYPDKVFRSSVLHSTQDLFLPFFSNVTWFHAIHVSGTNGTKRFDNPVLPFNDGVYFASTEKSNIIRGWIFGTTLDSKTQSLLIVNNATNVVIKVCEFQFCNDPFLGVYYHKNNKSWMESEFRVYSSANNCTFEYVSQPFLMDLEGKQGNFKNLREFVFKNIDGYFKIYSKHTPINLVRDLPQGFSALEPLVDLPIGINITRFQTLLALHRSYLTPGDSSSGWTAGAAAYYVGYLQPRTFLLKYNENGTITDAVDCALDPLSETKCTLKSFTVEKGIYQTSNFRVQPTESIVRFPNITNLCPFGEVFNATRFASVYAWNRKRISNCVADYSVLYNSASFSTFKCYGVSPTKLNDLCFTNVYADSFVIRGDEVRQIAPGQTGKIADYNYKLPDDFTGCVIAWNSNNLDSKVGGNYNYLYRLFRKSNLKPFERDISTEIYQAGSTPCNGVEGFNCYFPLQSYGFQPTNGVGYQPYRVVVLSFELLHAPATVCGPKKSTNLVKNKCVNFNFNGLTGTGVLTESNKKFLPFQQFGRDIADTTDAVRDPQTLEILDITPCSFGGVSVITPGTNTSNQVAVLYQGVNCTEVPVAIHADQLTPTWRVYSTGSNVFQTRAGCLIGAEHVNNSYECDIPIGAGICASYQTQTNSPRRARSVASQSIIAYTMSLGAENSVAYSNNSIAIPTNFTISVTTEILPVSMTKTSVDCTMYICGDSTECSNLLLQYGSFCTQLNRALTGIAVEQDKNTQEVFAQVKQIYKTPPIKDFGGFNFSQILPDPSKPSKRSFIEDLLFNKVTLADAGFIKQYGDCLGDIAARDLICAQKFNGLTVLPPLLTDEMIAQYTSALLAGTITSGWTFGAGAALQIPFAMQMAYRFNGIGVTQNVLYENQKLIANQFNSAIGKIQDSLSSTATALGKLQDVVNQNAQALNTLVKQLSSNCGAISSVLNDILSRLDKVEAEVQIDRLITCRLQSLQTYVTQQLIRAAEIRASANLAATKMSECVLGQSKRVDFCGKGYHLMSFPQSAPHGVVFLHVTYVPAQEKNFTTAPAICHDGKAHFPREGVFVSNGTHWFVTQRNFYEPQIITTDNTFVSGNCDVVIGIVNNTVYDPLQPELDSGGGGSDIIKLLNEQVNKEMQSSNLYMSMSSWCYTHSLDGAGLFLFDHAAEEYEHAKKLIIFLNENNVPVQLTSISAPEHKFEGLTQIFQKAYEHEQHISESINNIVDHAIKSKDHATFNFLQWYVAEQHEEEVLFKDILDKIELIGNENHGLYLADQYVKGIAKSRKS

SEQ ID NO: 9412 - protein, 1315 aa, Artificial Sequence
  SARS-CoV-2/Belgium/BC-03016/2020__EPI_ISL_415157 spike protein (1-1147)(F970C_G999C) Ferritin construct
MFVFLVLLPLVSSQCVNLTTRTQLPPAYTNSFTRGVYYPDKVFRSSVLHSTQDLFLPFFSNVTWFHAIHVSGTNGTKRFDNPVLPFNDGVYFASTEKSNIIRGWIFGTTLDSKTQSLLIVNNATNVVIKVCEFQFCNDPFLGVYYHKNNKSWMESEFRVYSSANNCTFEYVSQPFLMDLEGKQGNFKNLREFVFKNIDGYFKIYSKHTPINLVRDLPQGFSALEPLVDLPIGINITRFQTLLALHRSYLTPGDSSSGWTAGAAAYYVGYLQPRTFLLKYNENGTITDAVDCALDPLSETKCTLKSFTVEKGIYQTSNFRVQPTESIVRFPNITNLCPFGEVFNATRFASVYAWNRKRISNCVADYSVLYNSASFSTFKCYGVSPTKLNDLCFTNVYADSFVIRGDEVRQIAPGQTGKIADYNYKLPDDFTGCVIAWNSNNLDSKVGGNYNYLYRLFRKSNLKPFERDISTEIYQAGSTPCNGVEGFNCYFPLQSYGFQPTNGVGYQPYRVVVLSFELLHAPATVCGPKKSTNLVKNKCVNFNFNGLTGTGVLTESNKKFLPFQQFGRDIADTTDAVRDPQTLEILDITPCSFGGVSVITPGTNTSNQVAVLYQGVNCTEVPVAIHADQLTPTWRVYSTGSNVFQTRAGCLIGAEHVNNSYECDIPIGAGICASYQTQTNSPRRARSVASQSIIAYTMSLGAENSVAYSNNSIAIPTNFTISVTTEILPVSMTKTSVDCTMYICGDSTECSNLLLQYGSFCTQLNRALTGIAVEQDKNTQEVFAQVKQIYKTPPIKDFGGFNFSQILPDPSKPSKRSFIEDLLFNKVTLADAGFIKQYGDCLGDIAARDLICAQKFNGLTVLPPLLTDEMIAQYTSALLAGTITSGWTFGAGAALQIPFAMQMAYRFNGIGVTQNVLYENQKLIANQFNSAIGKIQDSLSSTAPALGKLQDVVNQNAQALNTLVKQLSSNCGAISSVLNDILSRLDKVEAEVQIDRLITCRLQSLQTYVTQQLIRAAEIRASANLAATKMSECVLGQSKRVDFCGKGYHLMSFPQSAPHGVVFLHVTYVPAQEKNFTTAPAICHDGKAHFPREGVFVSNGTHWFVTQRNFYEPQIITTDNTFVSGNCDVVIGIVNNTVYDPLQPELDSGGGGSDIIKLLNEQVNKEMQSSNLYMSMSSWCYTHSLDGAGLFLFDHAAEEYEHAKKLIIFLNENNVPVQLTSISAPEHKFEGLTQIFQKAYEHEQHISESINNIVDHAIKSKDHATFNFLQWYVAEQHEEEVLFKDILDKIELIGNENHGLYLADQYVKGIAKSRKS

SEQ ID NO: 9413 - protein, 1315 aa, Artificial Sequence
  SARS-CoV-2/Germany/BavPat3/2020__EPI_ISL_414521 spike protein (1-1147)(F970C_G999C) Ferritin construct
MFVFLVLLPLVSSQCVNLTTRTQLPPAYTNSFTRGVYYPDKVFRSSVLHSTQDLFLPFFSNVTWFHAIHVSGTNGTKRFDNPVLPFNDGVYFASTEKSNIIRGWIFGTTLDSKTQSLLIVNNATNVVIKVCEFQFCNDPFLGVYYHKNNKSWMESEFRVYSSANNCTFEYVSQPFLMDLEGKQGNFKNLREFVFKNIDGYFKIYSKHTPINLVRDLPQGFSALEPLVDLPIGINITRFQTLLALHRSYLTPGDSSSGWTAGAAAYYVGYLQPRTFLLKYNENGTITDAVDCALDPLSETKCTLKSFTVEKGIYQTSNFRVQPTESIVRFPNITNLCPFGEVFNATRFASVYAWNRKRISNCVADYSVLYNSASFSTFKCYGVSPTKLNDLCFTNVYADSFVIRGDEVRQIAPGQTGKIADYNYKLPDDFTGCVIAWNSNNLDSKVGGNYNYLYRLFRKSNLKPFERDISTEIYQAGSTPCNGVEGFNCYFPLQSYGFQPTNGVGYQPYRVVVLSFELLHAPATVCGPKKSTNLVKNKCVNFNFNGLTGTGVLTESNKKFLPFQQFGRDIADTTDAVRDPQTLEILDITPCSFGGVSVITPGTNTSNQVAVLYQDVNCTEVPVAIHADQLTPTWRVYSTGSNVFQTRAGCLIGAEHVNNSYECDIPIGAGICASYQTQTNSPRRARSVASQSIIAYTMSLGAENSVAYSNNSIAIPTNFTISVTTEILPVSMTKTSVDCTMYICGDSTECSNLLLQYGSFCTQLNRALTGIAVEQDKNTQQVFAQVKQIYKTPPIKDFGGFNFSQILPDPSKPSKRSFIEDLLFNKVTLADAGFIKQYGDCLGDIAARDLICAQKFNGLTVLPPLLTDEMIAQYTSALLAGTITSGWTFGAGAALQIPFAMQMAYRFNGIGVTQNVLYENQKLIANQFNSAIGKIQDSLSSTASALGKLQDVVNQNAQALNTLVKQLSSNCGAISSVLNDILSRLDKVEAEVQIDRLITCRLQSLQTYVTQQLIRAAEIRASANLAATKMSECVLGQSKRVDFCGKGYHLMSFPQSAPHGVVFLHVTYVPAQEKNFTTAPAICHDGKAHFPREGVFVSNGTHWFVTQRNFYEPQIITTDNTFVSGNCDVVIGIVNNTVYDPLQPELDSGGGGSDIIKLLNEQVNKEMQSSNLYMSMSSWCYTHSLDGAGLFLFDHAAEEYEHAKKLIIFLNENNVPVQLTSISAPEHKFEGLTQIFQKAYEHEQHISESINNIVDHAIKSKDHATFNFLQWYVAEQHEEEVLFKDILDKIELIGNENHGLYLADQYVKGIAKSRKS

SEQ ID NO: 9414 - protein, 1315 aa, Artificial Sequence
  SARS-CoV-2/France/HF1805/2020__EPI_ISL_414628 spike protein (1-1147)(F970C_G999C) Ferritin construct
MFVFLVLLPLVSSQCVNLTTRTQLPPAYTNSFTRGVYYPDKVFRSSVLHSTQDLFLPFFSNVTWFHAIHVSGTNGTKRFDNPVLPFNDGVYFASTEKSNIIRGWIFGTTLDSKTQSLLIVNNATNVVIKVCEFQFCNDPFLGVYYHKNNKSWMESEFRVYSSANNCTFEYVSQPFLMDLEGKQGNFKNLREFVFKNIDGYFKIYSKHTPINLVRDLPQGFSALEPLVDLPIGINITRFQTLLALHRSYLTPGDSSSGWTAGAAAYYVGYLQPRTFLLKYNENGTITDAVDCALDPLSETKCTLKSFTVEKGIYQTSNFRVQPTESIVRFPNITNLCPFGEVFNATRFASVYAWNRKRISNCVADYSVLYNSASFSTFKCYGVSPTKLNDLCFTNVYADSFVIRGDEVRQIAPGQTGKIADYNYKLPDDFTGCVIAWNSNNLDSKVGGNYNYLYRLFRKSNLKPFERDISTEIYQAGSTPCNGVEGFNCYFPLQSYGFQPTNGVGYQPYRVVVLSFELLHAPATVCGPKKSTNLVKNKCVNFNFNGLTGTGVLTESNKKFLPFQQFGRDIADTTDAVRDPQTLEILDITPCSFGGVSVITPGTNTSNQVAVLYQGVNCTEVPVAIHADQLTPTWRVYSTGSNVFQTRAGCLIGAEHVNNSYECDIPIGAGICASYQTQTNSPRRARSVASQSIIAYTMSLGAENSVAYSNNSIAIPTNFTISVTTEILPVSMTKTSVDCTMYICGDSTECSNLLLQYGSFCTQLNRALTGIAVEQDKNTQEVFAQVKQIYKTPPIKDFGGFNFSQILPDPSKPSKRSFIEDLLFNKVTLADAGFIKQYGDCLGDIAARDLICAQKFNGLTVLPPLLTDEMIAQYTSALLAGTITSGWTFGAGAALQIPFAMQMAYRFNGIGVTQNVLYENQKLIANQFNSAIGKIQDSLSSTASALGKLQDVVNQNAQALNTLVKQLSSNCGAISSVLNDILSRLDKVEAEVQIDRLITCRLQSLQTYVTQQLIRAAEIRASANLAATKMSECVLGQSKRVDFCGKGYHLMSFPQSAPHGVVFLHVTYVPAQEKNFTTAPAICHDGKAHFPREGVFVSNGTHWFVTQRNFYEPQIITTDNTFVSGNCDVVIGVVNNTVYDPLQPELDSGGGGSDIIKLLNEQVNKEMQSSNLYMSMSSWCYTHSLDGAGLFLFDHAAEEYEHAKKLIIFLNENNVPVQLTSISAPEHKFEGLTQIFQKAYEHEQHISESINNIVDHAIKSKDHATFNFLQWYVAEQHEEEVLFKDILDKIELIGNENHGLYLADQYVKGIAKSRKS

SEQ ID NO: 9415 - protein, 1315 aa, Artificial Sequence
  SARS-CoV-2/Netherlands/ZuidHolland_9/2020__EPI_ISL_414445 spike protein (1-1147)(F970C_G999C) Ferritin construct
MFVFLVLLPLVSSQCVNLTTRTQLPPAYTNSFTRGVYYPDKVFRSSVLHSTQDLFLPFFSNVTWFHAIHVSGTNGTKRFDNPVLPFNDGVYFASTEKSNIIRGWIFGTTLDSKTQSLLIVNNATNVVIKVCEFQFCNDPFLGVYYHKNNKSWMESEFRVYSSANNCTFEYVSQPFLMDLEGKQGNFKNLREFVFKNIDGYFKIYSKHTPINLVRDLPQGFSALEPLVDLPIGINITRFQTLLALHRSYLTPGDSSSGWTAGAAAYYVGYLQPRTFLLKYNENGTITDAVDCALDPLSETKCTLKSFTVEKGIYQTSNFRVQPTESIVRFPNITNLCPFGEVFNATRFASVYAWNRKRISNCVADYSVLYNSASFSTFKCYGVSPTKLNDLCFTNVYADSFVIRGDEVRQIAPGQTGKIADYNYKLPDDFTGCVIAWNSNNLDSKVGGNYNYLYRLFRKSNLKPFERDISTEIYQAGSTPCNGVEGFNCYFPLQSYGFQPTNGVGYQPYRVVVLSFELLHAPATVCGPKKSTNLVKNKCVNFNFNGLTGTGVLTESNKKFLPFQQFGRDIADTTDAVRDPQTLEILDITPCSFGGVSVITPGTNTSNQVAVLYQGVNCTEVPVAIHADQLTPTWRVYSTGSNVFQTRAGCLIGAEHVNNSYECDIPIGAGICASYQTQTNSPRRARSVASQSIIAYTMSLGAENSVAYSNNSIAIPTNFTISVTTEILPVSMTKTSVDCTMYICGDSTECSNLLLQYGSFCTQLNRALTGIAVEQDKNTQEVFAQVKQIYKTPPIKDFGGFNFSQILPDPSKPSKRSFIEDLLFNKVTLADAGFIKQYGDCLGDIAARDLICVQKFNGLTVLPPLLTDEMIAQYTSALLAGTITSGWTFGAGAALQIPFAMQMAYRFNGIGVTQNVLYENQKLIANQFNSAIGKIQDSLSSTASALGKLQDVVNQNAQALNTLVKQLSSNCGAISSVLNDILSRLDKVEAEVQIDRLITCRLQSLQTYVTQQLIRAAEIRASANLAATKMSECVLGQSKRVDFCGKGYHLMSFPQSAPHGVVFLHVTYVPAQEKNFTTAPAICHDGKAHFPREGVFVSNGTHWFVTQRNFYEPQIITTDNTFVSGNCDVVIGIVNNTVYDPLQPELDSGGGGSDIIKLLNEQVNKEMQSSNLYMSMSSWCYTHSLDGAGLFLFDHAAEEYEHAKKLIIFLNENNVPVQLTSISAPEHKFEGLTQIFQKAYEHEQHISESINNIVDHAIKSKDHATFNFLQWYVAEQHEEEVLFKDILDKIELIGNENHGLYLADQYVKGIAKSRKS

SEQ ID NO: 9416 - protein, 1315 aa, Artificial Sequence
  SARS-CoV-2/Finland/FIN03032020A/2020__EPI_ISL_413602 spike protein (1-1147)(F970C_G999C) Ferritin construct
MFVFLVLLPLVSSQCVNLTTRTQLPPAYTNSFTRGVYYPDKVFRSSVLHSTQDLFLPFFSNVTWFHAIHVSGTNGTKRFDNPVLPFNDGVYFASTEKSNIIRGWIFGTTLDSKTQSLLIVNNATNVVIKVCEFQFCNDPFLGVYYHKNNKSWMESEFRVYSSANNCTFEYVSQPFLMDLEGKQGNFKNLREFVFKNIDGYFKIYSKHTPINLVRDLPQGFSALEPLVDLPIGINITRFQTLLALHRSYLTPGDSSSGWTAGAAAYYVGYLQPRTFLLKYNENGTITDAVDCALDPLSETKCTLKSFTVEKGIYQTSNFRVQPTESIVRFPNITNLCPFGEVFNATRFASVYAWNRKRISNCVADYSVLYNSASFSTFKCYGVSPTKLNDLCFTNVYADSFVIRGDEVRQIAPGQTGKIADYNYKLPDDFTGCVISWNSNNLDSKVGGNYNYLYRLFRKSNLKPFERDISTEIYQAGSTPCNGVEGFNCYFPLQSYGFQPTNGVGYQPYRVVVLSFELLHAPATVCGPKKSTNLVKNKCVNFNFNGLTGTGVLTESNKKFLPFQQFGRDIADTTDAVRDPQTLEILDITPCSFGGVSVITPGTNTSNQVAVLYQGVNCTEVPVAIHADQLTPTWRVYSTGSNVFQTRAGCLIGAEHVNNSYECDIPIGAGICASYQTQTNSPRRARSVASQSIIAYTMSLGAENSVAYSNNSIAIPTNFTISVTTEILPVSMTKTSVDCTMYICGDSTECSNLLLQYGSFCTQLNRALTGIAVEQDKNTQEVFAQVKQIYKTPPIKDFGGFNFSQILPDPSKPSKRSFIEDLLFNKVTLADAGFIKQYGDCLGDIAARDLICAQKFNGLTVLPPLLTDEMIAQYTSALLAGTITSGWTFGAGAALQIPFAMQMAYRFNGIGVTQNVLYENQKLIANQFNSAIGKIQDSLSSTASALGKLQDVVNQNAQALNTLVKQLSSNCGAISSVLNDILSRLDKVEAEVQIDRLITCRLQSLQTYVTQQLIRAAEIRASANLAATKMSECVLGQSKRVDFCGKGYHLMSFPQSAPHGVVFLHVTYVPAQEKNFTTAPAICHDGKAHFPREGVFVSNGTHWFVTQRNFYEPQIITTDNTFVSGNCDVVIGIVNNTVYDPLQPELDSGGGGSDIIKLLNEQVNKEMQSSNLYMSMSSWCYTHSLDGAGLFLFDHAAEEYEHAKKLIIFLNENNVPVQLTSISAPEHKFEGLTQIFQKAYEHEQHISESINNIVDHAIKSKDHATFNFLQWYVAEQHEEEVLFKDILDKIELIGNENHGLYLADQYVKGIAKSRKS

SEQ ID NO: 9417 - protein, 1315 aa, Artificial Sequence
  SARS-CoV-2/France/GE1977/2020__EPI_ISL_414632 spike protein (1-1147)(F970C_G999C) Ferritin construct
MFVFLVLLPLVSSQCVNLTTRTQLPPAYTNSFTRGVYYPDKVFRSSVLHSTQDLFLPFFSNVTWFHAIHVSGTNGTKRFDNPVLPFNDGVYFASTEKSNIIRGWIFGTTLDSKTQSLLIVNNATNVVIKVCEFQFCNDPFLGVYYHKNNKSWMESEFRVYSSANNCTFEYVSQPFLMDLEGKQGNFKNLREFVFKNIDGYFKIYSKHTPINLVRDLPQGFSALEPLVDLPIGINITRFQTLLALHRSYLTPGDSSSGWTAGAAAYYVGYLQPRTFLLKYNENGTITDAVDCALDPLSETKCTLKSFTVEKGIYQTSNFRVQPTESIVRFPNITNLCPFGEVFNATRFASVYAWNRKRISNCVADYSVLYNSASFSTFKCYGVSPTKLNDLCFTNVYADSFVIRGDEVRQIAPGQTGKIADYNYKLPDDFTGCVIAWNSNNLDSKVGGNYNYLYRLFRKSNLKPFERDISTEIYQAGSTPCNGVEGFNCYFPLQSYGFQPTNGVGYQPYRVVVLSFELLHAPATVCGPKKSTNLVKNKCVNFNFNGLTGTGVLTESNKKFLPFQQFGRDIADTTDAVRDPQTLEILDITPCSFGGVSVITPGTNTSNQVAVLYQGVNCTEVPVAIHADQLTPTWRVYSTGSNVFQTRAGCLIGAEHVNNSYECDIPIGAGICASYQTQTNSPRRARSVASQSIIAYTMSLGAENSVAYSNNSIAIPTNFTISVTTEILPVSMTKTSVDCTMYICGDSTECSNLLLQYGSFCTQLNRALTGIAVEQDKNTQEVFAQVKQIYKTPPIKDFGGFNFSQILPDPSKPSKRSFIEDLLFNKVTLADAGFIKQYGDCLGDIAARDLICAQKFNGLTVLPPLLTDEMIAQYTSALLAGTITSGWTFGAGAALQIPFAMQMAYRFNGIGVTQNVLYENQKLIANQFNSAIGKIQDSLFSTASALGKLQDVVNQNAQALNTLVKQLSSNCGAISSVLNDILSRLDKVEAEVQIDRLITCRLQSLQTYVTQQLIRAAEIRASANLAATKMSECVLGQSKRVDFCGKGYHLMSFPQSAPHGVVFLHVTYVPAQEKNFTTAPAICHDGKAHFPREGVFVSNGTHWFVTQRNFYEPQIITTDNTFVSGNCDVVIGIVNNTVYDPLQPELDSGGGGSDIIKLLNEQVNKEMQSSNLYMSMSSWCYTHSLDGAGLFLFDHAAEEYEHAKKLIIFLNENNVPVQLTSISAPEHKFEGLTQIFQKAYEHEQHISESINNIVDHAIKSKDHATFNFLQWYVAEQHEEEVLFKDILDKIELIGNENHGLYLADQYVKGIAKSRKS

SEQ ID NO: 9418 - protein, 1315 aa, Artificial Sequence
  SARS-CoV-2/Finland/FIN-313/2020__EPI_ISL_414641 spike protein (1-1147)(F970C_G999C) Ferritin construct
MFVFLVLLPLVSSQCVNLTTRTQLPPAYTNSFTRGVYYPDKVFRSSVLHSTQDLFLPFFSNVTWFHAIHVSGTNGTKRFDNPVLPFNDGVYFASTEKSNIIRGWIFGTTLDSKTQSLLIVNNATNVVIKVCEFQFCNDPFLGVYYHKNNKSWMESEFRVYSSANNCTFEYVSQPFLMDLEGKQGNFKNLREFVFKNIDGYFKIYSKHTPINLVRDLPQGFSALEPLVDLPIGINITRFKTLLALHRSYLTPGDSSSGWTAGAAAYYVGYLQPRTFLLKYNENGTITDAVDCALDPLSETKCTLKSFTVEKGIYQTSNFRVQPTESIVRFPNITNLCPFGEVFNATRFASVYAWNRKRISNCVADYSVLYNSASFSTFKCYGVSPTKLNDLCFTNVYADSFVIRGDEVRQIAPGQTGKIADYNYKLPDDFTGCVIAWNSNNLDSKVGGNYNYLYRLFRKSNLKPFERDISTEIYQAGSTPCNGVEGFNCYFPLQSYGFQPTNGVGYQPYRVVVLSFELLHAPATVCGPKKSTNLVKNKCVNFNFNGLTGTGVLTESNKKFLPFQQFGRDIADTTDAVRDPQTLEILDITPCSFGGVSVITPGTNTSNQVAVLYQGVNCTEVPVAIHADQLTPTWRVYSTGSNVFQTRAGCLIGAEHVNNSYECDIPIGAGICASYQTQTNSPRRARSVASQSIIAYTMSLGAENSVAYSNNSIAIPTNFTISVTTEILPVSMTKTSVDCTMYICGDSTECSNLLLQYGSFCTQLNRALTGIAVEQDKNTQEVFAQVKQIYKTPPIKDFGGFNFSQILPDPSKPSKRSFIEDLLFNKVTLADAGFIKQYGDCLGDIAARDLICAQKFNGLTVLPPLLTDEMIAQYTSALLAGTITSGWTFGAGAALQIPFAMQMAYRFNGIGVTQNVLYENQKLIANQFNSAIGKIQDSLSSTASALGKLQDVVNQNAQALNTLVKQLSSNCGAISSVLNDILSRLDKVEAEVQIDRLITCRLQSLQTYVTQQLIRAAEIRASANLAATKMSECVLGQSKRVDFCGKGYHLMSFPQSAPHGVVFLHVTYVPAQEKNFTTAPAICHDGKAHFPREGVFVSNGTHWFVTQRNFYEPQIITTDNTFVSGNCDVVIGIVNNTVYDPLQPELDSGGGGSDIIKLLNEQVNKEMQSSNLYMSMSSWCYTHSLDGAGLFLFDHAAEEYEHAKKLIIFLNENNVPVQLTSISAPEHKFEGLTQIFQKAYEHEQHISESINNIVDHAIKSKDHATFNFLQWYVAEQHEEEVLFKDILDKIELIGNENHGLYLADQYVKGIAKSRKS

SEQ ID NO: 9419 - protein, 1315 aa, Artificial Sequence
  SARS-CoV-2/Netherlands/ZuidHolland_2/2020__EPI_ISL_414556 spike protein (1-1147)(F970C_G999C) Ferritin construct
MFVFLVLLPLVSSQCVNLTTRTQLPPAYTNSFTRGVYYPDKVFRSSVLHSTQDLFLPFFSNVTWFHAIHVSGTNGTKRFDNPVLPFNDGVYFASTEKSNIIRGWIFGTTLDSKTQSLLIVNNATNVVIKVCEFQFCNDPFLGVYYHKNNKSWMESEFRVYSSANNCTFEYVSQPFLMDLEGKQGNFKNLREFVFKNIDGYFKIYSKHTPINLVRDLPQGFSALEPLVDLPIGINITRFQTLLALHRSYLTPGDSSSGWTAGAAAYYVGYLQPRTFLLKYNENGTITDAVDCALDPLSETKCTLKSFTVEKGIYQTSNFRVQPTESIVRFPNITNLCPFGEVFNATRFASVYAWNRKRISNCVADYSVLYNSASFSTFKCYGVSPTKLNDLCFTNVYADSFVIRGDEVRQIAPGQTGKIADYNYKLPDDFTGCVIAWNSNNLDSKVGGNYNYLYRLFRKSNLKPFERDISTEIYQAGSTPCNGVEGFNCYFPLQSYGFQPTNGVGYQPYRVVVLSFELLHAPATVCGPKKSTNLVKNKCVNFNFNGLTGTGVLTESNKKFLPFQQFGRDIADTTDAVRDPQTLEILDITPCSFGGVSVITPGTNTSNQVAVLYQGVNCTEVPVAIHADQLTPTWRVYSTGSNVFQTRAGCLIGAEHVNNSYECDIPIGAGICASYQTQTNSPRRARSVASQSIIAYTMSLGAENSVAYSNNSIAIPTNFTISVTTEILPVSMTKTSVDCTMYICGDSTECSNLLLQYGSFCTQLNRALTGIALEQDKNTQEVFAQVKQIYKTPPIKDFGGFNFSQILPDPSKPSKRSFIEDLLFNKVTLADAGFIKQYGDCLGDIAARDLICAQKFNGLTVLPPLLTDEMIAQYTSALLAGTITSGWTFGAGAALQIPFAMQMAYRFNGIGVTQNVLYENQKLIANQFNSAIGKIQDSLSSTASALGKLQDVVNQNAQALNTLVKQLSSNCGAISSVLNDILSRLDKVEAEVQIDRLITCRLQSLQTYVTQQLIRAAEIRASANLAATKMSECVLGQSKRVDFCGKGYHLMSFPQSAPHGVVFLHVTYVPAQEKNFTTAPAICHDGKAHFPREGVFVSNGTHWFVTQRNFYEPQIITTDNTFVSGNCDVVIGIVNNTVYDPLQPELDSGGGGSDIIKLLNEQVNKEMQSSNLYMSMSSWCYTHSLDGAGLFLFDHAAEEYEHAKKLIIFLNENNVPVQLTSISAPEHKFEGLTQIFQKAYEHEQHISESINNIVDHAIKSKDHATFNFLQWYVAEQHEEEVLFKDILDKIELIGNENHGLYLADQYVKGIAKSRKS

SEQ ID NO: 9420 - protein, 1315 aa, Artificial Sequence
  SARS-CoV-2/USA/WA-UW31/2020__EPI_ISL_414618 spike protein (1-1147)(F970C_G999C) Ferritin construct
MFVFLVLLPLVSSQCVNLTTRTQLPPAYTNSFTRGVYYPDKVFRSSVLHSTQDLFLPFFSNVTWFHAIHVSGTNGTKRFDNPVLPFNDGVYFASTEKSNIIRGWIFGTTLDSKTQSLLIVNNATNVVIKVCEFQFCNDPFLGVYYHKNNKSWMESEFRVYSSANNCTFEYVSQPFLMDLEGKQGNFKNLREFVFKNIDGYFKIYSKHTPINLVRDLPQGFSALEPLVDLPIGINITRFQTLLALHRSYLTPGDSSSGWTAGAAAYYVGYLQPRTFLLKYNENGTITDAVDCALDPLSETKCTLKSFTVEKGIYQTSNFRVQPTESIVRFPNITNLCPFGEVFNATRFASVYAWNRKRISNCVADYSVLYNSASFSTFKCYGVSPTKLNDLCFTNVYADSFVIRGDEVRQIAPGQTGKIADYNYKLPDDFTGCVIAWNSNNLDSKVGGNYNYLYRLFRKSNLKPFERDISTEIYQAGSTPCNGAEGFNCYFPLQSYGFQPTNGVGYQPYRVVVLSFELLHAPATVCGPKKSTNLVKNKCVNFNFNGLTGTGVLTESNKKFLPFQQFGRDIADTTDAVRDPQTLEILDITPCSFGGVSVITPGTNTSNQVAVLYQDVNCTEVPVAIHADQLTPTWRVYSTGSNVFQTRAGCLIGAEHVNNSYECDIPIGAGICASYQTQTNSPRRARSVASQSIIAYTMSLGAENSVAYSNNSIAIPTNFTISVTTEILPVSMTKTSVDCTMYICGDSTECSNLLLQYGSFCTQLNRALTGIAVEQDKNTQEVFAQVKQIYKTPPIKDFGGFNFSQILPDPSKPSKRSFIEDLLFNKVTLADAGFIKQYGDCLGDIAARDLICAQKFNGLTVLPPLLTDEMIAQYTSALLAGTITSGWTFGAGAALQIPFAMQMAYRFNGIGVTQNVLYENQKLIANQFNSAIGKIQDSLSSTASALGKLQDVVNQNAQALNTLVKQLSSNCGAISSVLNDILSRLDKVEAEVQIDRLITCRLQSLQTYVTQQLIRAAEIRASANLAATKMSECVLGQSKRVDFCGKGYHLMSFPQSAPHGVVFLHVTYVPAQEKNFTTAPAICHDGKAHFPREGVFVSNGTHWFVTQRNFYEPQIITTDNTFVSGNCDVVIGIVNNTVYDPLQPELDSGGGGSDIIKLLNEQVNKEMQSSNLYMSMSSWCYTHSLDGAGLFLFDHAAEEYEHAKKLIIFLNENNVPVQLTSISAPEHKFEGLTQIFQKAYEHEQHISESINNIVDHAIKSKDHATFNFLQWYVAEQHEEEVLFKDILDKIELIGNENHGLYLADQYVKGIAKSRKS

SEQ ID NO: 9421 - protein, 1315 aa, Artificial Sequence
  SARS-CoV-2/South Korea/SNU01/2020__EPI_ISL_411929 spike protein (1-1147)(F970C_G999C) Ferritin construct
MFVFLVLLPLVSSQCVNLTTRTQLPPAYTNSFTRGVYYPDKVFRSSVLHSTQDLFLPFFSNVTWFHAIHVSGTNGTKRFDNPVLPFNDGVYFASTEKSNIIRGWIFGTTLDSKTQSLLIVNNATNVVIKVCEFQFCNDPFLGVYYHKNNKSWMESEFRVYSSANNCTFEYVSQPFLMDLEGKQGNFKNLREFVFKNIDGYFKIYSKHTPINLVRDLPQGFWALEPLVDLPIGINITRFQTLLALHRSYLTPGDSSSGWTAGAAAYYVGYLQPRTFLLKYNENGTITDAVDCALDPLSETKCTLKSFTVEKGIYQTSNFRVQPTESIVRFPNITNLCPFGEVFNATRFASVYAWNRKRISNCVADYSVLYNSASFSTFKCYGVSPTKLNDLCFTNVYADSFVIRGDEVRQIAPGQTGKIADYNYKLPDDFTGCVIAWNSNNLDSKVGGNYNYLYRLFRKSNLKPFERDISTEIYQAGSTPCNGVEGFNCYFPLQSYGFQPTNGVGYQPYRVVVLSFELLHAPATVCGPKKSTNLVKNKCVNFNFNGLTGTGVLTESNKKFLPFQQFGRDIADTTDAVRDPQTLEILDITPCSFGGVSVITPGTNTSNQVAVLYQDVNCTEVPVAIHADQLTPTWRVYSTGSNVFQTRAGCLIGAEHVNNSYECDIPIGAGICASYQTQTNSPRRARSVASQSIIAYTMSLGAENSVAYSNNSIAIPTNFTISVTTEILPVSMTKTSVDCTMYICGDSTECSNLLLQYGSFCTQLNRALTGIAVEQDKNTQEVFAQVKQIYKTPPIKDFGGFNFSQILPDPSKPSKRSFIEDLLFNKVTLADAGFIKQYGDCLGDIAARDLICAQKFNGLTVLPPLLTDEMIAQYTSALLAGTITSGWTFGAGAALQIPFAMQMAYRFNGIGVTQNVLYENQKLIANQFNSAIGKIQDSLSSTASALGKLQDVVNQNAQALNTLVKQLSSNCGAISSVLNDILSRLDKVEAEVQIDRLITCRLQSLQTYVTQQLIRAAEIRASANLAATKMSECVLGQSKRVDFCGKGYHLMSFPQSAPHGVVFLHVTYVPAQEKNFTTAPAICHDGKAHFPREGVFVSNGTHWFVTQRNFYEPQIITTDNTFVSGNCDVVIGIVNNTVYDPLQPELDSGGGGSDIIKLLNEQVNKEMQSSNLYMSMSSWCYTHSLDGAGLFLFDHAAEEYEHAKKLIIFLNENNVPVQLTSISAPEHKFEGLTQIFQKAYEHEQHISESINNIVDHAIKSKDHATFNFLQWYVAEQHEEEVLFKDILDKIELIGNENHGLYLADQYVKGIAKSRKS

SEQ ID NO: 9422 - protein, 1315 aa, Artificial Sequence
  SARS-CoV-2/China/WF0004/2020__EPI_ISL_413694 spike protein (1-1147)(F970C_G999C) Ferritin construct
MFVFLVLLPLVSSQCVNLTTRTQLPPAYTNSFTRGVYYPDKVFRSSVLHSTQDLFLPFFSNVTWFHAIHVSGTNGTKRFDNPVLPFNDGVYFASTEKSNIIRGWIFGTTLDSKTQSLLIVNNATNVVIKVCEFQFCNDPFLGVYYHKNNKSWTESEFRVYSSANNCTFEYVSQPFLMDLEGKQGNFKNLREFVFKNIDGYFKIYSKHTPINLVRDLPQGFSALEPLVDLPIGINITRFQTLLALHRSYLTPGDSSSGWTAGAAAYYVGYLQPRTFLLKYNENGTITDAVDCALDPLSETKCTLKSFTVEKGIYQTSNFRVQPTESIVRFPNITNLCPFGEVFNATRFASVYAWNRKRISNCVADYSVLYNSASFSTFKCYGVSPTKLNDLCFTNVYADSFVIRGDEVRQIAPGQTGKIADYNYKLPDDFTGCVIAWNSNNLDSKVGGNYNYLYRLFRKSNLKPFERDISTEIYQAGSTPCNGVEGFNCYFPLQSYGFQPTNGVGYQPYRVVVLSFELLHAPATVCGPKKSTNLVKNKCVNFNFNGLTGTGVLTESNKKFLPFQQFGRDIADTTDAVRDPQTLEILDITPCSFGGVSVITPGTNTSNQVAVLYQDVNCTEVPVAIHADQLTPTWRVYSTGSNVFQTRAGCLIGAEHVNNSYECDIPIGAGICASYQTQTNSPRRARSVASQSIIAYTMSLGAENSVAYSNNSIAIPTNFTISVTTEILPVSMTKTSVDCTMYICGDSTECSNLLLQYGSFCTQLNRALTGIAVEQDKNTQEVFAQVKQIYKTPPIKDFGGFNFSQILPDPSKPSKRSFIEDLLFNKVTLADAGFIKQYGDCLGDIAARDLICAQKFNGLTVLPPLLTDEMIAQYTSALLAGTITSGWTFGAGAALQIPFAMQMAYRFNGIGVTQNVLYENQKLIANQFNSAIGKIQDSLSSTASALGKLQDVVNQNAQALNTLVKQLSSNCGAISSVLNDILSRLDKVEAEVQIDRLITCRLQSLQTYVTQQLIRAAEIRASANLAATKMSECVLGQSKRFDFCGKGYHLMSFPQSAPHGVVFLHVTYVPAQEKNFTTAPAICHDGKAHFPREGVFVSNGTHWFVTQRNFYEPQIITTDNTFVSGNCDVVIGIVNNTVYDPLQPELDSGGGGSDIIKLLNEQVNKEMQSSNLYMSMSSWCYTHSLDGAGLFLFDHAAEEYEHAKKLIIFLNENNVPVQLTSISAPEHKFEGLTQIFQKAYEHEQHISESINNIVDHAIKSKDHATFNFLQWYVAEQHEEEVLFKDILDKIELIGNENHGLYLADQYVKGIAKSRKS

SEQ ID NO: 9423 - protein, 1315 aa, Artificial Sequence
  SARS-CoV-2/China/WF0028/2020__EPI_ISL_413791 spike protein (1-1147)(F970C_G999C) Ferritin construct
MFVFLVLLPLVSSQCVNLTTRTQLPPAYTNSFTRGVYYPDKVFRSSVLHSTQDLFLPFFSNVTWFHAIHVSGTNGTKRFDNPVLPFNDGVYFASTEKSNIIRGWIFGTTLDSKTQSLLIVNNATNVVIKVCEFQFCNDPFLGVYYHKNNKSWMESEFRVYSSANNCTFEYVSQPFLMDLEGKQGNFKNLREFVFKNIDGYFKIYSKHTPINLVRDLPQGFSALEPLVDLPIGINITRFQTLLALHRSYLTPGDSSSGWTAGAAAYYVGYLQPRTFLLKYNENGTITDAVDCALDPLSETKCTLKSFTVEKGIYQTSNFRVQPTESIVRFPNITNLCPFGEVFNATRFASVYAWNRKRISNCVADYSVLYNSASFSTFKCYGVSPTKLNDLCFTNVYADSFVIRGDEVRQIAPGQTGKIADYNYKLPDDFTGCVIAWNSNNLDSKVGGNYNYLYRLFRKSNLKPFERDISTEIYQAGSTPCNGVEGFNCYFPLQSYGFQPTNGVGYQPYRVVVLSFELLHAPATVCGPKKSTNLVKNKCVNFNFNGLTGTGVLTESNKKFLPFQQFGRDIADTTDAVRDPQTLEILDITPCSFGGVSVITPGTNTSNQVAVLYQDVNCTEVPVAIHADQLTPTWRVYSTGSNVFQTRAGCLIGAEHVNNSYECDIPIGAGICASYQTQTNSPRRARSVASQSIIAYTMSLGAENSVAYSNNSIAIPTNFTISVTTEILPVSMTKTSVDCTMYICGDSTECSNLLLQYGSFCTQLNRALTGIAVEQDKNTQEVFAQVKQIYKTPPIKDFGGFNFSQILPDPSKPSKRSFIEDLLFNKVTLADAGFIKQYGDCLGDIAARDLICAQKFNGLTVLPPLLTDEMIAQYTSALLAGTITSGWTFGAGAALQIPFAMQMAYRFNGIGVTQNVLYENQKLIANQFNSAIGKIQDSLSSTASALGKLQDVVNQNAQALNTLVKQLSSNCGAISSVLNDILSRLDKVEAEVQIDRLITCRLQSLQTYVTQQLIRAAEIRASANLAATKMSECVLGQSKRVDFCGKGYHLMSFPQSAPHGVVFLHVTYVPAQEKNFTTAPAICHDGKAHFPREGVFVSNGTHWFVTQRNFYEPQIITTDNTFVSGNCDVVIGIVNNTVYDPLQPELESGGGGSDIIKLLNEQVNKEMQSSNLYMSMSSWCYTHSLDGAGLFLFDHAAEEYEHAKKLIIFLNENNVPVQLTSISAPEHKFEGLTQIFQKAYEHEQHISESINNIVDHAIKSKDHATFNFLQWYVAEQHEEEVLFKDILDKIELIGNENHGLYLADQYVKGIAKSRKS

SEQ ID NO: 9424 - protein, 1315 aa, Artificial Sequence
  SARS-CoV-2/2019-nCoV/USA-CruiseA-18/2020__MT159716.1 spike protein (1-1147)(F970C_G999C) Ferritin construct
MFVFLVLLPLVSSQCVNLTTRTQLPPAYTNSFTRGVYYPDKVFRSSVLHSTQDLFLPFFSNVTWFHAIHVSGTNGTKRFDNPVLPFNDGVYFASTEKSNIIRGWIFGTTLDSKTQSLLIVNNATNVVIKVCEFQFCNDPFLGVYYHKNNKSWMESELRVYSSANNCTFEYVSQPFLMDLEGKQGNFKNLREFVFKNIDGYFKIYSKHTPINLVRDLPQGFSALEPLVDLPIGINITRFQTLLALHRSYLTPGDSSSGWTAGAAAYYVGYLQPRTFLLKYNENGTITDAVDCALDPLSETKCTLKSFTVEKGIYQTSNFRVQPTESIVRFPNITNLCPFGEVFNATRFASVYAWNRKRISNCVADYSVLYNSASFSTFKCYGVSPTKLNDLCFTNVYADSFVIRGDEVRQIAPGQTGKIADYNYKLPDDFTGCVIAWNSNNLDSKVGGNYNYLYRLFRKSNLKPFERDISTEIYQAGSTPCNGVEGFNCYFPLQSYGFQPTNGVGYQPYRVVVLSFELLHAPATVCGPKKSTNLVKNKCVNFNFNGLTGTGVLTESNKKFLPFQQFGRDIADTTDAVRDPQTLEILDITPCSFGGVSVITPGTNTSNQVAVLYQDVNCTEVPVAIHADQLTPTWRVYSTGSNVFQTRAGCLIGAEHVNNSYECDIPIGAGICASYQTQTNSPRRARSVASQSIIAYTMSLGAENSVAYSNNSIAIPTNFTISVTTEILPVSMTKTSVDCTMYICGDSTECSNLLLQYGSFCTQLNRALTGIAVEQDKNTQEVFAQVKQIYKTPPIKDFGGFNFSQILPDPSKPSKRSFIEDLLFNKVTLADAGFIKQYGDCLGDIAARDLICAQKFNGLTVLPPLLTDEMIAQYTSALLAGTITSGWTFGAGAALQIPFAMQMAYRFNGIGVTQNVLYENQKLIANQFNSAIGKIQDSLSSTASALGKLQDVVNQNAQALNTLVKQLSSNCGAISSVLNDILSRLDKVEAEVQIDRLITCRLQSLQTYVTQQLIRAAEIRASANLAATKMSECVLGQSKRVDFCGKGYHLMSFPQSAPHGVVFLHVTYVPAQEKNFTTAPAICHDGKAHFPREGVFVSNGTHWFVTQRNFYEPQIITTDNTFVSGNCDVVIGIVNNTVYDPLQPELDSGGGGSDIIKLLNEQVNKEMQSSNLYMSMSSWCYTHSLDGAGLFLFDHAAEEYEHAKKLIIFLNENNVPVQLTSISAPEHKFEGLTQIFQKAYEHEQHISESINNIVDHAIKSKDHATFNFLQWYVAEQHEEEVLFKDILDKIELIGNENHGLYLADQYVKGIAKSRKS

SEQ ID NO: 9425 - protein, 1315 aa, Artificial Sequence
  SARS-CoV-2/SARS-CoV-2/Yunnan-01/human/2020/CHN__MT049951.1 spike protein (1-1147)(F970C_G999C) Ferritin construct
MFVFLVLLPLVSSQCVNLTTRTQLPPANTNSFTRGVYYPDKVFRSSVLHSTQDLFLPFFSNVTWFHAIHVSGTNGTKRFDNPVLPFNDGVYFASTEKSNIIRGWIFGTTLDSKTQSLLIVNNATNVVIKVCEFQFCNDPFLGVYYHKNNKSWMESEFRVYSSANNCTFEYVSQPFLMDLEGKQGNFKNLREFVFKNIDGYFKIYSKHTPINLVRDLPQGFSALEPLVDLPIGINITRFQTLLALHRSYLTPGDSSSGWTAGAAAYYVGYLQPRTFLLKYNENGTITDAVDCALDPLSETKCTLKSFTVEKGIYQTSNFRVQPTESIVRFPNITNLCPFGEVFNATRFASVYAWNRKRISNCVADYSVLYNSASFSTFKCYGVSPTKLNDLCFTNVYADSFVIRGDEVRQIAPGQTGKIADYNYKLPDDFTGCVIAWNSNNLDSKVGGNYNYLYRLFRKSNLKPFERDISTEIYQAGSTPCNGVEGFNCYFPLQSYGFQPTNGVGYQPYRVVVLSFELLHAPATVCGPKKSTNLVKNKCVNFNFNGLTGTGVLTESNKKFLPFQQFGRDIADTTDAVRDPQTLEILDITPCSFGGVSVITPGTNTSNQVAVLYQDVNCTEVPVAIHADQLTPTWRVYSTGSNVFQTRAGCLIGAEHVNNSYECDIPIGAGICASYQTQTNSPRRARSVASQSIIAYTMSLGAENSVAYSNNSIAIPTNFTISVTTEILPVSMTKTSVDCTMYICGDSTECSNLLLQYGSFCTQLNRALTGIAVEQDKNTQEVFAQVKQIYKTPPIKDFGGFNFSQILPDPSKPSKRSFIEDLLFNKVTLADAGFIKQYGDCLGDIAARDLICAQKFNGLTVLPPLLTDEMIAQYTSALLAGTITSGWTFGAGAALQIPFAMQMAYRFNGIGVTQNVLYENQKLIANQFNSAIGKIQDSLSSTASALGKLQDVVNQNAQALNTLVKQLSSNCGAISSVLNDILSRLDKVEAEVQIDRLITCRLQSLQTYVTQQLIRAAEIRASANLAATKMSECVLGQSKRVDFCGKGYHLMSFPQSAPHGVVFLHVTYVPAQEKNFTTAPAICHDGKAHFPREGVFVSNGTHWFVTQRNFYEPQIITTDNTFVSGNCDVVIGIVNNTVYDPLQPELDSGGGGSDIIKLLNEQVNKEMQSSNLYMSMSSWCYTHSLDGAGLFLFDHAAEEYEHAKKLIIFLNENNVPVQLTSISAPEHKFEGLTQIFQKAYEHEQHISESINNIVDHAIKSKDHATFNFLQWYVAEQHEEEVLFKDILDKIELIGNENHGLYLADQYVKGIAKSRKS

SEQ ID NO: 9426 - protein, 1315 aa, Artificial Sequence
  SARS-CoV-2/USA/WA-UW292/2020__EPI_ISL_418077 spike protein (1-1147)(F970C_G999C) Ferritin construct
MFVFLVLLPLVSSQCVNLTTRTQLPPAYTNSFTRGVYYPDKVFRSSVLHSTQDLFLPFFSNVTWFHAIHVSGTNGTKRFDNPVLPFNDGVYFASTEKSNIIRGWIFGTTLDSKTQSLLIVNNATNVVIKVCEFQFCNDPFLGVYYHKNNKSWMESEFRVYSSANNCTFEYVSQPFLMDLEGKQGNFKNLREFVFKNIDGYFKIYSKHTPINLVRDLPQGFSALEPLVDLPIGINITRFQTLLALHRSYLTPGDSSSGWTAGAAAYYVGYLQPRTFLLKYNENGTITDAVDCALDPLSETKCTLKSFTVEKGIYQTSNFRVQPTESIVRFPNITNLCPFGEVFNATRFASVYAWNRKRISNCVADYSVLYNSASFSTFKCYGVSPTKLNDLCFTNVYADSFVIRGDEVRQIAPGQTGKIADYNYKLPDDFTGCVIAWNSNNLDSKVGGNYNYLYRLFRKSNLKPFERDISTEIYQASSTPCNGVEGFNCYFPLQSYGFQPTNGVGYQPYRVVVLSFELLHAPATVCGPKKSTNLVKNKCVNFNFNGLTGTGVLTESNKKFLPFQQFGRDIADTTDAVRDPQTLEILDITPCSFGGVSVITPGTNTSNQVAVLYQDVNCTEVPVAIHADQLTPTWRVYSTGSNVFQTRAGCLIGAEHVNNSYECDIPIGAGICASYQTQTNSPRRARSVASQSIIAYTMSLGAENSVAYSNNSIAIPTNFTISVTTEILPVSMTKTSVDCTMYICGDSTECSNLLLQYGSFCTQLNRALTGIAVEQDKNTQEVFAQVKQIYKTPPIKDFGGFNFSQILPDPSKPSKRSFIEDLLFNKVTLADAGFIKQYGDCLGDIAARDLICAQKFNGLTVLPPLLTDEMIAQYTSALLAGTITSGWTFGAGAALQIPFAMQMAYRFNGIGVTQNVLYENQKLIANQFNSAIGKIQDSLSSTASALGKLQDVVNQNAQALNTLVKQLSSNCGAISSVLNDILSRLDKVEAEVQIDRLITCRLQSLQTYVTQQLIRAAEIRASANLAATKMSECVLGQSKRVDFCGKGYHLMSFPQSAPHGVVFLHVTYVPAQEKNFTTAPAICHDGKAHFPREGVFVSNGTHWFVTQRNFYEPQIITTDNTFVSGNCDVVIGIVNNTVYDPLQPELDSGGGGSDIIKLLNEQVNKEMQSSNLYMSMSSWCYTHSLDGAGLFLFDHAAEEYEHAKKLIIFLNENNVPVQLTSISAPEHKFEGLTQIFQKAYEHEQHISESINNIVDHAIKSKDHATFNFLQWYVAEQHEEEVLFKDILDKIELIGNENHGLYLADQYVKGIAKSRKS

SEQ ID NO: 9427 - protein, 1315 aa, Artificial Sequence
  SARS-CoV-2/Iceland/192/2020__EPI_ISL_417819 spike protein (1-1147)(F970C_G999C) Ferritin construct
MFVFFVLLPLVSSQCVNLTTRTQLPPAYTNSFTRGVYYPDKVFRSSVLHSTQDLFLPFFSNVTWFHAIHVSGTNGTKRFDNPVLPFNDGVYFASTEKSNIIRGWIFGTTLDSKTQSLLIVNNATNVVIKVCEFQFCNDPFLGVYYHKNNKSWMESEFRVYSSANNCTFEYVSQPFLMDLEGKQGNFKNLREFVFKNIDGYFKIYSKHTPINLVRDLPQGFSALEPLVDLPIGINITRFQTLLALHRSYLTPGDSSSGWTAGAAAYYVGYLQPRTFLLKYNENGTITDAVDCALDPLSETKCTLKSFTVEKGIYQTSNFRVQPTESIVRFPNITNLCPFGEVFNATRFASVYAWNRKRISNCVADYSVLYNSASFSTFKCYGVSPTKLNDLCFTNVYADSFVIRGDEVRQIAPGQTGKIADYNYKLPDDFTGCVIAWNSNNLDSKVGGNYNYLYRLFRKSNLKPFERDISTEIYQAGSTPCNGVEGFNCYFPLQSYGFQPTNGVGYQPYRVVVLSFELLHAPATVCGPKKSTNLVKNKCVNFNFNGLTGTGVLTESNKKFLPFQQFGRDIADTTDAVRDPQTLEILDITPCSFGGVSVITPGTNTSNQVAVLYQGVNCTEVPVAIHADQLTPTWRVYSTGSNVFQTRAGCLIGAEHVNNSYECDIPIGAGICASYQTQTNSPRRARSVASQSIIAYTMSLGAENSVAYSNNSIAIPTNFTISVTTEILPVSMTKTSVDCTMYICGDSTECSNLLLQYGSFCTQLNRALTGIAVEQDKNTQEVFAQVKQIYKTPPIKDFGGFNFSQILPDPSKPSKRSFIEDLLFNKVTLADAGFIKQYGDCLGDIAARDLICAQKFNGLTVLPPLLTDEMIAQYTSALLAGTITSGWTFGAGAALQIPFAMQMAYRFNGIGVTQNVLYENQKLIANQFNSAIGKIQDSLSSTASALGKLQDVVNQNAQALNTLVKQLSSNCGAISSVLNDILSRLDKVEAEVQIDRLITCRLQSLQTYVTQQLIRAAEIRASANLAATKMSECVLGQSKRVDFCGKGYHLMSFPQSAPHGVVFLHVTYVPAQEKNFTTAPAICHDGKAHFPREGVFVSNGTHWFVTQRNFYEPQIITTDNTFVSGNCDVVIGIVNNTVYDPLQPELDSGGGGSDIIKLLNEQVNKEMQSSNLYMSMSSWCYTHSLDGAGLFLFDHAAEEYEHAKKLIIFLNENNVPVQLTSISAPEHKFEGLTQIFQKAYEHEQHISESINNIVDHAIKSKDHATFNFLQWYVAEQHEEEVLFKDILDKIELIGNENHGLYLADQYVKGIAKSRKS

SEQ ID NO: 9428 - protein, 1315 aa, Artificial Sequence
  SARS-CoV-2/Belgium/ULG-6939/2020__EPI_ISL_417020 spike protein (1-1147)(F970C_G999C) Ferritin construct
MFVFLVLLPLVSSQCVNLTTRTQLPPAYTNSFTRGVYYPDKVFRSSVLHSTQDLFLPFFSNVTWFHAIHVSGTNGTKRFDNPVLPFNDGVYFASTEKSNIIRGWIFGTTLDSKTQSLLIVNNATNVVIKVCEFQFCNDPFLGVYYHKNNKSWMESEFRVYSSANNCTFEYVSQPFLMDLEGKQGNFKNLREFVFKNIDGYFKIYSKHTPINLVRDLPQGFSALEPLVDLPIGINITRFQTLLALHRSYLTPGDSSSGWTAGAAAYYVGYLQPRTFLLKYNENGTITDAVDCALDPLSETKCTLKSFTVEKGIYQTSNFRVQPTESIVRFPNITNLCPFGEVFNATRFASVYAWNRKRISNCVADYSVLYNSASFSTFKCYGVSPTKLNDLCFTNVYADSFVIRGDEVRQIAPGQTGKIADYNYKLPDDFTGCVIAWNSNNLDSKVGGNYNYLYRLFRKSNLKPFERDISTEIYQAGSTPCNGVEGFNCYFPLQSYGFQPTNGVGYQPYRVVVLSFELLHAPATVCGPKKSTNLVKNKCVNFNFNGLTGTGVLTESNKKFLPFQQFGRDIADTTDAVRDPQTLEILDITPCSFGGVSVITPGTNTSNQVAVLYQGVNCTEVPVAIHADQLTPTWRVYSTGSNVFQTRAGCLIGAEHVNNSYECDIPIGAGICASYQTQTNSPRRARSVASQSIIAYTMSLGAENSVVYSNNSIAIPTNFTISVTTEILPVSMTKTSVDCTMYICGDSTECSNLLLQYGSFCTQLNRALTGIAVEQDKNTQEVFAQVKQIYKTPPIKDFGGFNFSQILPDPSKPSKRSFIEDLLFNKVTLADAGFIKQYGDCLGDIAARDLICAQKFNGLTVLPPLLTDEMIAQYTSALLAGTITSGWTFGAGAALQIPFAMQMAYRFNGIGVTQNVLYENQKLIANQFNSAIGKIQDSLSSTASALGKLQDVVNQNAQALNTLVKQLSSNCGAISSVLNDILSRLDKVEAEVQIDRLITCRLQSLQTYVTQQLIRAAEIRASANLAATKMSECVLGQSKRVDFCGKGYHLMSFPQSAPHGVVFLHVTYVPAQEKNFTTAPAICHDGKAHFPREGVFVSNGTHWFVTQRNFYEPQIITTDNTFVSGNCDVVIGIVNNTVYDPLQPELDSGGGGSDIIKLLNEQVNKEMQSSNLYMSMSSWCYTHSLDGAGLFLFDHAAEEYEHAKKLIIFLNENNVPVQLTSISAPEHKFEGLTQIFQKAYEHEQHISESINNIVDHAIKSKDHATFNFLQWYVAEQHEEEVLFKDILDKIELIGNENHGLYLADQYVKGIAKSRKS

SEQ ID NO: 9429 - protein, 1315 aa, Artificial Sequence
  SARS-CoV-2/France/HF2496/2020__EPI_ISL_418231 spike protein (1-1147)(F970C_G999C) Ferritin construct
MFVFLVLLPLVSSQCVNLTTRTQLPPAYTNSFTRGVYYPDKVFRSSVLHSTQDLFLPFFSNVTWFHAIHVSGTNGTKRFDNPVLPFNDGVYFASTEKSNIIRGWIFGTTLDSKTQSLLIVNNATNVVIKVCEFQFCNDPFLGVYYHKNNKSWMESEFRVYSSANNCTFEYVSQPFLMDLEGKQGNFKNLREFVFKNIDGYFKIYSKHTPINLVRDLPQGFSALEPLVDLPIGINITRFQTLLALHRSYLTPGDSSSGWTAGAAAYYVGYLQPRTFLLKYNENGTITDAVDCALDPLSETKCTLKSFTVEKGIYQTSNFRVQPTESIVRFPNITNLCPFGEVFNATRFASVYAWNRKRISNCVADYSVLYNSASFSTFKCYGVSPTKLNDLCFTNVYADSFVIRGDEVRQIAPGQTGKIADYNYKLPDDFTGCVIAWNSNNLDSKVGGNYNYLYRLFRKSNLKPFERDISTEIYQAGSTPCNGVEGFNCYFPLQSYGFQPTNGVGYQPYRVVVLSFELLHAPATVCGPKKSTNLVKNKCVNFNFNGLTGTGVLTESNKKFLPFQQFGRDIADTTDAVRDPQTLEILDITPCSFGGVSVITPGTNTSNQVAVLYQGVNCTEVPVAIHADQLTPTWRVYSTGSNVFQTRAGCLIGAEHVNNSYECDIPIGAGICASYQTQTNSPRRARSVASQSIIAYTMSLGAENSVAYSNNSIAIPTNFTISVTTEILPVSMTKTSVDCTMYICGDSTECSNLLLQYGSFCTQLNRALTGIAVEQDKNTQEVFAQVKQIYKTPPIKDFGGFNFSQILPDPSKPSKRSFIEDLLFNKVTLADAGFIKQYGDCLGDIVARDLICAQKFNGLTVLPPLLTDEMIAQYTSALLAGTITSGWTFGAGAALQIPFAMQMAYRFNGIGVTQNVLYENQKLIANQFNSAIGKIQDSLSSTASALGKLQDVVNQNAQALNTLVKQLSSNCGAISSVLNDILSRLDKVEAEVQIDRLITCRLQSLQTYVTQQLIRAAEIRASANLAATKMSECVLGQSKRVDFCGKGYHLMSFPQSAPHGVVFLHVTYVPAQEKNFTTAPAICHDGKAHFPREGVFVSNGTHWFVTQRNFYEPQIITTDNTFVSGNCDVVIGIVNNTVYDPLQPELDSGGGGSDIIKLLNEQVNKEMQSSNLYMSMSSWCYTHSLDGAGLFLFDHAAEEYEHAKKLIIFLNENNVPVQLTSISAPEHKFEGLTQIFQKAYEHEQHISESINNIVDHAIKSKDHATFNFLQWYVAEQHEEEVLFKDILDKIELIGNENHGLYLADQYVKGIAKSRKS

SEQ ID NO: 9430 - protein, 1315 aa, Artificial Sequence
  SARS-CoV-2/USA/WA-UW291/2020__EPI_ISL_418076 spike protein (1-1147)(F970C_G999C) Ferritin construct
MFVFLVLLPLVSSQCVNLTTRTQLPPAYTNSFTRGVYYPDKVFRSSVLHSTQDLFLPFFSNVTWFHAIHVSGTNGTKRFDNPVLPFNDGVYFASTEKSNIIRGWIFGTTLDSKTQSLLIVNNATNVVIKVCEFQFCNDPFLGVYYHKNNKSWMESEFRVYSSANNCTFEYVSQPFLMDLEGKQGNFKNLREFVFKNIDGYFKIYSKHTPINLVRDLPQGFSALEPLVDLPIGINITRFQTLLALHRSYLTPGDSSSGWTAGAAAYYVGYLQPRTFLLKYNENGTITDAVDCALDPLSETKCTLKSFTVEKGIYQTSNFRVQPTESIVRFPNITNLCPFGEVFNATRFASVYAWNRKRISNCVADYSVLYNSASFSTFKCYGVSPTKLNDLCFTNVYADSFVIRGDEVRQIAPGQTGKIADYNYKLPDDFTGCVIAWNSNNLDSKVGGNYNYLYRLFRKSNLKPFERDISTEIYQAGSTPCNGVEGFNCYFPLQSYGFQPTNGVGYQPYRVVVLSFELLHAPATVCGPKKSTNLVKNKCVNFNFNGLTGTGVLTESNKKFLPFQQFGRDIADTTDAVRDPQTLEILDITPCSFGGVSVITPGTNTSNQVAVLYQGVNCTEVPVAIHADQLTPTWRVYSTGSNVFQTRAGCLIGAEHVNNSYECDIPIGAGICASYQTQTNSPRRARSVASQSIIAYTMSLGAENSVAYSNNSIAIPTNFTISVTTEILPVSMTKTSVDCTMYICGDSTECSNLLLQYGSFCTQLNRALTGIAVEQDKNTQEVFAQVKQIYKTPPIKDFGGFNFSQILPDPSKPSKRSFIEDLLFNKVTLADAGFIKQYGDCLGDIAARDLICAQKFNGLTVLPPLLTDEMIAQYTSALLAGTITSGWTFGAGAALQIPFAMQMAYRFNGIGVTQNVLYENQKLIANQFNSAIGKIQYSLSSTASALGKLQDVVNQNAQALNTLVKQLSSNCGAISSVLNDILSRLDKVEAEVQIDRLITCRLQSLQTYVTQQLIRAAEIRASANLAATKMSECVLGQSKRVDFCGKGYHLMSFPQSAPHGVVFLHVTYVPAQEKNFTTAPAICHDGKAHFPREGVFVSNGTHWFVTQRNFYEPQIITTDNTFVSGNCDVVIGIVNNTVYDPLQPELDSGGGGSDIIKLLNEQVNKEMQSSNLYMSMSSWCYTHSLDGAGLFLFDHAAEEYEHAKKLIIFLNENNVPVQLTSISAPEHKFEGLTQIFQKAYEHEQHISESINNIVDHAIKSKDHATFNFLQWYVAEQHEEEVLFKDILDKIELIGNENHGLYLADQYVKGIAKSRKS

SEQ ID NO: 9431 - protein, 1315 aa, Artificial Sequence; identical to SEQ ID NO: 9394
  SARS-CoV-2/Portugal/PT0034/2020__EPI_ISL_418019 spike protein (1-1147)(F970C_G999C) Ferritin construct

SEQ ID NO: 9432 - protein, 1315 aa, Artificial Sequence; identical to SEQ ID NO: 9386
  SARS-CoV-2/Iceland/202/2020__EPI_ISL_417750 spike protein (1-1147)(F970C_G999C) Ferritin construct

SEQ ID NO: 9433 - protein, 1315 aa, Artificial Sequence
  SARS-CoV-2/USA/WA-UW261/2020__EPI_ISL_418046 spike protein (1-1147)(F970C_G999C) Ferritin construct
MFVFLVLLPLVSSQCVNLTTRTQLPPAYTNSFTRGVYYPDKVFRSSVLHSTQDLFLPFFSNVTWFHAIHVSGTNGTKRFDNPVLPFNDGVYFASTEKSNIIRGWIFGTTLDSKTQSLLIVNNATNVVIKVCEFQFCNDPFLGVYYHKNNKSWMESEFRVYSSANNCTFEYVSQPFLMDLEGKQGNFKNLREFVFKNIDGYFKIYSKHTPINLVRDLPQGFSALEPLVDLPIGINITRFQTLLALHRSYLTPGDSSSGWTAGAAAYYVGYLQPRTFLLKYNENGTITDAVDCALDPLSETKCTLKSFTVEKGIYQTSNFRVQPTESIVRFPNITNLCPFGEVFNATRFTSVYAWNRKRISNCVADYSVLYNSASFSTFKCYGVSPTKLNDLCFTNVYADSFVIRGDEVRQIAPGQTGKIADYNYKLPDDFTGCVIAWNSNNLDSKVGGNYNYLYRLFRKSNLKPFERDISTEIYQAGSTPCNGVEGFNCYFPLQSYGFQPTNGVGYQPYRVVVLSFELLHAPATVCGPKKSTNLVKNKCVNFNFNGLTGTGVLTESNKKFLPFQQFGRDIADTTDAVRDPQTLEILDITPCSFGGVSVITPGTNTSNQVAVLYQDVNCTEVPVAIHADQLTPTWRVYSTGSNVFQTRAGCLIGAEHVNNSYECDIPIGAGICASYQTQTNSPRRARSVASQSIIAYTMSLGAENSVAYSNNSIAIPTNFTISVTTEILPVSMTKTSVDCTMYICGDSTECSNLLLQYGSFCTQLNRALTGIAVEQDKNTQEVFAQVKQIYKTPPIKDFGGFNFSQILPDPSKPSKRSFIEDLLFNKVTLADAGFIKQYGDCLGDIAARDLICAQKFNGLTVLPPLLTDEMIAQYTSALLAGTITSGWTFGAGAALQIPFAMQMAYRFNGIGVTQNVLYENQKLIANQFNSAIGKIQDSLSSTASALGKLQDVVNQNAQALNTLVKQLSSNCGAISSVLNDILSRLDKVEAEVQIDRLITCRLQSLQTYVTQQLIRAAEIRASANLAATKMSECVLGQSKRVDFCGKGYHLMSFPQSAPHGVVFLHVTYVPAQEKNFTTAPAICHDGKAHFPREGVFVSNGTHWFVTQRNFYEPQIITTDNTFVSGNCDVVIGIVNNTVYDPLQPELDSGGGGSDIIKLLNEQVNKEMQSSNLYMSMSSWCYTHSLDGAGLFLFDHAAEEYEHAKKLIIFLNENNVPVQLTSISAPEHKFEGLTQIFQKAYEHEQHISESINNIVDHAIKSKDHATFNFLQWYVAEQHEEEVLFKDILDKIELIGNENHGLYLADQYVKGIAKSRKS

SEQ ID NO: 9434 - protein, 1315 aa, Artificial Sequence
  SARS-CoV-2/Portugal/PT0035/2020__EPI_ISL_418020 spike protein (1-1147)(F970C_G999C) Ferritin construct
MFVFLVLLPLVSSQCVNLTTRTQLPPAYTNSFTRGVYYPDKVFRSSVLHSTQDLFLPFFSNVTWFHAIHVSGTNGTKRFDNPVLPFNDGVYFASTEKSNIIRGWIFGTTLDSKTQSLLIVNNATNVVIKVCEFQFCNDPFLGVYYHKNNKSWMESEFRVYSSANNCTFEYVSQPFLMDLEGKQGNFKNLREFVFKNIDGYFKIYSKHTPINLVRDLPQGFSALEPLVDLPIGINITRFQTLLALHRSYLTPGDSSSGWTAGAAAYYVGYLQPRTFLLKYNENGTITDAVDCALDPLSETKCTLKSFTVEKGIYQTSNFRVQPTESIVRFPNITNLCPFGEVFNATRFASVYAWNRKRISNCVADYSVLYNSASFSTFKCYGVSPTKLNDLCFTNVYADSFVIRGDEVRQIAPGQTGKIADYNYKLPDDFTGCVIAWNSNNLDSKVGGNYNYLYRLFRKSNLKPFERDISTEIYQAGSTPCNGVEGFNCYFPLQSYGFQPTNGVGYQPYRVVVLSFELLHAPATVCGPKKSTNLVKNKCVNFNFNGLTGTGVLTESNKKFLPFQQFGRDIADTTDAVRDPQTLEILDITPCSFGGVSVITPGTNTSNQVAVLYQDVNCTEVPVAIHADQLTPTWRVYSTGSNVFQTRAGCLIGAEHVNNSYECDIPIGAGICASYQTQTNSPRRARSVASQSIIAYTMSLGAENSVAYSNNSIAIPTNFTISVTTEILPVSMTKTSVDCTMYICGDSTECSNLLLQYGSFCTQLNRALTGIAVEQDKNTQEVFAQVKQIYKTPPIKDFGGFNFSQILPDPSKPSKRSFIEDLLFNKVTLADAGFIKQYGDCLGDISARDLICAQKFNGLTVLPPLLTDEMIAQYTSALLAGTITSGWTFGAGAALQIPFAMQMAYRFNGIGVTQNVLYENQKLIANQFNSAIGKIQDSLSSTASALGKLQDVVNQNAQALNTLVKQLSSNCGAISSVLNDILSRLDKVEAEVQIDRLITCRLQSLQTYVTQQLIRAAEIRASANLAATKMSECVLGQSKRVDFCGKGYHLMSFPQSAPHGVVFLHVTYVPAQEKNFTTAPAICHDGKAHFPREGVFVSNGTHWFVTQRNFYEPQIITTDNTFVSGNCDVVIGIVNNTVYDPLQPELDSGGGGSDIIKLLNEQVNKEMQSSNLYMSMSSWCYTHSLDGAGLFLFDHAAEEYEHAKKLIIFLNENNVPVQLTSISAPEHKFEGLTQIFQKAYEHEQHISESINNIVDHAIKSKDHATFNFLQWYVAEQHEEEVLFKDILDKIELIGNENHGLYLADQYVKGIAKSRKS

SEQ ID NO: 9435 - protein, 1315 aa, Artificial Sequence
  SARS-CoV-2/USA/NY-NYUMC7/2020__EPI_ISL_418192 spike protein (1-1147)(F970C_G999C) Ferritin construct
MFVFLVLLPLVSSQCVNLTTRTQLPPAYTNSFTRGVYYPDKVFRSSVLHSTQDLFLPFFSNVTWFHAIHVSGTNGTKRFDNPVLPFNDGVYFASTEKSNIIRGWIFGTTLDSKTQSLLIVNNATNVVIKVCEFQFCNDPFLGVYHHKNNKSWMESEFRVYSSANNCTFEYVSQPFLMDLEGKQGNFKNLREFVFKNIDGYFKIYSKHTPINLVRDLPQGFSALEPLVDLPIGINITRFQTLLALHRSYLTPGDSSSGWTAGAAAYYVGYLQPRTFLLKYNENGTITDAVDCALDPLSETKCTLKSFTVEKGIYQTSNFRVQPTESIVRFPNITNLCPFGEVFNATRFASVYAWNRKRISNCVADYSVLYNSASFSTFKCYGVSPTKLNDLCFTNVYADSFVIRGDEVRQIAPGQTGKIADYNYKLPDDFTGCVIAWNSNNLDSKVGGNYNYLYRLFRKSNLKPFERDISTEIYQAGSTPCNGVEGFNCYFPLQSYGFQPTNGVGYQPYRVVVLSFELLHAPATVCGPKKSTNLVKNKCVNFNFNGLTGTGVLTESNKKFLPFQQFGRDIADTTDAVRDPQTLEILDITPCSFGGVSVITPGTNTSNQVAVLYQGVNCTEVPVAIHADQLTPTWRVYSTGSNVFQTRAGCLIGAEHVNNSYECDIPIGAGICASYQTQTNSPRRARSVASQSIIAYTMSLGAENSVAYSNNSIAIPTNFTISVTTEILPVSMTKTSVDCTMYICGDSTECSNLLLQYGSFCTQLNRALTGIAVEQDKNTQEVFAQVKQIYKTPPIKDFGGFNFSQILPDPSKPSKRSFIEDLLFNKVTLADAGFIKQYGDCLGDIAARDLICAQKFNGLTVLPPLLTDEMIAQYTSALLAGTITSGWTFGAGAALQIPFAMQMAYRFNGIGVTQNVLYENQKLIANQFNSAIGKIQDSLSSTASALGKLQDVVNQNAQALNTLVKQLSSNCGAISSVLNDILSRLDKVEAEVQIDRLITCRLQSLQTYVTQQLIRAAEIRASANLAATKMSECVLGQSKRVDFCGKGYHLMSFPQSAPHGVVFLHVTYVPAQEKNFTTAPAICHDGKAHFPREGVFVSNGTHWFVTQRNFYEPQIITTDNTFVSGNCDVVIGIVNNTVYDPLQPELDSGGGGSDIIKLLNEQVNKEMQSSNLYMSMSSWCYTHSLDGAGLFLFDHAAEEYEHAKKLIIFLNENNVPVQLTSISAPEHKFEGLTQIFQKAYEHEQHISESINNIVDHAIKSKDHATFNFLQWYVAEQHEEEVLFKDILDKIELIGNENHGLYLADQYVKGIAKSRKS

SEQ ID NO: 9436 - protein, 1315 aa, Artificial Sequence
  SARS-CoV-2/Iceland/189/2020__EPI_ISL_417709 spike protein (1-1147)(F970C_G999C) Ferritin construct
MFVFLVLLPLVSSQCVNLTTRTQLPPAYTNSFTRGVYYPDKVFRSSVLHSTQDLFLPFFSNVTWFHAIHVSGTNGTKRFDNPVLPFNDGVYFASTEKSNIIRGWIFGTTLDSKTQSLLIVNNATNVVIKVCEFQFCNDPFLGVYYHKNNKSWMESEFRVYSSANNCTFEYVSQPFLMDLEGKQGNFKNLREFVFKNIDGYFKIYSKHTPINLVRDLPQGFSALEPLVDLPIGINITRFQTLLALHRSYLTPGDSSSGWTAGAAAYYVGYLQPRTFLLKYNENGTITDAVDCALDPLSETKCTLKSFTVEKGIYQTSNFRVQPTESIVRFPNITNLCPFGEVFNATRFASVYAWNRKRISNCVADYSVLYNSASFSTFKCYGVSPTKLNDLCFTNVYADSFVIRGDEVRQIAPGQTGKIADYNYKLPDDFTGCVIAWNSNNLDSKVGGNYNYLYRLFRKSNLKPFERDISTEIYQAGSTPCNGVEGFNCYFPLQSYGFQPTNGVGYQPYRVVVLSFELLHAPATVCGPKKSTNLVKNKCVNFNFNGLTGTGVLTESNKKFLPFQQFGRDIADTTDAVRDPQTLEILDITPCSFGGVSVITPGTNTSNQVAVLYQGVNCTEVPVAIHADQLTPTWRVYSTGSNVFQTRAGCLIGAEHVNNSYECDIPIGAGICASYQTQTNSPRRARSVASQSIIAYTMSLGAENSVAYSNNSIAIPTNFTISVTTEILPVSMTKTSVDCTMYICGDSTECSNLLLQYGSFCTQLNRALTGIAVEQDKNTQEVFAQVKQIYKTPPIKDFGGFNFSQILPDPSKPSKRSFIEDLLFNKVTLADAGFTKQYGDCLGDIAARDLICAQKFNGLTVLPPLLTDEMIAQYTSALLAGTITSGWTFGAGAALQIPFAMQMAYRFNGIGVTQNVLYENQKLIANQFNSAIGKIQDSLSSTASALGKLQDVVNQNAQALNTLVKQLSSNCGAISSVLNDILSRLDKVEAEVQIDRLITCRLQSLQTYVTQQLIRAAEIRASANLAATKMSECVLGQSKRVDFCGKGYHLMSFPQSAPHGVVFLHVTYVPAQEKNFTTAPAICHDGKAHFPREGVFVSNGTHWFVTQRNFYEPQIITTDNTFVSGNCDVVIGIVNNTVYDPLQPELDSGGGGSDIIKLLNEQVNKEMQSSNLYMSMSSWCYTHSLDGAGLFLFDHAAEEYEHAKKLIIFLNENNVPVQLTSISAPEHKFEGLTQIFQKAYEHEQHISESINNIVDHAIKSKDHATFNFLQWYVAEQHEEEVLFKDILDKIELIGNENHGLYLADQYVKGIAKSRKS

SEQ ID NO: 9437 - protein, 1315 aa, Artificial Sequence
  SARS-CoV-2/Australia/NSW56/2020__EPI_ISL_417408 spike protein (1-1147)(F970C_G999C) Ferritin construct
MFVFLVLLPLVSSQCVNLTTRTQLPPAYTNSFTRGVYYPDKVFRSSVLHSTQDLFLPFFSNVTWFHAIHVSGTNGTKRFDNPVLPFNDGVYFASTEKSNIIRGWIFGTTLDSKTQSLLIVNNATNVVIKVCEFQFCNDPFLGVYYHKNNKSWMESEFRVYSSANNCTFEYVSQPFLMDLEGKQGNFKNLREFVFKNIDGYFKIYSKHTPINLVRDLPQGFSALEPLVDLPIGINITRFQTLLALHRSYLTPGDSSSGWTAGAAAYYVGYLQPRTFLLKYNENGTITDAVDCALDPLSETKCTLKSFTVEKGIYQTSNFRVQPTESIVRFPNITNLCPFGEVFNATRFASVYAWNRKRISNCVADYSVLYNSASFSTFKCYGVSPTKLNDLCFTNVYADSFVIRGDEVRQIAPGQTGKIADYNYKLPDDFTGCVIAWNSNNLDSKVGGNYNYLYRLFRKSNLKPFERDISTEIYQAGSTPCNGVEGFNCYFPLQSYGFQPTNGVGYQPYRVVVLSFELLHAPATVCGPKKSTNLVKNKCVNFNFNGLTGTGVLTESNKKFLPFQQFGRDIADTTDAVRDPQTLEILDITPCSFGGVSVITPGTNTSNQVAVLYQDVNCTEVPVAIHADQLTPTWRVYSTGSNVFQTRAGCLIGAEHVNNSYECDIPIGAGICASYQTQTNSPRRARSVASQSIIAYTMSLGAENSVAYSNNSIAIPTNFTISVTTEILPVSMTKTSVDCTMYICGDSTECSNLLLQYGSFCTQLNRALTGIAVEQDKNTQEVFAQVKQIYKTPPIKDFGGFNFSQILPDSSKPSKRSFIEDLLFNKVTLADAGFIKQYGDCLGDIAARDLICAQKFNGLTVLPPLLTDEMIAQYTSALLAGTITSGWTFGAGAALQIPFAMQMAYRFNGIGVTQNVLYENQKLIANQFNSAIGKIQDSLSSTASALGKLQDVVNQNAQALNTLVKQLSSNCGAISSVLNDILSRLDKVEAEVQIDRLITCRLQSLQTYVTQQLIRAAEIRASANLAATKMSECVLGQSKRVDFCGKGYHLMSFPQSAPHGVVFLHVTYVPAQEKNFTTAPAICHDGKAHFPREGVFVSNGTHWFVTQRNFYEPQIITTDNTFVSGNCDVVIGIVNNTVYDPLQPELDSGGGGSDIIKLLNEQVNKEMQSSNLYMSMSSWCYTHSLDGAGLFLFDHAAEEYEHAKKLIIFLNENNVPVQLTSISAPEHKFEGLTQIFQKAYEHEQHISESINNIVDHAIKSKDHATFNFLQWYVAEQHEEEVLFKDILDKIELIGNENHGLYLADQYVKGIAKSRKS

SEQ ID NO: 9438 - protein, 1315 aa, Artificial Sequence
  SARS-CoV-2/Iceland/280/2020__EPI_ISL_417608 spike protein (1-1147)(F970C_G999C) Ferritin construct
MFVFLVLLPLVSSQCVNLTTRTQLPPAYTNSFTRGVYYPDKVFRSSVLHSTQDLFLPFFSNVTWFHAIHVSGTNGTKRFDNPVLPFNDGVYFASTEKSNIIRGWIFGTTLDSKTQSLLIVNNATNVVIKVCEFQFCNDPFLGVYYHKNNKSWMESEFRVYSSANNCTFEYVSQPFLMDLEGKQGNFKNLREFVFKNIDGYFKIYSKHTPINLVRDLPQGFSALEPLVDLPIGINITRFQTLLALHRSYLTPGDSSSGWTAGAAAYYVGYLQPRTFLLKYNENGTITDAVDCALDPLSETKCTLKSFTVEKGIYQTSNFRVQPTESIVRFPNITNLCPFGEVFNATRFASVYAWNRKRISNCVADYSVLYNSASFSTFKCYGVSPTKLNDLCFTNVYADSFVIRGDEVRQIAPGQTGKIADYNYKLPDDFTGCVIAWNSNNLDSKVGGNYNYLYRLFRKSNLKPFERDISTEIYQAGSTPCNGVEGFNCYFPLQSYGFQPTNGVGYQPYRVVVLSFELLHAPATVCGPKKSTNLVKNKCVNFNFNGLTGTGVLTESNKKFLPFQQFGRDIADTTDAVRDPQTLEILDITPCSFGGVSVITPGTNTSNQVAVLYQGVNCTEVPVAIHADQLTPTWRVYSTGSNVFQTRAGCLIGAEHVNNSYECDIPIGAGICASYHTQTNSPRRARSVASQSIIAYTMSLGAENSVAYSNNSIAIPTNFTISVTTEILPVSMTKTSVDCTMYICGDSTECSNLLLQYGSFCTQLNRALTGIAVEQDKNTQEVFAQVKQIYKTPPIKDFGGFNFSQILPDPSKPSKRSFIEDLLFNKVTLADAGFIKQYGDCLGDIAARDLICAQKFNGLTVLPPLLTDEMIAQYTSALLAGTITSGWTFGAGAALQIPFAMQMAYRFNGIGVTQNVLYENQKLIANQFNSAIGKIQDSLSSTASALGKLQDVVNQNAQALNTLVKQLSSNCGAISSVLNDILSRLDKVEAEVQIDRLITCRLQSLQTYVTQQLIRAAEIRASANLAATKMSECVLGQSKRVDFCGKGYHLMSFPQSAPHGVVFLHVTYVPAQEKNFTTAPAICHDGKAHFPREGVFVSNGTHWFVTQRNFYEPQIITTDNTFVSGNCDVVIGIVNNTVYDPLQPELDSGGGGSDIIKLLNEQVNKEMQSSNLYMSMSSWCYTHSLDGAGLFLFDHAAEEYEHAKKLIIFLNENNVPVQLTSISAPEHKFEGLTQIFQKAYEHEQHISESINNIVDHAIKSKDHATFNFLQWYVAEQHEEEVLFKDILDKIELIGNENHGLYLADQYVKGIAKSRKS

SEQ ID NO: 9439 - protein, 1315 aa, Artificial Sequence; identical to SEQ ID NO: 9394
  SARS-CoV-2/Iceland/247/2020__EPI_ISL_417575 spike protein (1-1147)(F970C_G999C) Ferritin construct

SEQ ID NO: 9440 - protein, 1315 aa, Artificial Sequence
  SARS-CoV-2/Iceland/238/2020__EPI_ISL_417566 spike protein (1-1147)(F970C_G999C) Ferritin construct
MFVFLVLLPLVSSQCVNLTTRTQLPPAYTNSFTRGVYYPDKVFRSSVLHSTQDLFLPFFSNVTWFHAIHVSGTNGTKRFDNPVLPFNDGVYFASTEKSNIIRGWIFGTTLDSKTQSLLIVNNATNVVIKVCEFQFCNDPFLGVYYHKNNKSWMESEFRVYSSANNCTFEYVSQPFLMDLEGKQGNFKNLREFVFKNIDGYFKIYSKHTPINLVRDLPQGFSALEPLVDLPIGINITRFQTLLALHRSYLTPGDSSSGWTAGAAAYYVGYLQPRTFLLKYNENGTITDAVDCALDPLSETKCTLKSFTVEKGIYQTSNFRVQPTESIVRFPNITNLCPFGEVFNATRFASVYAWNRKRISNCVADYSVLYNSASFSTFKCYGVSPTKLNDLCFTNVYADSFVIRGDEVRQIAPGQTGKIADYNYKLPDDFTGCVIAWNSNNLDSKVGGNYNYLYRLFRKSNLKPFERDISTEIYQAGSTPCNGVEGFNCYFPLQSYGFQPTNGVGYQPYRVVVLSFELLHAPATVCGPKKSTNLVKNKCVNFNFNGLTGTGVLTESNKKFLPFQQFGRDIADTTDAVRDPQTLEILDITPCSFGGVSVITPGTNTSNQVAVLYQGVNCTEVPVAIHADQLTPTWRVYSTGSNVFQTRAGCLIGAEHVNNSYECDIPIGAGICASYQTQTNSPRRARSVASQSIIAYTMSLGAENSVAYSNNSIAIPTNFTISVTTEILPVSMTKTSVDCTMYICGDSTECSNLLLQYGSFCTQLNRALTGIAVEQDKNTQEVFAQVKQIYKTPPIKDFGGFNFSQILPDPSKPSKRSFIEDLLFNKVTLADVGFIKQYGDCLGDIAARDLICAQKFNGLTVLPPLLTDEMIAQYTSALLAGTITSGWTFGAGAALQIPFAMQMAYRFNGIGVTQNVLYENQKLIANQFNSAIGKIQDSLSSTASALGKLQDVVNQNAQALNTLVKQLSSNCGAISSVLNDILSRLDKVEAEVQIDRLITCRLQSLQTYVTQQLIRAAEIRASANLAATKMSECVLGQSKRVDFCGKGYHLMSFPQSAPHGVVFLHVTYVPAQEKNFTTAPAICHDGKAHFPREGVFVSNGTHWFVTQRNFYEPQIITTDNTFVSGNCDVVIGIVNNTVYDPLQPELDSGGGGSDIIKLLNEQVNKEMQSSNLYMSMSSWCYTHSLDGAGLFLFDHAAEEYEHAKKLIIFLNENNVPVQLTSISAPEHKFEGLTQIFQKAYEHEQHISESINNIVDHAIKSKDHATFNFLQWYVAEQHEEEVLFKDILDKIELIGNENHGLYLADQYVKGIAKSRKS

SEQ ID NO: 9441 - protein, 1315 aa, Artificial Sequence
  SARS-CoV-2/Greece/16/2020__EPI_ISL_418265 spike protein (1-1147)(F970C_G999C) Ferritin construct
MFVFLVLLPLVSSQCVNLTTRTQLPPAYTNSFTRGVYYPDKVFRSSVLHSTQDLFLPFFSNVTWFHAIHVSGTNGTKRFDNPVLPFNDGVYFASTEKSNIIRGWIFGTTLDSKTQSLLIVNNATNVVIKVCEFQFCNDPFLGVYYHKNNKSWMESEFRVYSSANNCTFEYVSQPFLMDLEGKQGNFKNLREFVFKNVDGYFKIYSKHTPINLVRDLPQGFSALEPLVDLPIGINITRFQTLLALHRSYLTPGDSSSGWTAGAAAYYVGYLQPRTFLLKYNENGTITDAVDCALDPLSETKCTLKSFTVEKGIYQTSNFRVQPTESIVRFPNITNLCPFGEVFNATRFASVYAWNRKRISNCVADYSVLYNSASFSTFKCYGVSPTKLNDLCFTNVYADSFVIRGDEVRQIAPGQTGKIADYNYKLPDDFTGCVIAWNSNNLDSKVGGNYNYLYRLFRKSNLKPFERDISTEIYQAGSTPCNGVEGFNCYFPLQSYGFQPTNGVGYQPYRVVVLSFELLHAPATVCGPKKSTNLVKNKCVNFNFNGLTGTGVLTESNKKFLPFQQFGRDIADTTDAVRDPQTLEILDITPCSFGGVSVITPGTNTSNQVAVLYQDVNCTEVPVAIHADQLTPTWRVYSTGSNVFQTRAGCLIGAEHVNNSYECDIPIGAGICASYQTQTNSPRRARSVASQSIIAYTMSLGAENSVAYSNNSIAIPTNFTISVTTEILPVSMTKTSVDCTMYICGDSTECSNLLLQYGSFCTQLNRALTGIAVEQDKNTQEVFAQVKQIYKTPPIKDFGGFNFSQILPDPSKPSKRSFIEDLLFNKVTLADAGFIKQYGDCLGDIAARDLICAQKFNGLTVLPPLLTDEMIAQYTSALLAGTITSGWTFGAGAALQIPFAMQMAYRFNGIGVTQNVLYENQKLIANQFNSAIGKIQDSLSSTASALGKLQDVVNQNAQALNTLVKQLSSNCGAISSVLNDILSRLDKVEAEVQIDRLITCRLQSLQTYVTQQLIRAAEIRASANLAATKMSECVLGQSKRVDFCGKGYHLMSFPQSAPHGVVFLHVTYVPAQEKNFTTAPAICHDGKAHFPREGVFVSNGTHWFVTQRNFYEPQIITTDNTFVSGNCDVVIGIVNNTVYDPLQPELDSGGGGSDIIKLLNEQVNKEMQSSNLYMSMSSWCYTHSLDGAGLFLFDHAAEEYEHAKKLIIFLNENNVPVQLTSISAPEHKFEGLTQIFQKAYEHEQHISESINNIVDHAIKSKDHATFNFLQWYVAEQHEEEVLFKDILDKIELIGNENHGLYLADQYVKGIAKSRKS

SEQ ID NO: 9442 - protein, 1315 aa, Artificial Sequence
  SARS-CoV-2/Iceland/319/2020__EPI_ISL_417648 spike protein (1-1147)(F970C_G999C) Ferritin construct
MFVFLVLLPLVSSQCVNLTTRTQLPPAYTNSFTRGVYYPDKVFRSSVLHSTQDLFLPFFSNVTWFHAIHVSGTNGTKRFDNPVLPFNDGVYFASTEKSNIIRGWIFGTTLDSKTQSLLIVNNATNVVIKVCEFQFCNDPFLGVYYHKNNKSWMESEFRVYSSANNCTFEYVSQPFLIDLEGKQGNFKNLREFVFKNIDGYFKIYSKHTPINLVRDLPQGFSALEPLVDLPIGINITRFQTLLALHRSYLTPGDSSSGWTAGAAAYYVGYLQPRTFLLKYNENGTITDAVDCALDPLSETKCTLKSFTVEKGIYQTSNFRVQPTESIVRFPNITNLCPFGEVFNATRFASVYAWNRKRISNCVADYSVLYNSASFSTFKCYGVSPTKLNDLCFTNVYADSFVIRGDEVRQIAPGQTGKIADYNYKLPDDFTGCVIAWNSNNLDSKVGGNYNYLYRLFRKSNLKPFERDISTEIYQAGSTPCNGVEGFNCYFPLQSYGFQPTNGVGYQPYRVVVLSFELLHAPATVCGPKKSTNLVKNKCVNFNFNGLTGTGVLTESNKKFLPFQQFGRDIADTTDAVRDPQTLEILDITPCSFGGVSVITPGTNTSNQVAVLYQGVNCTEVPVAIHADQLTPTWRVYSTGSNVFQTRAGCLIGAEHVNNSYECDIPIGAGICASYQTQTNSPRRARSVASQSIIAYTMSLGAENSVAYSNNSIAIPTNFTISVTTEILPVSMTKTSVDCTMYICGDSTECSNLLLQYGSFCTQLNRALTGIAVEQDKNTQEVFAQVKQIYKTPPIKDFGGFNFSQILPDPSKPSKRSFIEDLLFNKVTLADAGFIKQYGDCLGDIAARDLICAQKFNGLTVLPPLLTDEMIAQYTSALLAGTITSGWTFGAGAALQIPFAMQMAYRFNGIGVTQNVLYENQKLIANQFNSAIGKIQDSLSSTASALGKLQDVVNQNAQALNTLVKQLSSNCGAISSVLNDILSRLDKVEAEVQIDRLITCRLQSLQTYVTQQLIRAAEIRASANLAATKMSECVLGQSKRVDFCGKGYHLMSFPQSAPHGVVFLHVTYVPAQEKNFTTAPAICHDGKAHFPREGVFVSNGTHWFVTQRNFYEPQIITTDNTFVSGNCDVVIGIVNNTVYDPLQPELDSGGGGSDIIKLLNEQVNKEMQSSNLYMSMSSWCYTHSLDGAGLFLFDHAAEEYEHAKKLIIFLNENNVPVQLTSISAPEHKFEGLTQIFQKAYEHEQHISESINNIVDHAIKSKDHATFNFLQWYVAEQHEEEVLFKDILDKIELIGNENHGLYLADQYVKGIAKSRKS

SEQ ID NO: 9443 - protein, 1315 aa, Artificial Sequence
  SARS-CoV-2/Congo/94/2020__EPI_ISL_417947 spike protein (1-1147)(F970C_G999C) Ferritin construct
MFVFLVLLPLVSSQCVNLTTRTQLPPAYTNSFTRGVYYPDKVFRSSVLHSTQDLFLPFFSNVTWFHAIHVSGTNGTKRFDNPVLPFNDGVYFASTEKSNIIRGWIFGTTLDSKTQSLLIVNNATNVVIKVCEFQFCNDPFLGVYYHKNNKSWMESEFRVYSSANNCTFEYVSQPFLMDLEGKQGNFKNLREFVFKNIDGYFKIYSKHTPINLVRDLPQGFSALEPLVDLPIGINITRFQTLLALHRSYLTPGDSSSGWTAGAAAYYVGYLQPRTFLLKYNENGTITDAVDCALDPLSETKCTLKSFTVEKGIYQTSNFRVQPTESIVRFPNITNLCPFGEVFNATRFASVYAWNRKRISNCVADYSVLYNSASFSTFKCYGVSPTKLNDLCFTNVYADSFVIRGDEVRQIAPGQTGKIADYNYKLPDDFTGCVIAWNSNNLDSKVGGNYNYLYRLFRKSNLKPFERDISTEIYQAGSTPCNGVEGFNCYFPLQSYGFQPTNGVGYQPYRVVVLSFELLHAPATVCGPKKSTNLVKNKCVNFNFNGLTGTGVLTESNKKFLPFQQFGRDIADTTDAVRDPQTLEILDITPCSFGGVSVITPGTNTSNQVAVLYQGVNCTEVPVAIHADQLTPTWRVYSTGSNVFQTRAGCLIGAEHVNNSYECDIPIGAGICASYQTQTNSPRRARSVASQSIIAYTMSLGAENSVAYSNNSIAIPTNFTISVTTEILPVSMTKTSVDCTMYICGDSTECSNLLLQYGSFCTQLNRALTGIAVEQDKNTQEVFAQVKQIYKTPPIKDFGGFNFSQILPDPSKPSKRSFIEDILFNKVTLADAGFIKQYGDCLGDIAARDLICAQKFNGLTVLPPLLTDEMIAQYTSALLAGTITSGWTFGAGAALQIPFAMQMAYRFNGIGVTQNVLYENQKLIANQFNSAIGKIQDSLSSTASALGKLQDVVNQNAQALNTLVKQLSSNCGAISSVLNDILSRLDKVEAEVQIDRLITCRLQSLQTYVTQQLIRAAEIRASANLAATKMSECVLGQSKRVDFCGKGYHLMSFPQSAPHGVVFLHVTYVPAQEKNFTTAPAICHDGKAHFPREGVFVSNGTHWFVTQRNFYEPQIITTDNTFVSGNCDVVIGIVNNTVYDPLQPELDSGGGGSDIIKLLNEQVNKEMQSSNLYMSMSSWCYTHSLDGAGLFLFDHAAEEYEHAKKLIIFLNENNVPVQLTSISAPEHKFEGLTQIFQKAYEHEQHISESINNIVDHAIKSKDHATFNFLQWYVAEQHEEEVLFKDILDKIELIGNENHGLYLADQYVKGIAKSRKS

SEQ ID NO: 9444 - protein, 1315 aa, Artificial Sequence
  SARS-CoV-2/Congo/158/2020__EPI_ISL_417950 spike protein (1-1147)(F970C_G999C) Ferritin construct
MFVFLVLLPLVSSQCVNLTTRTQLPPAYTNSFTRGVYYPDKVFRSSVLHSTQDLFLPFFSNVTWFHAIHVSGTNGTKRFDNPVLPFNDGVYFASTEKSNIIRGWIFGTTLDSKTQSLLIVNNATNVVIKVCEFQFCNDPFLGVYYHKNNKSWMESEFRVYSSANNCTFEYVSQPFLMDLEGKQGNFKNLREFVFKNIDGYFKIYSKHTPINLVRDLPQGFSALEPLVDLPIGINITRFQTLLALHRSYLTPGDSSSGWTAGAAAYYVGYLQPRTFLLKYNENGTITDAVDCALDPLSETKCTLKSFTVEKGIYQTSNFRVQPTESIVRFPNITNLCPFGEVFNATRFASVYAWNRKRISNCVADYSVLYNSASFSTFKCYGVSPTKLNDLCFTNVYADSFVIRGDEVRQIAPGQTGKIADYNYKLPDDFTGCVIAWNSNNLDSKVGGNYNYLYRLFRKSNLKPFERDISTEIYQAGSTPCNGVEGFNCYFPLQSYGFQPTNGVGYQPYRVVVLSFELLHAPATVCGPKKSTNLVKNKCVNFNFNGLTGTGVLTESNKKFLPFQQFGRDIADTTDAVRDPQTLEILDITPCSFGGVSVITPGTNTSNQVAVLYQDVNCTEVPVAIHADQLTPTWRVYSTGSNVFQTRAGCLIGAEHVNNSYECDIPIGAGICASYQTQTNSPRRARSVASQSIIAYTMSLGAENSVAYSNNSIAIPTNFTISVTTEILPVSMTKTSVDCTMYICGDSTECSNLLLQYGSFCTQLNRALTGIAVEQDKNTQEVFAQVKQIYKTPPIKDFGGFNFSQILPDPSKPSKRSFIEDLLFNKVTLADAGFIKQYGDCLGDIAARDLICAQKFNGLTVLPPLLTDEMIAQYTSALLAGTITSGWTFGAGAALQIPFAMQMAYRFNGIGVTQNVLYENQKLIANQFNSAIGKIQDSLSSTASALGKLQDVVNQNAQALNTLVKQLSSNCGAISSVLNDILSRLDKVEAEVQIDRLITCRLQSLQTYVTQQLIRAAEIRASANLAATKMSECVLGQSKRVDFCGKGYHLMSFPQSAPHGVVFLHVTYVPAQEKNFTTAPAICHDGKAHFPREGVFVSNGTHWFVTQRNFYEPQIITTDNTFLSGNCDVVIGIVNNTVYDPLQPELDSGGGGSDIIKLLNEQVNKEMQSSNLYMSMSSWCYTHSLDGAGLFLFDHAAEEYEHAKKLIIFLNENNVPVQLTSISAPEHKFEGLTQIFQKAYEHEQHISESINNIVDHAIKSKDHATFNFLQWYVAEQHEEEVLFKDILDKIELIGNENHGLYLADQYVKGIAKSRKS

SEQ ID NO: 9445 - protein, 1315 aa, Artificial Sequence
  SARS-CoV-2/USA/UT-00034/2020__EPI_ISL_417977 spike protein (1-1147)(F970C_G999C) Ferritin construct
MFVFLVLLPLVSSQCVNLTTRTQLPPAYTNSFTRGVYYPDKVFRSSVLHSTQDLFLPFFSNVTWFHAIHVSGTNGTKRFDNPVLPFNDGVYFASTEKSNIIRGWIFGTTLDSKTQSLLIVNNATNVVIKVCEFQFCNDPFLGVYYYKNNKSWMESEFRVYSSANNCTFEYVSQPFLMDLEGKQGNFKNLREFVFKNIDGYFKIYSKHTPINLVRDLPQGFSALEPLVDLPIGINITRFQTLLALHRSYLTPGDSSSGWTAGAAAYYVGYLQPRTFLLKYNENGTITDAVDCALDPLSETKCTLKSFTVEKGIYQTSNFRVQPTESIVRFPNITNLCPFGEVFNATRFASVYAWNRKRISNCVADYSVLYNSASFSTFKCYGVSPTKLNDLCFTNVYADSFVIRGDEVRQIAPGQTGKIADYNYKLPDDFTGCVIAWNSNNLDSKVGGNYNYLYRLFRKSNLKPFERDISTEIYQAGSTPCNGVEGFNCYFPLQSYGFQPTNGVGYQPYRVVVLSFELLHAPATVCGPKKSTNLVKNKCVNFNFNGLTGTGVLTESNKKFLPFQQFGRDIADTTDAVRDPQTLEILDITPCSFGGVSVITPGTNTSNQVAVLYQGVNCTEVPVAIHADQLTPTWRVYSTGSNVFQTRAGCLIGAEHVNNSYECDIPIGAGICASYQTQTNSPRRARSVASQSIIAYTMSLGAENSVAYSNNSIAIPTNFTISVTTEILPVSMTKTSVDCTMYICGDSTECSNLLLQYGSFCTQLNRALTGIAVEQDKNTQEVFAQVKQIYKTPPIKDFGGFNFSQILPDPSKPSKRSFIEDLLFNKVTLADAGFIKQYGDCLGDIAARDLICAQKFNGLTVLPPLLTDEMIAQYTSALLAGTITSGWTFGAGAALQIPFAMQMAYRFNGIGVTQNVLYENQKLIANQFNSAIGKIQDSLSSTASALGKLQDVVNQNAQALNTLVKQLSSNCGAISSVLNDILSRLDKVEAEVQIDRLITCRLQSLQTYVTQQLIRAAEIRASANLAATKMSECVLGQSKRVDFCGKGYHLMSFPQSAPHGVVFLHVTYVPAQEKNFTTAPAICHDGKAHFPREGVFVSNGTHWFVTQRNFYEPQIITTDNTFVSGNCDVVIGIVNNTVYDPLQPELDSGGGGSDIIKLLNEQVNKEMQSSNLYMSMSSWCYTHSLDGAGLFLFDHAAEEYEHAKKLIIFLNENNVPVQLTSISAPEHKFEGLTQIFQKAYEHEQHISESINNIVDHAIKSKDHATFNFLQWYVAEQHEEEVLFKDILDKIELIGNENHGLYLADQYVKGIAKSRKS

SEQ ID NO: 9446 - protein, 1315 aa, Artificial Sequence
  SARS-CoV-2/USA/UT-00033/2020__EPI_ISL_417976 spike protein (1-1147)(F970C_G999C) Ferritin construct
MFVFLVLLPLVSSQCVNLTTRTQLPPAYTNSFTRGVYYPDKVFRSSVLHSTQDLFLPFFSNVTWFHAIHVSGTNGTKRFDNPVLPFNDGVYFASTEKSNIIRGWIFGTTLDSKTQSLLIVNNATNVVIKVCEFQFCNDPFLGVYYHKNNKSWMESEFRVYSSANNCTFEYVSQPFLMDLEGKQGNFKNLREFVFKNIDGYFKIYSKHTPINLVRDLPQGFSALEPLVDLPIGINITRFQTLLALHRSYLTPGDSSSGLTAGAAAYYVGYLQPRTFLLKYNENGTITDAVDCALDPLSETKCTLKSFTVEKGIYQTSNFRVQPTESIVRFPNITNLCPFGEVFNATRFASVYAWNRKRISNCVADYSVLYNSASFSTFKCYGVSPTKLNDLCFTNVYADSFVIRGDEVRQIAPGQTGKIADYNYKLPDDFTGCVIAWNSNNLDSKVGGNYNYLYRLFRKSNLKPFERDISTEIYQAGSTPCNGVEGFNCYFPLQSYGFQPTNGVGYQPYRVVVLSFELLHAPATVCGPKKSTNLVKNKCVNFNFNGLTGTGVLTESNKKFLPFQQFGRDIADTTDAVRDPQTLEILDITPCSFGGVSVITPGTNTSNQVAVLYQGVNCTEVPVAIHADQLTPTWRVYSTGSNVFQTRAGCLIGAEHVNNSYECDIPIGAGICASYQTQTNSPRRARSVASQSIIAYTMSLGAENSVAYSNNSIAIPTNFTISVTTEILPVSMTKTSVDCTMYICGDSTECSNLLLQYGSFCTQLNRALTGIAVEQDKNTQEVFAQVKQIYKTPPIKDFGGFNFSQILPDPSKPSKRSFIEDLLFNKVTLADAGFIKQYGDCLGDIAARDLICAQKFNGLTVLPPLLTDEMIAQYTSALLAGTITSGWTFGAGAALQIPFAMQMAYRFNGIGVTQNVLYENQKLIANQFNSAIGKIQDSLSSTASALGKLQDVVNQNAQALNTLVKQLSSNCGAISSVLNDILSRLDKVEAEVQIDRLITCRLQSLQTYVTQQLIRAAEIRASANLAATKMSECVLGQSKRVDFCGKGYHLMSFPQSAPHGVVFLHVTYVPAQEKNFTTAPAICHDGKAHFPREGVFVSNGTHWFVTQRNFYEPQIITTDNTFVSGNCDVVIGIVNNTVYDPLQPELDSGGGGSDIIKLLNEQVNKEMQSSNLYMSMSSWCYTHSLDGAGLFLFDHAAEEYEHAKKLIIFLNENNVPVQLTSISAPEHKFEGLTQIFQKAYEHEQHISESINNIVDHAIKSKDHATFNFLQWYVAEQHEEEVLFKDILDKIELIGNENHGLYLADQYVKGIAKSRKS

SEQ ID NO: 9447 - protein, 1315 aa, Artificial Sequence
  SARS-CoV-2/USA/WI-13/2020__EPI_ISL_417516 spike protein (1-1147)(F970C_G999C) Ferritin construct
MFVFLVLLPLVSSQCVNLTTRTQLPPAYTNSFTRGVYYPDKVFRSSVLHSTQDLFLPFFSNVTWFHAIHVSGTNGTKRFDNPVLPFNDGVYFASTEKSNIIRGWIFGTTLDSKTQSLLIVNNATNVVIKVCEFQFCNDPFLGVYYHKNNKSWMESEFRVYSSANNCTFEYVSQPFLMDLEGKQGNFKNLREFVFKNIDGYFKIYSKHTPINLVRDLPQGFSALEPLVDLPIGINITRFQTLLALHRSYLTPGDSSSGWTAGAAAYYVGYLQPRTFLLKYNENGTITDAVDCALDPLSETKCTLKSFTVEKGIYQTSNFRVLPTESIVRFPNITNLCPFGEVFNATRFASVYAWNRKRISNCVADYSVLYNSASFSTFKCYGVSPTKLNDLCFTNVYADSFVIRGDEVRQIAPGQTGKIADYNYKLPDDFTGCVIAWNSNNLDSKVGGNYNYLYRLFRKSNLKPFERDISTEIYQAGSTPCNGVEGFNCYFPLQSYGFQPTNGVGYQPYRVVVLSFELLHAPATVCGPKKSTNLVKNKCVNFNFNGLTGTGVLTESNKKFLPFQQFGRDIADTTDAVRDPQTLEILDITPCSFGGVSVITPGTNTSNQVAVLYQGVNCTEVPVAIHADQLTPTWRVYSTGSNVFQTRAGCLIGAEHVNNSYECDIPIGAGICASYQTQTNSPRRARSVASQSIIAYTMSLGAENSVAYSNNSIAIPTNFTISVTTEILPVSMTKTSVDCTMYICGDSTECSNLLLQYGSFCTQLNRALTGIAVEQDKNTQEVFAQVKQIYKTPPIKDFGGFNFSQILPDPSKPSKRSFIEDLLFNKVTLADAGFIKQYGDCLGDIAARDLICAQKFNGLTVLPPLLTDEMIAQYTSALLAGTITSGWTFGAGAALQIPFAMQMAYRFNGIGVTQNVLYENQKLIANQFNSAIGKIQDSLSSTASALGKLQDVVNQNAQALNTLVKQLSSNCGAISSVLNDILSRLDKVEAEVQIDRLITCRLQSLQTYVTQQLIRAAEIRASANLAATKMSECVLGQSKRVDFCGKGYHLMSFPQSAPHGVVFLHVTYVPAQEKNFTTAPAICHDGKAHFPREGVFVSNGTHWFVTQRNFYEPQIITTDNTFVSGNCDVVIGIVNNTVYDPLQPELDSGGGGSDIIKLLNEQVNKEMQSSNLYMSMSSWCYTHSLDGAGLFLFDHAAEEYEHAKKLIIFLNENNVPVQLTSISAPEHKFEGLTQIFQKAYEHEQHISESINNIVDHAIKSKDHATFNFLQWYVAEQHEEEVLFKDILDKIELIGNENHGLYLADQYVKGIAKSRKS

SEQ ID NO: 9448 - protein, 1314 aa, Artificial Sequence
  SARS-CoV-2/India/1-27/2020__EPI_ISL_413522 spike protein (1-1146)(F969C_G998C) Ferritin construct
MFVFLVLLPLVSSQCVNLTTRTQLPPAYTNSFTRGVYYPDKVFRSSVLHSTQDLFLPFFSNVTWFHAIHVSGTNGTKRFDNPVLPFNDGVYFASTEKSNIIRGWIFGTTLDSKTQSLLIVNNATNVVIKVCEFQFCNDPFLGVYHKNNKSWMESEFRVYSSANNCTFEYVSQPFLMDLEGKQGNFKNLREFVFKNIDGYFKIYSKHTPINLVRDLPQGFSALEPLVDLPIGINITRFQTLLALHRSYLTPGDSSSGWTAGAAAYYVGYLQPRTFLLKYNENGTITDAVDCALDPLSETKCTLKSFTVEKGIYQTSNFRVQPTESIVRFPNITNLCPFGEVFNATRFASVYAWNRKRISNCVADYSVLYNSASFSTFKCYGVSPTKLNDLCFTNVYADSFVIRGDEVIQIAPGQTGKIADYNYKLPDDFTGCVIAWNSNNLDSKVGGNYNYLYRLFRKSNLKPFERDISTEIYQAGSTPCNGVEGFNCYFPLQSYGFQPTNGVGYQPYRVVVLSFELLHAPATVCGPKKSTNLVKNKCVNFNFNGLTGTGVLTESNKKFLPFQQFGRDIADTTDAVRDPQTLEILDITPCSFGGVSVITPGTNTSNQVAVLYQDVNCTEVPVAIHADQLTPTWRVYSTGSNVFQTRAGCLIGAEHVNNSYECDIPIGAGICASYQTQTNSPRRARSVASQSIIAYTMSLGAENSVAYSNNSIAIPTNFTISVTTEILPVSMTKTSVDCTMYICGDSTECSNLLLQYGSFCTQLNRALTGIAVEQDKNTQEVFAQVKQIYKTPPIKDFGGFNFSQILPDPSKPSKRSFIEDLLFNKVTLADAGFIKQYGDCLGDIAARDLICAQKFNGLTVLPPLLTDEMIAQYTSALLAGTITSGWTFGAGAALQIPFAMQMAYRFNGIGVTQNVLYENQKLIANQFNSAIGKIQDSLSSTASALGKLQDVVNQNAQALNTLVKQLSSNCGAISSVLNDILSRLDKVEAEVQIDRLITCRLQSLQTYVTQQLIRAAEIRASANLAATKMSECVLGQSKRVDFCGKGYHLMSFPQSAPHGVVFLHVTYVPAQEKNFTTAPAICHDGKAHFPREGVFVSNGTHWFVTQRNFYEPQIITTDNTFVSGNCDVVIGIVNNTVYDPLQPELDSGGGGSDIIKLLNEQVNKEMQSSNLYMSMSSWCYTHSLDGAGLFLFDHAAEEYEHAKKLIIFLNENNVPVQLTSISAPEHKFEGLTQIFQKAYEHEQHISESINNIVDHAIKSKDHATFNFLQWYVAEQHEEEVLFKDILDKIELIGNENHGLYLADQYVKGIAKSRKS

SEQ ID NO: 9449 - protein, 1309 aa, Artificial Sequence
  SARS-CoV-2/pangolin/Guangxi/P4L/2017__EPI_ISL_410538 spike protein (1-1141)(F964C_G993C) Ferritin construct
MFVFLFVLPLVSSQCVNLTTRTGIPPGYTNSSTRGVYYPDKVFRSSILHLTQDLFLPFFSNVTWFNTINYQGGFKKFDNPVLPFNDGVYFASTEKSNIIRGWIFGTTLDARTQSLLIVNNATNVVIKVCEFQFCTDPFLGVYYHNNNKTWVENEFRVYSSANNCTFEYISQPFLMDLEGKQGNFKNLREFVFKNVDGYFKIYSKHTPIDLVRDLPRGFAALEPLVDLPIGINITRFQTLLALHRSYLTPGNLESGWTTGAAAYYVGYLQQRTFLLSYNQNGTITDAVDCSLDPLSETKCTLKSLTVEKGIYQTSNFRVQPTISIVRFPNITNLCPFGEVFNASKFASVYAWNRKRISNCVADYSVLYNSTSFSTFKCYGVSPTKLNDLCFTNVYADSFVVKGDEVRQIAPGQTGVIADYNYKLPDDFTGCVIAWNSVKQDALTGGNYGYLYRLFRKSKLKPFERDISTEIYQAGSTPCNGQVGLNCYYPLERYGFHPTTGVNYQPFRVVVLSFELLNGPATVCGPKLSTTLVKDKCVNFNFNGLTGTGVLTTSKKQFLPFQQFGRDISDTTDAVRDPQTLEILDITPCSFGGVSVITPGTNTSNQVAVLYQDVNCTEVPMAIHAEQLTPAWRVYSAGANVFQTRAGCLVGAEHVNNSYECDIPVGAGICASYHSMSSLRSVNQRSIIAYTMSLGAENSVAYSNNSIAIPTNFTISVTTEILPVSMTKTSVDCTMYICGDSIECSNLLLQYGSFCTQLNRALTGIAVEQDKNTQEVFAQVKQIYKTPPIKDFGGFNFSQILPDPSKPSKRSFIEDLLFNKVTLADAGFIKQYGDCLGDIAARDLICAQKFNGLTVLPPLLTDEMIAQYTSALLAGTITSGWTFGAGAALQIPFAMQMAYRFNGIGVTQNVLYENQKLIANQFNSAIGKIQDSLSSTASALGKLQDVVNQNAQALNTLVKQLSSNCGAISSVLNDILSRLDKVEAEVQIDRLITCRLQSLQTYVTQQLIRAAEIRASANLAATKMSECVLGQSKRVDFCGKGYHLMSFPQSAPHGVVFLHVTYVPAQEKNFTTAPAICHEGKAHFPREGVFVSNGTHWFITQRNFYEPQIITTDNTFVSGSCDVVIGIVNNTVYDPLQPELDSGGGGSDIIKLLNEQVNKEMQSSNLYMSMSSWCYTHSLDGAGLFLFDHAAEEYEHAKKLIIFLNENNVPVQLTSISAPEHKFEGLTQIFQKAYEHEQHISESINNIVDHAIKSKDHATFNFLQWYVAEQHEEEVLFKDILDKIELIGNENHGLYLADQYVKGIAKSRKS

SEQ ID NO: 9450 - protein, 1309 aa, Artificial Sequence
  SARS-CoV-2/pangolin/Guangxi/P5L/2017__EPI_ISL_410540 spike protein (1-1141)(F964C_G993C) Ferritin construct
MFVFLFVLPLVSSQCVNLTTRTGIPPGYTNSSTRGVYYPDKVFRSSILHLTQDLFLPFFSNVTWFNTINYQGGFKKFDNPVLPFNDGVYFASTEKSNIIRGWIFGTTLDARTQSLLIVNNATNVVIKVCEFQFCTDPFLGVYYHNNNKTWVENEFRVYSSANNCTFEYISQPFLMDLEGKQGNFKNLREFVFKNVDGYFKIYSKHTPIDLVRDLPRGFAALEPLVDLPIGINITRFQTLLALHRSYLTPGKLESGWTTGAAAYYVGYLQQRTFLLSYNQNGTITDAVDCSLDPLSETKCTLKSLTVEKGIYQTSNFRVQPTISIVRFPNITNLCPFGEVFNASKFASVYAWNRKRISNCVADYSVLYNSTSFSTFKCYGVSPTKLNDLCFTNVYADSFVVKGDEVRQIAPGQTGVIADYNYKLPDDFTGCVIAWNSVKQDALTGGNYGYLYRLFRKSKLKPFERDISTEIYQAGSTPCNGQVGLNCYYPLERYGFHPTTGVNYQPFRVVVLSFELLNGPATVCGPKLSTTLVKDKCVNFNFNGLTGTGVLTTSKKQFLPFQQFGRDISDTTDAVRDPQTLEILDITPCSFGGVSVITPGTNTSNQVAVLYQDVNCTEVPMAIHAEQLTPAWRVYSAGANVFQTRAGCLVGAEHVNNSYECDIPVGAGICASYHSMSSFRSVNQRSIIAYTMSLGAENSVAYSNNSIAIPTNFTISVTTEILPVSMTKTSVDCTMYICGDSIECSNLLLQYGSFCTQLNRALTGIAVEQDKNTQEVFAQVKQIYKTPPIKDFGGFNFSQILPDPSKPSKRSFIEDLLFNKVTLADAGFIKQYGDCLGDIAARDLICAQKFNGLTVLPPLLTDEMIAQYTSALLAGTITSGWTFGAGAALQIPFAMQMAYRFNGIGVTQNVLYENQKLIANQFNSAIGKIQDSLSSTASALGKLQDVVNQNAQALNTLVKQLSSNCGAISSVLNDILSRLDKVEAEVQIDRLITCRLQSLQTYVTQQLIRAAEIRASANLAATKMSECVLGQSKRVDFCGKGYHLMSFPQSAPHGVVFLHVTYVPAQEKNFTTAPAICHEGKAHFPREGVFVSNGTHWFITQRNFYEPQIITTDNTFVSGSCDVVIGIVNNTVYDPLQPELDSGGGGSDIIKLLNEQVNKEMQSSNLYMSMSSWCYTHSLDGAGLFLFDHAAEEYEHAKKLIIFLNENNVPVQLTSISAPEHKFEGLTQIFQKAYEHEQHISESINNIVDHAIKSKDHATFNFLQWYVAEQHEEEVLFKDILDKIELIGNENHGLYLADQYVKGIAKSRKS

SEQ ID NO: 9451 - protein, 1309 aa, Artificial Sequence
  SARS-CoV-2/pangolin/Guangxi/P5E/2017__EPI_ISL_410541 spike protein (1-1141)(F964C_G993C) Ferritin construct
MFVFLFVLPLVSSQCVNLTTRTGIPPGYTNSSTRGVYYPDKVFRSSILHLTQDLFLPFFSNVTWFNTITYQGGSKKFDNPVLPFNDGVYFASTEKSNIIRGWIFGTTLDARTQSLLIVNNATNVVIKVCEFQFCTDPFLGVYYHNNNKTWVENEFRVYSSANNCTFEYISQPFLMDLEGKQGNFKNLREFVFKNVDGYFKIYSKHTPIDLVRDLPRGFAALEPLVDLPIGINITRFQTLLALHRSYLTPGKLESGWTTGAAAYYVGYLQQRTFLLSYNQNGTITDAVDCSLDPLSETKCTLKSLTVEKGIYQTSNFRVQPTISIVRFPNITNLCPFGEVFNASKFASVYAWNRKRISNCVADYSVLYNSTSFSTFKCYGVSPTKLNDLCFTNVYADSFVVKGDEVRQIAPGQTGVIADYNYKLPDDFTGCVIAWNSVKQDALTGDNYGYLYRLFRKSKLKPFERDISTEIYQAGSTPCNGQVGLNCYYPLERYGFHPTTGVNYQPFRVVVLSFELLNGPATVCGPKLSTTLVKDKCVNFNFNGLTGTGVLTTSKKQFLPFQQFGRDISDTTDAVRDPQTLEILDITPCSFGGVSVITPGTNTSNQVAVLYQDVNCTEVPMAIHAEQLTPAWRVYSAGANVFQTRAGCLVGAEHVNNSYECDIPVGAGICASYHSMSSFRSVNQRSIIAYTMSLGAENSVAYSNNSIAIPTNFTISVTTEILPVSMTKTSVDCTMYICGDSIECSNLLLQYGSFCTQLNRALTGIAVEQDKNTQEVFAQVKQIYKTPPIKDFGGFNFSQILPDPSKPSKRSFIEDLLFNKVTLADAGFIKQYGDCLGDIAARDLICAQKFNGLTVLPPLLTDEMIAQYTSALLAGTITSGWTFGAGAALQIPFAMQMAYRFNGIGVTQNVLYENQKLIANQFNSAIGKIQDSLSSTASALGKLQDVVNQNAQALNTLVKQLSSNCGAISSVLNDILSRLDKVEAEVQIDRLITCRLQSLQTYVTQQLIRAAEIRASANLAATKMSECVLGQSKRVDFCGKGYHLMSFPQSAPHGVVFLHVTYVPAQEKNFTTAPAICHEGKAHFPREGVFVSNGTHWFITQRNFYEPQIITTDNTFVSGSCDVVIGIVNNTVYDPLQPELDSGGGGSDIIKLLNEQVNKEMQSSNLYMSMSSWCYTHSLDGAGLFLFDHAAEEYEHAKKLIIFLNENNVPVQLTSISAPEHKFEGLTQIFQKAYEHEQHISESINNIVDHAIKSKDHATFNFLQWYVAEQHEEEVLFKDILDKIELIGNENHGLYLADQYVKGIAKSRKS

SEQ ID NO: 9452 - protein, 1307 aa, Artificial Sequence
  SARS-CoV-2/pangolin/Guangxi/P1E/2017__EPI_ISL_410539 spike protein (1-1139)(F962C_G991C) Ferritin construct
MFVFLFVLPLVSSQCVNLTTRTGIQPGYTNSSTRGVYYPDKVFRSSILHLTQDLFLPFFSNVTWFNTINYQGGFKKFDNPVLPFNDGVYFASTEKSNIIRGWIFGTTLDARTQSLLIVNNATNVVIKVCEFQFCTDPFLGVYYHNNNKTWVENEFRVYSSANNCTFEYISQPFLMDLEGKQGNFKNLREFVFKNVDGYFKIYSKHTPIDLVRDLPRGFAALEPLVDLPIGINITRFQTLLALHRSYLTPGKLESGWTTGAAAYYVGYLQQRTFLLSYNQNGTITDAVDCSLDPLSETKCTLKSLTVEKGIYQTSNFRVQPTISIVRFPNITNLCPFGEVFNASKFASVYAWNRKRISNCVADYSVLYNSTSFSTFKCYGVSPTKLNDLCFTNVYADSFVVKGDEVRQIAPGQTGVIADYNYKLPDDFTGCVIAWNSVKQDALTGGNYLYRLFRKSKLKPFERDISTEIYQAGSTPCNGQVGLNCYYPLERYGFHPTTGVNYQPFRVVVLSFELLNGPATVCGPKLSTTLVKDKCVNFNFNGLTGTGVLTTSKKQFLPFQQFGRDISDTTDAVRDPQTLEILDITPCSFGGVSVITPGTNTSNQVAVLYQDVNCTEVPMAIHAEQLTPAWRVYSAGANVFQTRAGCLVGAEHVNNSYECDIPVGAGICASYHSMSSLRSVNQRSIIAYTMSLGAENSVAYSNNSIAIPTNFTISVTTEILPVSMTKTSVDCTMYICGDSIECSNLLLQYGSFCTQLNRALTGIAVEQDKNTQEVFAQVKQIYKTPPIKDFGGFNFSQILPDPSKPSKRSFIEDLLFNKVTLADAGFIKQYGDCLGDIAARDLICAQKFNGLTVLPPLLTDEMIAQYTSALLAGTITSGWTFGAGAALQIPFAMQMAYRFNGIGVTQNVLYENQKLIANQFNSAIGKIQDSLSSTASALGKLQDVVNQNAQALNTLVKQLSSNCGAISSVLNDILSRLDKVEAEVQIDRLITCRLQSLQTYVTQQLIRAAEIRASANLAATKMSECVLGQSKRVDFCGKGYHLMSFPQSAPHGVVFLHVTYVPAQEKNFTTAPAICHEGKAHFPREGVFVSNGTHWFITQRNFYEPQIITTDNTFVSGSCDVVIGIVNNTVYDPLQPELDSGGGGSDIIKLLNEQVNKEMQSSNLYMSMSSWCYTHSLDGAGLFLFDHAAEEYEHAKKLIIFLNENNVPVQLTSISAPEHKFEGLTQIFQKAYEHEQHISESINNIVDHAIKSKDHATFNFLQWYVAEQHEEEVLFKDILDKIELIGNENHGLYLADQYVKGIAKSRKS

SEQ ID NO: 9453 - protein, 1315 aa, Artificial Sequence
  SARS-CoV-2/Wuhan/WIV05/2019__EPI_ISL_402128 spike protein (1-1147)(A972C_R995C) Ferritin construct
MFVFLVLLPLVSSQCVNLTTRTQLPPAYTNSFTRGVYYPDKVFRSSVLHSTQDLFLPFFSNVTWFHAIHVSGTNGTKRFDNPVLPFNDGVYFASTEKSNIIRGWIFGTTLDSKTQSLLIVNNATNVVIKVCEFQFCNDPFLGVYYHKNNKSWMESEFRVYSSANNCTFEYVSQPFLMDLEGKQGNFKNLREFVFKNIDGYFKIYSKHTPINLVRDLPQGFSALEPLVDLPIGINITRFQTLLALHRSYLTPGDSSSGWTAGAAAYYVGYLQPRTFLLKYNENGTITDAVDCALDPLSETKCTLKSFTVEKGIYQTSNFRVQPTESIVRFPNITNLCPFGEVFNATRFASVYAWNRKRISNCVADYSVLYNSASFSTFKCYGVSPTKLNDLCFTNVYADSFVIRGDEVRQIAPGQTGKIADYNYKLPDDFTGCVIAWNSNNLDSKVGGNYNYLYRLFRKSNLKPFERDISTEIYQAGSTPCNGVEGFNCYFPLQSYGFQPTNGVGYQPYRVVVLSFELLHAPATVCGPKKSTNLVKNKCVNFNFNGLTGTGVLTESNKKFLPFQQFGRDIADTTDAVRDPQTLEILDITPCSFGGVSVITPGTNTSNQVAVLYQDVNCTEVPVAIHADQLTPTWRVYSTGSNVFQTRAGCLIGAEHVNNSYECDIPIGAGICASYQTQTNSPRRARSVASQSIIAYTMSLGAENSVAYSNNSIAIPTNFTISVTTEILPVSMTKTSVDCTMYICGDSTECSNLLLQYGSFCTQLNRALTGIAVEQDKNTQEVFAQVKQIYKTPPIKDFGGFNFSQILPDPSKPSKRSFIEDLLFNKVTLADAGFIKQYGDCLGDIAARDLICAQKFNGLTVLPPLLTDEMIAQYTSALLAGTITSGWTFGAGAALQIPFAMQMAYRFNGIGVTQNVLYENQKLIANQFNSAIGKIQDSLSSTASALGKLQDVVNQNAQALNTLVKQLSSNFGCISSVLNDILSRLDKVEAEVQIDCLITGRLQSLQTYVTQQLIRAAEIRASANLAATKMSECVLGQSKRVDFCGKGYHLMSFPQSAPHGVVFLHVTYVPAQEKNFTTAPAICHDGKAHFPREGVFVSNGTHWFVTQRNFYEPQIITTDNTFVSGNCDVVIGIVNNTVYDPLQPELDSGGGGSDIIKLLNEQVNKEMQSSNLYMSMSSWCYTHSLDGAGLFLFDHAAEEYEHAKKLIIFLNENNVPVQLTSISAPEHKFEGLTQIFQKAYEHEQHISESINNIVDHAIKSKDHATFNFLQWYVAEQHEEEVLFKDILDKIELIGNENHGLYLADQYVKGIAKSRKS

SEQ ID NO: 9454 - protein, 1311 aa, Artificial Sequence
  SARS-CoV-2/bat/Yunnan/RaTG13/2013__EPI_ISL_402131 spike protein (1-1143)(A968C_R991C) Ferritin construct
MFVFLVLLPLVSSQCVNLTTRTQLPPAYTNSSTRGVYYPDKVFRSSVLHLTQDLFLPFFSNVTWFHAIHVSGTNGIKRFDNPVLPFNDGVYFASTEKSNIIRGWIFGTTLDSKTQSLLIVNNATNVVIKVCEFQFCNDPFLGVYYHKNNKSWMESEFRVYSSANNCTFEYVSQPFLMDLEGKQGNFKNLREFVFKNIDGYFKIYSKHTPINLVRDLPPGFSALEPLVDLPIGINITRFQTLLALHRSYLTPGDSSSGWTAGAAAYYVGYLQPRTFLLKYNENGTITDAVDCALDPLSETKCTLKSFTVEKGIYQTSNFRVQPTDSIVRFPNITNLCPFGEVFNATTFASVYAWNRKRISNCVADYSVLYNSTSFSTFKCYGVSPTKLNDLCFTNVYADSFVITGDEVRQIAPGQTGKIADYNYKLPDDFTGCVIAWNSKHIDAKEGGNFNYLYRLFRKANLKPFERDISTEIYQAGSKPCNGQTGLNCYYPLYRYGFYPTDGVGHQPYRVVVLSFELLNAPATVCGPKKSTNLVKNKCVNFNFNGLTGTGVLTESNKKFLPFQQFGRDIADTTDAVRDPQTLEILDITPCSFGGVSVITPGTNASNQVAVLYQDVNCTEVPVAIHADQLTPTWRVYSTGSNVFQTRAGCLIGAEHVNNSYECDIPIGAGICASYQTQTNSRSVASQSIIAYTMSLGAENSVAYSNNSIAIPTNFTISVTTEILPVSMTKTSVDCTMYICGDSTECSNLLLQYGSFCTQLNRALTGIAVEQDKNTQEVFAQVKQIYKTPPIKDFGGFNFSQILPDPSKPSKRSFIEDLLFNKVTLADAGFIKQYGDCLGDIAARDLICAQKFNGLTVLPPLLTDEMIAQYTSALLAGTITSGWTFGAGAALQIPFAMQMAYRFNGIGVTQNVLYENQKLIANQFNSAIGKIQDSLSSTASALGKLQDVVNQNAQALNTLVKQLSSNFGCISSVLNDILSRLDKVEAEVQIDCLITGRLQSLQTYVTQQLIRAAEIRASANLAATKMSECVLGQSKRVDFCGKGYHLMSFPQSAPHGVVFLHVTYVPAQEKNFTTAPAICHDGKAHFPREGVFVSNGTHWFVTQRNFYEPQIITTDNTFVSGSCDVVIGIVNNTVYDPLQPELDSGGGGSDIIKLLNEQVNKEMQSSNLYMSMSSWCYTHSLDGAGLFLFDHAAEEYEHAKKLIIFLNENNVPVQLTSISAPEHKFEGLTQIFQKAYEHEQHISESINNIVDHAIKSKDHATFNFLQWYVAEQHEEEVLFKDILDKIELIGNENHGLYLADQYVKGIAKSRKS

SEQ ID NO: 9455 - protein, 1315 aa, Artificial Sequence
  SARS-CoV-2/Wuhan/HBCDC-HB-01/2019__EPI_ISL_402132 spike protein (1-1147)(A972C_R995C) Ferritin construct
MFVFLVLLPLVSSQCVNLTTRTQLPPAYTNSITRGVYYPDKVFRSSVLHSTQDLFLPFFSNVTWFHAIHVSGTNGTKRFDNPVLPFNDGVYFASTEKSNIIRGWIFGTTLDSKTQSLLIVNNATNVVIKVCEFQFCNDPFLGVYYHKNNKSWMESEFRVYSSANNCTFEYVSQPFLMDLEGKQGNFKNLREFVFKNIDGYFKIYSKHTPINLVRDLPQGFSALEPLVDLPIGINITRFQTLLALHRSYLTPGDSSSGWTAGAAAYYVGYLQPRTFLLKYNENGTITDAVDCALDPLSETKCTLKSFTVEKGIYQTSNFRVQPTESIVRFPNITNLCPFGEVFNATRFASVYAWNRKRISNCVADYSVLYNSASFSTFKCYGVSPTKLNDLCFTNVYADSFVIRGDEVRQIAPGQTGKIADYNYKLPDDFTGCVIAWNSNNLDSKVGGNYNYLYRLFRKSNLKPFERDISTEIYQAGSTPCNGVEGFNCYFPLQSYGFQPTNGVGYQPYRVVVLSFELLHAPATVCGPKKSTNLVKNKCVNFNFNGLTGTGVLTESNKKFLPFQQFGRDIADTTDAVRDPQTLEILDITPCSFGGVSVITPGTNTSNQVAVLYQDVNCTEVPVAIHADQLTPTWRVYSTGSNVFQTRAGCLIGAEHVNNSYECDIPIGAGICASYQTQTNSPRRARSVASQSIIAYTMSLGAENSVAYSNNSIAIPTNFTISVTTEILPVSMTKTSVDCTMYICGDSTECSNLLLQYGSFCTQLNRALTGIAVEQDKNTQEVFAQVKQIYKTPPIKDFGGFNFSQILPDPSKPSKRSFIEDLLFNKVTLADAGFIKQYGDCLGDIAARDLICAQKFNGLTVLPPLLTDEMIAQYTSALLAGTITSGWTFGAGAALQIPFAMQMAYRFNGIGVTQNVLYENQKLIANQFNSAIGKIQDSLSSTASALGKLQDVVNQNAQALNTLVKQLSSNFGCISSVLNDILSRLDKVEAEVQIDCLITGRLQSLQTYVTQQLIRAAEIRASANLAATKMSECVLGQSKRVDFCGKGYHLMSFPQSAPHGVVFLHVTYVPAQEKNFTTAPAICHDGKAHFPREGVFVSNGTHWFVTQRNFYEPQIITTDNTFVSGNCDVVIGIVNNTVYDPLQPELDSGGGGSDIIKLLNEQVNKEMQSSNLYMSMSSWCYTHSLDGAGLFLFDHAAEEYEHAKKLIIFLNENNVPVQLTSISAPEHKFEGLTQIFQKAYEHEQHISESINNIVDHAIKSKDHATFNFLQWYVAEQHEEEVLFKDILDKIELIGNENHGLYLADQYVKGIAKSRKS

SEQ ID NO: 9456 - protein, 1315 aa, Artificial Sequence
  SARS-CoV-2/Guangdong/20SF028/2020__EPI_ISL_403936 spike protein (1-1147)(A972C_R995C) Ferritin construct
MFVFLVLLPLVSSQCVNLTTRTQLPPAYTNSFTRGVYYPDKVFRSSVLYSTQDLFLPFFSNVTWFHAIHVSGTNGTKRFDNPVLPFNDGVYFASTEKSNIIRGWIFGTTLDSKTQSLLIVNNATNVVIKVCEFQFCNDPFLGVYYHKNNKSWMESEFRVYSSANNCTFEYVSQPFLMDLEGKQGNFKNLREFVFKNIDGYFKIYSKHTPINLVRDLPQGFSALEPLVDLPIGINITRFQTLLALHRSYLTPGDSSSGWTAGAAAYYVGYLQPRTFLLKYNENGTITDAVDCALDPLSETKCTLKSFTVEKGIYQTSNFRVQPTESIVRFPNITNLCPFGEVFNATRFASVYAWNRKRISNCVADYSVLYNSASFSTFKCYGVSPTKLNDLCFTNVYADSFVIRGDEVRQIAPGQTGKIADYNYKLPDDFTGCVIAWNSNNLDSKVGGNYNYLYRLFRKSNLKPFERDISTEIYQAGSTPCNGVEGFNCYFPLQSYGFQPTNGVGYQPYRVVVLSFELLHAPATVCGPKKSTNLVKNKCVNFNFNGLTGTGVLTESNKKFLPFQQFGRDIADTTDAVRDPQTLEILDITPCSFGGVSVITPGTNTSNQVAVLYQDVNCTEVPVAIHADQLTPTWRVYSTGSNVFQTRAGCLIGAEHVNNSYECDIPIGAGICASYQTQTNSPRRARSVASQSIIAYTMSLGAENSVAYSNNSIAIPTNFTISVTTEILPVSMTKTSVDCTMYICGDSTECSNLLLQYGSFCTQLNRALTGIAVEQDKNTQEVFAQVKQIYKTPPIKDFGGFNFSQILPDPSKPSKRSFIEDLLFNKVTLADAGFIKQYGDCLGDIAARDLICAQKFNGLTVLPPLLTDEMIAQYTSALLAGTITSGWTFGAGAALQIPFAMQMAYRFNGIGVTQNVLYENQKLIANQFNSAIGKIQDSLSSTASALGKLQDVVNQNAQALNTLVKQLSSNFGCISSVLNDILSRLDKVEAEVQIDCLITGRLQSLQTYVTQQLIRAAEIRASANLAATKMSECVLGQSKRVDFCGKGYHLMSFPQSAPHGVVFLHVTYVPAQEKNFTTAPAICHDGKAHFPREGVFVSNGTHWFVTQRNFYEPQIITTDNTFVSGNCDVVIGIVNNTVYDPLQPELDSGGGGSDIIKLLNEQVNKEMQSSNLYMSMSSWCYTHSLDGAGLFLFDHAAEEYEHAKKLIIFLNENNVPVQLTSISAPEHKFEGLTQIFQKAYEHEQHISESINNIVDHAIKSKDHATFNFLQWYVAEQHEEEVLFKDILDKIELIGNENHGLYLADQYVKGIAKSRKS

SEQ ID NO: 9457 - protein, 1315 aa, Artificial Sequence
  SARS-CoV-2/Shenzhen/SZTH-001/2020__EPI_ISL_406592 spike protein (1-1147)(A972C_R995C) Ferritin construct
MFVFLVLLPLVSSQCVNLTTRTQLPPAYTNSFTRGVYYPDKVFRSSVLHSTQDLFLPFFSNVTWFHAIHVSGTNGTKRFDNPVLPFNDGVYFASTEKSNIIRGWIFGTTLDSKTQSLLIVNNATNVVIKVCEFQFCNDPFLGVYYHKNNKSWMESEFRVYSSANNCTFEYVSQPFLMDLEGKQGNFKNLREFVFKNIDGYFKIYSKHTPINLVRDLPQGFSALEPLVDLPIGINITRFQTLLALHRSYLTPGDSSSGWTAGAAAYYVGYLQPRTFLLKYNENGTITDAVDCALDPLSETKCTLKSFTVEKGIYQTSNFRVQPTESIVRFPNITNLCPFGEVFNATRFASVYAWNRKRISNCVADYSVLYNSASFSTFKCYGVSPTKLNDLCFTNVYADSFVIRGDEVRQIAPGQTGKIADYNYKLPDDFTGCVIAWNSNNLDSKVGGNYNYLYRLFRKSNLKPFERDISTEIYQAGSTPCNGVEGFNCYFPLQSYGFQPTNGVGYQPYRVVVLSFELLHAPATVCGPKKSTNLVKNKCVNFNFNGLTGTGVLTESNKKFLPFQQFGRDIADTTDAVRDPQTLEILDITPCSFGGVSVITPGTNTSNQVAVLYQDVNCTEVPVAIHADQLTPTWRVYSTGSNVFQTRAGCLIGAEHVNNSYECDIPIGAGICASYQTQTNSPRRARSVASQSIIAYTMSLGAENSVAYSNNSIAIPTNFTISVTTEILPVSMTKTSVDCTMYICGDSTECSNLLLQYGSFCTQLNRALTGIAVEQDKNTQEVFAQVKQIYKTPPIKDFGGFNFSQILPDPSKPSKRSFIEDLLFNKVTLADAGFIKQYGDCLGDIAARDLICAQKFNGLTVLPPLLTDEMIAQYTSALLAGTITSGWTFGAGAALQIPFAMQMAYRFNGIGVTQNVLYENQKLIANQFNSAIGKIQDSLSSTASALGKLQDVVNQNAQALNTLVKQLSSNFGCISSVLNDILSRLDKVEAEVQIDCLITGRLQSLQTYVTQQLIRAAEIRASANLAATKMSECVLGQSKRVDFCGKGYHLMSFPQSAPHGVVFLHVTYVPAQEKNFTTAPAICHDGKAHFPREGVFVSNGTHWFVTQRNFYEPQIITTDNTFVSGNCDVLIGIVNNTVYDPLQPELDSGGGGSDIIKLLNEQVNKEMQSSNLYMSMSSWCYTHSLDGAGLFLFDHAAEEYEHAKKLIIFLNENNVPVQLTSISAPEHKFEGLTQIFQKAYEHEQHISESINNIVDHAIKSKDHATFNFLQWYVAEQHEEEVLFKDILDKIELIGNENHGLYLADQYVKGIAKSRKS

SEQ ID NO: 9458 - protein, 1315 aa, Artificial Sequence
  SARS-CoV-2/Shenzhen/SZTH-004/2020__EPI_ISL_406595 spike protein (1-1147)(A972C_R995C) Ferritin construct
MFVFLVLLPLVSSQCVNLTTRTQLPPAYTNSFTRGVYYPDKVFRSSVLHSTQDLFLPFFSNVTWFHAIHVSGTNGTKRFDNPVLPFNDGVYFASTEKSNIIRGWIFGTTLDSKTQSLLIVNNATNVVIKVCEFQFCNDPFLGVYYHKNNKSWMESEFRVYSSANNCTFEYVSQPFLMDLEGKQGNFKNLREFVFKNIDGYFKIYSKHTPINLVRDLPQGFSALEPLVDLPIGINITRFQTLLALHRSYLTPGDSSSGWTAGAAAYYVGYLQPRTFLLKYNENGTITDAVDCALDPLSETKCTLKSFTVEKGIYQTSNFRVQPTESIVRFPNITNLCPFGEVFNATRFASVYAWDRKRISNCVAYYSVLYNSASFSTFKCYGVSPTKLNDLCFTNVYADSFVIRGDEVRQIAPGQTGKIADYNYKLPDDFTGCVIAWNSNNLDSKVGGNYNYLYRLFRKSNLKPFERDISTEIYQAGSTPCNGVEGFNCYFPLQSYGFQPTNGVGYQPYRVVVLSFELLHAPATVCGPKKSTNLVKNKCVNFNFNGLTGTGVLTESNKKFLPFQQFGRDIADTTDAVRDPQTLEILDITPCSFGGVSVITPGTNTSNQVAVLYQDVNCTEVPVAIHADQLTPTWRVYSTGSNVFQTRAGCLIGAEHVNNSYECDIPIGAGICASYQTQTNSPRRARSVASQSIIAYTMSLGAENSVAYSNNSIAIPTNFTISVTTEILPVSMTKTSVDCTMYICGDSTECSNLLLQYGSFCTQLNRALTGIAVEQDKNTQEVFAQVKQIYKTPPIKDFGGFNFSQILPDPSKPSKRSFIEDLLFNKVTLADAGFIKQYGDCLGDIAARDLICAQKFNGLTVLPPLLTDEMIAQYTSALLAGTITSGWTFGAGAALQIPFAMQMAYRFNGIGVTQNVLYENQKLIANQFNSAIGKIQDSLSSTASALGKLQDVVNQNAQALNTLVKQLSSNFGCISSVLNDILSRLDKVEAEVQIDCLITGRLQSLQTYVTQQLIRAAEIRASANLAATKMSECVLGQSKRVDFCGKGYHLMSFPQSAPHGVVFLHVTYVPAQEKNFTTAPAICHDGKAHFPREGVFVSNGTHWFVTQRNFYEPQIITTDNTFVSGNCDVVIGIVNNTVYDPLQPELDSGGGGSDIIKLLNEQVNKEMQSSNLYMSMSSWCYTHSLDGAGLFLFDHAAEEYEHAKKLIIFLNENNVPVQLTSISAPEHKFEGLTQIFQKAYEHEQHISESINNIVDHAIKSKDHATFNFLQWYVAEQHEEEVLFKDILDKIELIGNENHGLYLADQYVKGIAKSRKS

SEQ ID NO: 9459 - protein, 1315 aa, Artificial Sequence
  SARS-CoV-2/France/IDF0372/2020__EPI_ISL_406596 spike protein (1-1147)(A972C_R995C) Ferritin construct
MFVFLVLLPLVSSQCVNLTTRTQLPPAYTNSFTRGVYYPDKVFRSSVLHSTQDLFLPFFSNVTWFHAIHVSGTNGTKRFDNPVLPFNDGVYFASTEKSNIIRGWIFGTTLDSKTQSLLIVNNATNVVIKVCEFQFCNDPFLGVYYHKNNKSWMESEFRVYSSANNCTFEYVSQPFLMDLEGKQGNFKNLREFVFKNIDGYFKIYSKHTPINLVRDLPQGFSALEPLVDLPIGINITRFQTLLALHRSYLTPGDSSSGWTAGAAAYYVGYLQPRTFLLKYNENGTITDAVDCALDPLSETKCTLKSFTVEKGIYQTSNFRVQPTESIVRFPNITNLCPFGEVFNATRFASVYAWNRKRISNCVADYSFLYNSASFSTFKCYGVSPTKLNDLCFTNVYADSFVIRGDEVRQIAPGQTGKIADYNYKLPDDFTGCVIAWNSNNLDSKVGGNYNYLYRLFRKSNLKPFERDISTEIYQAGSTPCNGVEGFNCYFPLQSYGFQPTNGVGYQPYRVVVLSFELLHAPATVCGPKKSTNLVKNKCVNFNFNGLTGTGVLTESNKKFLPFQQFGRDIADTTDAVRDPQTLEILDITPCSFGGVSVITPGTNTSNQVAVLYQDVNCTEVPVAIHADQLTPTWRVYSTGSNVFQTRAGCLIGAEHVNNSYECDIPIGAGICASYQTQTNSPRRARSVASQSIIAYTMSLGAENSVAYSNNSIAIPTNFTISVTTEILPVSMTKTSVDCTMYICGDSTECSNLLLQYGSFCTQLNRALTGIAVEQDKNTQEVFAQVKQIYKTPPIKDFGGFNFSQILPDPSKPSKRSFIEDLLFNKVTLADAGFIKQYGDCLGDIAARDLICAQKFNGLTVLPPLLTDEMIAQYTSALLAGTITSGWTFGAGAALQIPFAMQMAYRFNGIGVTQNVLYENQKLIANQFNSAIGKIQDSLSSTASALGKLQDVVNQNAQALNTLVKQLSSNFGCISSVLNDILSRLDKVEAEVQIDCLITGRLQSLQTYVTQQLIRAAEIRASANLAATKMSECVLGQSKRVDFCGKGYHLMSFPQSAPHGVVFLHVTYVPAQEKNFTTAPAICHDGKAHFPREGVFVSNGTHWFVTQRNFYEPQIITTDNTFVSGNCDVVIGIVNNTVYDPLQPELDSGGGGSDIIKLLNEQVNKEMQSSNLYMSMSSWCYTHSLDGAGLFLFDHAAEEYEHAKKLIIFLNENNVPVQLTSISAPEHKFEGLTQIFQKAYEHEQHISESINNIVDHAIKSKDHATFNFLQWYVAEQHEEEVLFKDILDKIELIGNENHGLYLADQYVKGIAKSRKS

SEQ ID NO: 9460 - protein, 1315 aa, Artificial Sequence
  SARS-CoV-2/Australia/VIC01/2020__EPI_ISL_406844 spike protein (1-1147)(A972C_R995C) Ferritin construct
MFVFLVLLPLVSSQCVNLTTRTQLPPAYTNSFTRGVYYPDKVFRSSVLHSTQDLFLPFFSNVTWFHAIHVSGTNGTKRFDNPVLPFNDGVYFASTEKSNIIRGWIFGTTLDSKTQSLLIVNNATNVVIKVCEFQFCNDPFLGVYYHKNNKSWMESEFRVYSSANNCTFEYVSQPFLMDLEGKQGNFKNLREFVFKNIDGYFKIYSKHTPINLVRDLPQGFSALEPLVDLPIGINITRFQTLLALHRRYLTPGDSSSGWTAGAAAYYVGYLQPRTFLLKYNENGTITDAVDCALDPLSETKCTLKSFTVEKGIYQTSNFRVQPTESIVRFPNITNLCPFGEVFNATRFASVYAWNRKRISNCVADYSVLYNSASFSTFKCYGVSPTKLNDLCFTNVYADSFVIRGDEVRQIAPGQTGKIADYNYKLPDDFTGCVIAWNSNNLDSKVGGNYNYLYRLFRKSNLKPFERDISTEIYQAGSTPCNGVEGFNCYFPLQSYGFQPTNGVGYQPYRVVVLSFELLHAPATVCGPKKSTNLVKNKCVNFNFNGLTGTGVLTESNKKFLPFQQFGRDIADTTDAVRDPQTLEILDITPCSFGGVSVITPGTNTSNQVAVLYQDVNCTEVPVAIHADQLTPTWRVYSTGSNVFQTRAGCLIGAEHVNNSYECDIPIGAGICASYQTQTNSPRRARSVASQSIIAYTMSLGAENSVAYSNNSIAIPTNFTISVTTEILPVSMTKTSVDCTMYICGDSTECSNLLLQYGSFCTQLNRALTGIAVEQDKNTQEVFAQVKQIYKTPPIKDFGGFNFSQILPDPSKPSKRSFIEDLLFNKVTLADAGFIKQYGDCLGDIAARDLICAQKFNGLTVLPPLLTDEMIAQYTSALLAGTITSGWTFGAGAALQIPFAMQMAYRFNGIGVTQNVLYENQKLIANQFNSAIGKIQDSLSSTASALGKLQDVVNQNAQALNTLVKQLSSNFGCISSVLNDILSRLDKVEAEVQIDCLITGRLQSLQTYVTQQLIRAAEIRASANLAATKMSECVLGQSKRVDFCGKGYHLMSFPQSAPHGVVFLHVTYVPAQEKNFTTAPAICHDGKAHFPREGVFVSNGTHWFVTQRNFYEPQIITTDNTFVSGNCDVVIGIVNNTVYDPLQPELDSGGGGSDIIKLLNEQVNKEMQSSNLYMSMSSWCYTHSLDGAGLFLFDHAAEEYEHAKKLIIFLNENNVPVQLTSISAPEHKFEGLTQIFQKAYEHEQHISESINNIVDHAIKSKDHATFNFLQWYVAEQHEEEVLFKDILDKIELIGNENHGLYLADQYVKGIAKSRKS

SEQ ID NO: 9461 - protein, 1315 aa, Artificial Sequence
  SARS-CoV-2/Germany/BavPat1/2020__EPI_ISL_406862 spike protein (1-1147)(A972C_R995C) Ferritin construct
MFVFLVLLPLVSSQCVNLTTRTQLPPAYTNSFTRGVYYPDKVFRSSVLHSTQDLFLPFFSNVTWFHAIHVSGTNGTKRFDNPVLPFNDGVYFASTEKSNIIRGWIFGTTLDSKTQSLLIVNNATNVVIKVCEFQFCNDPFLGVYYHKNNKSWMESEFRVYSSANNCTFEYVSQPFLMDLEGKQGNFKNLREFVFKNIDGYFKIYSKHTPINLVRDLPQGFSALEPLVDLPIGINITRFQTLLALHRSYLTPGDSSSGWTAGAAAYYVGYLQPRTFLLKYNENGTITDAVDCALDPLSETKCTLKSFTVEKGIYQTSNFRVQPTESIVRFPNITNLCPFGEVFNATRFASVYAWNRKRISNCVADYSVLYNSASFSTFKCYGVSPTKLNDLCFTNVYADSFVIRGDEVRQIAPGQTGKIADYNYKLPDDFTGCVIAWNSNNLDSKVGGNYNYLYRLFRKSNLKPFERDISTEIYQAGSTPCNGVEGFNCYFPLQSYGFQPTNGVGYQPYRVVVLSFELLHAPATVCGPKKSTNLVKNKCVNFNFNGLTGTGVLTESNKKFLPFQQFGRDIADTTDAVRDPQTLEILDITPCSFGGVSVITPGTNTSNQVAVLYQGVNCTEVPVAIHADQLTPTWRVYSTGSNVFQTRAGCLIGAEHVNNSYECDIPIGAGICASYQTQTNSPRRARSVASQSIIAYTMSLGAENSVAYSNNSIAIPTNFTISVTTEILPVSMTKTSVDCTMYICGDSTECSNLLLQYGSFCTQLNRALTGIAVEQDKNTQEVFAQVKQIYKTPPIKDFGGFNFSQILPDPSKPSKRSFIEDLLFNKVTLADAGFIKQYGDCLGDIAARDLICAQKFNGLTVLPPLLTDEMIAQYTSALLAGTITSGWTFGAGAALQIPFAMQMAYRFNGIGVTQNVLYENQKLIANQFNSAIGKIQDSLSSTASALGKLQDVVNQNAQALNTLVKQLSSNFGCISSVLNDILSRLDKVEAEVQIDCLITGRLQSLQTYVTQQLIRAAEIRASANLAATKMSECVLGQSKRVDFCGKGYHLMSFPQSAPHGVVFLHVTYVPAQEKNFTTAPAICHDGKAHFPREGVFVSNGTHWFVTQRNFYEPQIITTDNTFVSGNCDVVIGIVNNTVYDPLQPELDSGGGGSDIIKLLNEQVNKEMQSSNLYMSMSSWCYTHSLDGAGLFLFDHAAEEYEHAKKLIIFLNENNVPVQLTSISAPEHKFEGLTQIFQKAYEHEQHISESINNIVDHAIKSKDHATFNFLQWYVAEQHEEEVLFKDILDKIELIGNENHGLYLADQYVKGIAKSRKS

SEQ ID NO: 9462 - protein, 1315 aa, Artificial Sequence
  SARS-CoV-2/Wuhan/HBCDC-HB-02/2020__EPI_ISL_412978 spike protein (1-1147)(A972C_R995C) Ferritin construct
MFVFLVLLPLVSSQCVNLTTRTQLPPAYTNSFTRGVYYPDKVFRSSVLHSTQDLFLPFFSNVTWFHAIHVSGTNGTKRFDNPVLPFNDGVYFASTEKSNIIRGWIFGTTLDSKTQSLLIVNNATNVVIKVCEFQFCNDPFLGVYYHKNNKSWMESEFRVYSSANNCTFEYVSQPFLMDLEGKQGNFKNLREFVFKNIDGYFKIYSKHTPINLVRDLPQGFSALEPLVDLPIGINITRFQTLLALHRSYLTPGDSSSGWTAGAAAYYVGYLQPRTFLLKYNENGTITDAVDCALDPLSETKCTLKSFTVEKGIYQTSNFRVQPTESIVRFPNITNLCPFGEVFNATRFASVYAWNRKRISNCVADYSVLYNSASFSTFKCYGVSPTKLNDLCFTNVYADSFVIRGDEVRQIAPGQTGKIADYNYKLPDDFTGCVIAWNSNNLDSKVGGNYNYLYRLFRKSNLKPFERDISTEIYQAGSTPCNGVEGFNCYFPLQSYGFQPTNGVGYQPYRVVVLSFELLHAPATVCGPKKSTNLVKNKCVNFNFNGLTGTGVLTESNKKFLPFQQFGRDIADTTDAVRDPQTLEILDITPCSFGGVSVITPGTNTSNQVAVLYQDVNCTEVPVAIHADQLTPTWRVYSTGSNVFQTRAGCLIGAEHVNNSYECDIPIGAGICASYQTQTNSPRRARSVASQSIIAYTMSLGAENSVAYSNNSIAIPTNFTISVTTEILPVSMTKTSVDCTMYICGDSTECSNFLLQYGSFCTQLNRALTGIAVEQDKNTQEVFAQVKQIYKTPPIKDFGGFNFSQILPDPSKPSKRSFIEDLLFNKVTLADAGFIKQYGDCLGDIAARDLICAQKFNGLTVLPPLLTDEMIAQYTSALLAGTITSGWTFGAGAALQIPFAMQMAYRFNGIGVTQNVLYENQKLIANQFNSAIGKIQDSLSSTASALGKLQDVVNQNAQALNTLVKQLSSNFGCISSVLNDILSRLDKVEAEVQIDCLITGRLQSLQTYVTQQLIRAAEIRASANLAATKMSECVLGQSKRVDFCGKGYHLMSFPQSAPHGVVFLHVTYVPAQEKNFTTAPAICHDGKAHFPREGVFVSNGTHWFVTQRNFYEPQIITTDNTFVSGNCDVVIGIVNNTVYDPLQPELDSGGGGSDIIKLLNEQVNKEMQSSNLYMSMSSWCYTHSLDGAGLFLFDHAAEEYEHAKKLIIFLNENNVPVQLTSISAPEHKFEGLTQIFQKAYEHEQHISESINNIVDHAIKSKDHATFNFLQWYVAEQHEEEVLFKDILDKIELIGNENHGLYLADQYVKGIAKSRKS

SEQ ID NO: 9463 - protein, 1315 aa, Artificial Sequence
  SARS-CoV-2/Australia/QLD02/2020__EPI_ISL_407896 spike protein (1-1147)(A972C_R995C) Ferritin construct
MFVFLVLLPLVSSQCVNLTTRTQLPPAYTNSFTRGVYYPDKVFRSSVLHSTQDLFLPFFSNVTWFHAIHVSGTNGTKRFDNPVLPFNDGVYFASTEKSNIIRGWIFGTTLDSKTQSLLIVNNATNVVIKVCEFQFCNDPFLGVYYHKNNKSWMESEFRVYSSANNCTFEYVSQPFLMDLEGKQGNFKNLREFVFKNIDGYFKIYSKHTPINLVRDLPQGFSALEPLVDLPIGINITRFQTLLALHRSYLTPGDSSSGWTAGAAAYYVGYLQPRTFLLKYNENGTITDAVDCALDPLSETKCTLKSFTVEKGIYQTSNFRVQPTESIVRFPNITNLCPFGEVFNATRFASVYAWNRKRISNCVADYSVLYNSASFSTFKCYGVSPTKLNDLCFTNVYADSFVIRGDEVRQIAPGQTGKIADYNYKLPDDFTGCVIAWNSNNLDSKVGGNYNYLYRLFRKSNLKPFERDISTEIYQAGSTPCNGVEGFNCYFPLQSYGFQPTNGVGYQPYRVVVLSFELLHAPATVCGPKKSTNLVKNKCVNFNFNGLTGTGVLTESNKKFLPFQQFGRDIADTTDAVRDPQTLEILDITPCSFGGVSVITPGTNTSNQVAVLYQDVNCTEVPVAIHADQLTPTWRVYSTGSNVFQTRAGCLIGAEHVNNSYECDIPIGAGICASYQTQTNSPRRARSVASQSIIAYTMSLGAENSVAYSNNSIAIPTNFTISVTTEILPVSMTKTSVDCTMYICGDSTECSNLLLQYGSFCTQLNRALTGIAVEQDKNTQEVFAQVKQIYKTPPIKDFGGFNFSQILPDPSKPSKRSFIEDLLFNKVTLADAGFIKQYGDCLGDIAARDLICAQKFNGLTVLPPLLTDEMIAQYTSALLAGTITSGWTFGAGAALQIPFAMQMAYRFNGIGVTQNVLYENQKLIANQFNSAIGKIQDSLSSTASALGKLQDVVNQNAQALNTLVKQLSSNFGCISSVLNDILSRLDKVEAEVQIDCLITGRLQSLQTYVTQQLIRAAEIRASANLAATKMSECVLGQSKRVDFCGKGYHLMSFPQSAPHGVVFLHVTYVPAQEKNFTTAPAICHDGKAHFPREGVFVSNGTHWFVTQRNFYEPQIITTDNTFVSGNCDVVIGIVNNTVYDPLQLELDSGGGGSDIIKLLNEQVNKEMQSSNLYMSMSSWCYTHSLDGAGLFLFDHAAEEYEHAKKLIIFLNENNVPVQLTSISAPEHKFEGLTQIFQKAYEHEQHISESINNIVDHAIKSKDHATFNFLQWYVAEQHEEEVLFKDILDKIELIGNENHGLYLADQYVKGIAKSRKS

SEQ ID NO: 9464 - protein, 1315 aa, Artificial Sequence
  SARS-CoV-2/India/1-31/2020__EPI_ISL_413523 spike protein (1-1147)(A972C_R995C) Ferritin construct
MFVFLVLLPLVSSQCVNLTTRTQLPPAYTNSFTRGVYYPDKVFRSSVLHSTQDLFLPFFSNVTWFHAIHVSGTNGTKRFDNPVLPFNDGVYFASTEKSNIIRGWIFGTTLDSKTQSLLIVNNATNVVIKVCEFQFCNDPFLGVYYHKNNKSWMESEFRVYSSANNCTFEYVSQPFLMDLEGKQGNFKNLREFVFKNIDGYFKIYSKHTPINLVRDLPQGFSALEPLVDLPIGINITRFQTLLALHRSYLTPGDSSSGWTAGAAAYYVGYLQPRTFLLKYNENGTITDAVDCALDPLSETKCTLKSFTVEKGIYQTSNFRVQPTESIVRFPNITNLCPFGEVFNATRFASVYAWNRKRISNCVADYSVLYNSASFSTFKCYGVSPTKLNDLCFTNVYADSFVIRGDEVRQIAPGQTGKIADYNYKLPDDFTGCVIAWNSNNLDSKVGGNYNYLYRLFRKSNLKPFERDISTEIYQAGSTPCNGVEGFNCYFPLQSYGFQPTNGVGYQPYRVVVLSFELLHAPATVCGPKKSTNLVKNKCVNFNFNGLTGTGVLTESNKKFLPFQQFGRDIADTTDAVRDPQTLEILDITPCSFGGVSVITPGTNTSNQVAVLYQDVNCTEVPVAIHADQLTPTWRVYSTGSNVFQTRAGCLIGAEHVNNSYECDIPIGAGICASYQTQTNSPRRARSVASQSIIAYTMSLGAENSVAYSNNSIAIPTNFTISVTTEILPVSMTKTSVDCTMYICGDSTECSNLLLQYGSFCTQLNRALTGIAVEQDKNTQEVFAQVKQIYKTPPIKDFGGFNFSQILPDPSKPSKRSFIEDLLFNKVTLADAGFIKQYGDCLGDIAARDLICAQKFNGLTVLPPLLTDEMIAQYTSALLAGTITSGWTFGAGAALQIPFAMQMAYRFNGIGVTQNVLYENQKLIANQFNSVIGKIQDSLSSTASALGKLQDVVNQNAQALNTLVKQLSSNFGCISSVLNDILSRLDKVEAEVQIDCLITGRLQSLQTYVTQQLIRAAEIRASANLAATKMSECVLGQSKRVDFCGKGYHLMSFPQSAPHGVVFLHVTYVPAQEKNFTTAPAICHDGKAHFPREGVFVSNGTHWFVTQRNFYEPQIITTDNTFVSGNCDVVIGIVNNTVYDPLQPELDSGGGGSDIIKLLNEQVNKEMQSSNLYMSMSSWCYTHSLDGAGLFLFDHAAEEYEHAKKLIIFLNENNVPVQLTSISAPEHKFEGLTQIFQKAYEHEQHISESINNIVDHAIKSKDHATFNFLQWYVAEQHEEEVLFKDILDKIELIGNENHGLYLADQYVKGIAKSRKS

SEQ ID NO: 9465 - protein, 1315 aa, Artificial Sequence
  SARS-CoV-2/Guangdong/GD2020087-P0008/2020__EPI_ISL_413863 spike protein (1-1147)(A972C_R995C) Ferritin construct
MFVFLVLLPLVSSQCVNLTTRTQLPPAYTNSFTRGVYYPDKVFRSSVLHSTQDLFLPFFSNVTWFHAIHVSGTNGTKRFDNPVLPFNDGVYFASTEKSNIIRGWIFGTTLDSKTQSLLIVNNATNVVIKVCEFQFCNDPFLGVYYHKNNKSWMESEFRVYSSANNCTFEYVSQPFLMDLEGKQGNFKNLREFVFKNIDGYFKIYSKHTPINLVRDLPQGFSALEPLVDLPIGINITRFQTLLALHRSYLTPGDSSSGWTAGAAAYYVGYLQPRTFLLKYNENGTITDAVDCALDPLSETKCTLKSFTVEKGIYQTSNFRVQPTESIVRFPNITNLCPFGEVFNATRFASVYAWNRKRISNCVADYSVLYNSASFSTFKCYGVSPTKLNDLCFTNVYADSFVIRGDEVREIAPGQTGKIADYNYKLPDDFTGCVIAWNSNNLDSKVGGNYNYLYRLFRKSNLKPFERDISTEIYQAGSTPCNGVEGFNCYFPLQSYGFQPTNGVGYQPYRVVVLSFELLHAPATVCGPKKSTNLVKNKCVNFNFNGLTGTGVLTESNKKFLPFQQFGRDIADTTDAVRDPQTLEILDITPCSFGGVSVITPGTNTSNQVAVLYQDVNCTEVPVAIHADQLTPTWRVYSTGSNVFQTRAGCLIGAEHVNNSYECDIPIGAGICASYQTQTNSPRRARSVASQSIIAYTMSLGAENSVAYSNNSIAIPTNFTISVTTEILPVSMTKTSVDCTMYICGDSTECSNLLLQYGSFCTQLNRALTGIAVEQDKNTQEVFAQVKQIYKTPPIKDFGGFNFSQILPDPSKPSKRSFIEDLLFNKVTLADAGFIKQYGDCLGDIAARDLICAQKFNGLTVLPPLLTDEMIAQYTSALLAGTITSGWTFGAGAALQIPFAMQMAYRFNGIGVTQNVLYENQKLIANQFNSAIGKIQDSLSSTASALGKLQDVVNQNAQALNTLVKQLSSNFGCISSVLNDILSRLDKVEAEVQIDCLITGRLQSLQTYVTQQLIRAAEIRASANLAATKMSECVLGQSKRVDFCGKGYHLMSFPQSAPHGVVFLHVTYVPAQEKNFTTAPAICHDGKAHFPREGVFVSNGTHWFVTQRNFYEPQIITTDNTFVSGNCDVVIGIVNNTVYDPLQPELDSGGGGSDIIKLLNEQVNKEMQSSNLYMSMSSWCYTHSLDGAGLFLFDHAAEEYEHAKKLIIFLNENNVPVQLTSISAPEHKFEGLTQIFQKAYEHEQHISESINNIVDHAIKSKDHATFNFLQWYVAEQHEEEVLFKDILDKIELIGNENHGLYLADQYVKGIAKSRKS

SEQ ID NO: 9466 - protein, 1315 aa, Artificial Sequence
  SARS-CoV-2/Sweden/01/2020__EPI_ISL_411951 spike protein (1-1147)(A972C_R995C) Ferritin construct
MFVFLVLLPLVSSQCVNLTTRTQLPPAYTNSFTRGVYYPDKVFRSSVLHSTQDLFLPFFSNVTWFHAIHVSGTNGTKRFDNPVLPFNDGVYFASTEKSNIIRGWIFGTTLDSKTQSLLIVNNATNVVIKVCEFQFCNDPFLGVYYHKNNKSWMESEFRVYSSANNCTFEYVSQPFLMDLEGKQGNFKNLREFVFKNIDGYFKIYSKHTPINLVRDLPQGFSALEPLVDLPIGINITRFQTLLALHRSYLTPGDSSSGWTAGAAAYYVGYLQPRTFLLKYNENGTITDAVDCALDPLSETKCTLKSFTVEKGIYQTSNFRVQPTESIVRFPNITNLCPFGEVFNATRFASVYAWNRKRISNCVADYSVLYNSASFSTFKCYGVSPTKLNDLCFTNVYADSFVIRGDEVRQIAPGQTGKIADYNYKLPDDFTGCVIAWNSNNLDSKVGGNYNYLYRLFRKSNLKPFERDISTEIYQAGSTPCNGVEGFNCYFPLQSYGFQPTNGVGYQPYRVVVLSFELLHAPATVCGPKKSTNLVKNKCVNFNFNGLTGTGVLTESNKKFLPFQQFGRDIADTTDAVRDPQTLEILDITPCSFGGVSVITPGTNTSNQVAVLYQDVNCTEVPVAIHADQLTPTWRVYSTGSNVFQTRAGCLIGAEHVNNSYECDIPIGAGICASYQTQTNSPRRARSVASQSIIAYTMSLGAENSVAYSNNSIAIPTNFTISVTTEILPVSMTKTSVDCTMYICGDSTECSNLLLQYGSFCTQLNRALTGIAVEQDKNTQEVFAQVKQIYKTPPIKDCGGFNFSQILPDPSKPSKRSFIEDLLFNKVTLADAGFIKQYGDCLGDIAARDLICAQKFNGLTVLPPLLTDEMIAQYTSALLAGTITSGWTFGAGAALQIPFAMQMAYRFNGIGVTQNVLYENQKLIANQFNSAIGKIQDSLSSTASALGKLQDVVNQNAQALNTLVKQLSSNFGCISSVLNDILSRLDKVEAEVQIDCLITGRLQSLQTYVTQQLIRAAEIRASANLAATKMSECVLGQSKRVDFCGKGYHLMSFPQSAPHGVVFLHVTYVPAQEKNFTTAPAICHDGKAHFPREGVFVSNGTHWFVTQRNFYEPQIITTDNTFVSGNCDVVIGIVNNTVYDPLQPELDSGGGGSDIIKLLNEQVNKEMQSSNLYMSMSSWCYTHSLDGAGLFLFDHAAEEYEHAKKLIIFLNENNVPVQLTSISAPEHKFEGLTQIFQKAYEHEQHISESINNIVDHAIKSKDHATFNFLQWYVAEQHEEEVLFKDILDKIELIGNENHGLYLADQYVKGIAKSRKS

SEQ ID NO: 9467 - protein, 1315 aa, Artificial Sequence
  SARS-CoV-2/Tianmen/HBCDC-HB-07/2020__EPI_ISL_412983 spike protein (1-1147)(A972C_R995C) Ferritin construct
MFVFLVLLPLVSSQCVNLTTRTQLPPAYTNSFTRGVYYPDKVFRSSVLHSTQDLFLPFFSNVTWFHAIHVSGTNGTKRFDNPVLPFNDGVYFASTEKSNIIRGWIFGTTLDSKTQSLLIVNNATNVVIKVCEFQFCNDPFLGVYYHKNNKSWMESEFRVYSSANNCTFEYVSQPFLMDLEGKQGNFKNLREFVFKNIDGYFKIYSKHTPINLVRDLPQGFSALEPLVDLPIGINITRFQTLLALHRSYLTPGDSSSGWTAGAAAYYVGYLQPRTFLLKYNENGTITDAVDCALDPLSETKCTLKSFTVEKGIYQTSNFRVQPTESIVRFPNITNLCPFGEVFNATRFASVYAWNRKRISNCVADYSVLYNSASFSTFKCYGVSPTKLNDLCFTNVYADSFVIRGDEVRQIAPGQTGKIADYNYKLPDDFTGCVIAWNSNNLDSKVGGNYNYLYRLFRKSNLKPFERDISTEIYQAGSTPCNGVEGFNCYFPLQSYGFQPTNGVGYQPYRVVVLSFELLHAPATVCGPKKSTNLVKNKCVNFNFNGLTGTGVLTESNKKFLPFQQFGRDIADTTDAVRDPQTLEILDITPCSFGGVSVITPGTNTSNQVAVLYQDLNCTEVPVAIHADQLTPTWRVYSTGSNVFQTRAGCLIGAEHVNNSYECDIPIGAGICASYQTQTNSPRRARSVASQSIIAYTMSLGAENSVAYSNNSIAIPTNFTISVTTEILPVSMTKTSVDCTMYICGDSTECSNLLLQYGSFCTQLNRALTGIAVEQDKNTQEVFAQVKQIYKTPPIKDFGGFNFSQILPDPSKPSKRSFIEDLLFNKVTLADAGFIKQYGDCLGDIAARDLICAQKFNGLTVLPPLLTDEMIAQYTSALLAGTITSGWTFGAGAALQIPFAMQMAYRFNGIGVTQNVLYENQKLIANQFNSAIGKIQDSLSSTASALGKLQDVVNQNAQALNTLVKQLSSNFGCISSVLNDILSRLDKVEAEVQIDCLITGRLQSLQTYVTQQLIRAAEIRASANLAATKMSECVLGQSKRVDFCGKGYHLMSFPQSAPHGVVFLHVTYVPAQEKNFTTAPAICHDGKAHFPREGVFVSNGTHWFVTQRNFYEPQIITTDNTFVSGNCDVVIGIVNNTVYDPLQPELDSGGGGSDIIKLLNEQVNKEMQSSNLYMSMSSWCYTHSLDGAGLFLFDHAAEEYEHAKKLIIFLNENNVPVQLTSISAPEHKFEGLTQIFQKAYEHEQHISESINNIVDHAIKSKDHATFNFLQWYVAEQHEEEVLFKDILDKIELIGNENHGLYLADQYVKGIAKSRKS

SEQ ID NO: 9468 - protein, 1315 aa, Artificial Sequence
  SARS-CoV-2/Hong Kong/case42_VM20002493/2020__EPI_ISL_414527 spike protein (1-1147)(A972C_R995C) Ferritin construct
MFVFLVLLPLVSSQCVNLTTRTQLPPAYTNSFTRGVYYPDKVFRSSVLHSTQDLFLPFFSNVTWFHAIHVSGTNGTKRFDNPVLPFNDGVYFASTEKSNIIRGWIFGTTLDSKTQSLLIVNNATNVVIKVCEFQFCNDPFLGVYYHKNNKSWMESEFRVYSSANNCTFEYVSQPFLMDLEGKQGNFKNLREFVFKNIDGYFKIYSKHTPINLVRDLPQGFSALEPLVDLPIGINITRFQTLLALHRSYLTPGDSSSGWTAGAAAYYVGYLQPRTFLLKYNENGTITDAVDCALDPLSETKCTLKSFTVEKGIYQTSNFRVQPTESIVRFPNITNLCPFGEVFNATRFASVYAWNRKRISNCVADYSVLYNSASFSTFKCYGVSPTKLNDLCFTNVYADSFVIRGDEVRQIAPGQTGKIADYNYKLPDDFTGCVIAWNSNNLDSKVGGNYNYLYRLFRKSNLKPFERDISTEIYQAGSTPCNGVEGFNCYFPLQSYGFQPTNGVGYQPYRVVVLSFELLHAPATVCGPKKSTNLVKNKCVNFNFNGLTGTGVLTESNKKFLPFQQFGRDIADTTDAVRDPQTLEILDITPCSFGGVSVITPGTNTSNQVAVLYQDVNCTEVPVAIHADQLTPTWRVYSTGSNVFQTRAGCLIGAEHVNNSYECDIPIGAGICASYQTQTNSPRRARSVASQSIIAYTMSLGAENSVAYSNNSIAIPTNFAISVTTEILPVSMTKTSVDCTMYICGDSTECSNLLLQYGSFCTQLNRALTGIAVEQDKNTQEVFAQVKQIYKTPPIKDFGGFNFSQILPDPSKPSKRSFIEDLLFNKVTLADAGFIKQYGDCLGDIAARDLICAQKFNGLTVLPPLLTDEMIAQYTSALLAGTITSGWTFGAGAALQIPFAMQMAYRFNGIGVTQNVLYENQKLIANQFNSAIGKIQDSLSSTASALGKLQDVVNQNAQALNTLVKQLSSNFGCISSVLNDILSRLDKVEAEVQIDCLITGRLQSLQTYVTQQLIRAAEIRASANLAATKMSECVLGQSKRVDFCGKGYHLMSFPQSAPHGVVFLHVTYVPAQEKNFTTAPAICHDGKAHFPREGVFVSNGTHWFVTQRNFYEPQIITTDNTFVSGNCDVVIGIVNNTVYDPLQPELDSGGGGSDIIKLLNEQVNKEMQSSNLYMSMSSWCYTHSLDGAGLFLFDHAAEEYEHAKKLIIFLNENNVPVQLTSISAPEHKFEGLTQIFQKAYEHEQHISESINNIVDHAIKSKDHATFNFLQWYVAEQHEEEVLFKDILDKIELIGNENHGLYLADQYVKGIAKSRKS

SEQ ID NO: 9469 - protein, 1315 aa, Artificial Sequence
  SARS-CoV-2/USA/CruiseA-23/2020__EPI_ISL_414482 spike protein (1-1147)(A972C_R995C) Ferritin construct
MFVFLVLLPLVSSQCVNLTTRTQLPPAYTNSFTRGVYYPDKVFRSSVLHSTQDLFLPFFSNVTWFHAIHVSGTNGTKRFDNPVLPFNDGVYFASTEKSNIIRGWIFGTTLDSKTQSLLIVNNATNVVIKVCEFQFCNDPFLGVYYHKNNKSWMESEFRVYSSANNCTFEYVSQPFLMDLEVKQGNFKNLREFVFKNIDGYFKIYSKHTPINLVRDLPQGFSALEPLVDLPIGINITRFQTLLALHRSYLTPGDSSSGWTAGAAAYYVGYLQPRTFLLKYNENGTITDAVDCALDPLSETKCTLKSFTVEKGIYQTSNFRVQPTESIVRFPNITNLCPFGEVFNATRFASVYAWNRKRISNCVADYSVLYNSASFSTFKCYGVSPTKLNDLCFTNVYADSFVIRGDEVRQIAPGQTGKIADYNYKLPDDFTGCVIAWNSNNLDSKVGGNYNYLYRLFRKSNLKPFERDISTEIYQAGSTPCNGVEGFNCYFPLQSYGFQPTNGVGYQPYRVVVLSFELLHAPATVCGPKKSTNLVKNKCVNFNFNGLTGTGVLTESNKKFLPFQQFGRDIADTTDAVRDPQTLEILDITPCSFGGVSVITPGTNTSNQVAVLYQDVNCTEVPVAIHADQLTPTWRVYSTGSNVFQTRAGCLIGAEHVNNSYECDIPIGAGICASYQTQTNSPRRARSVASQSIIAYTMSLGAENSVAYSNNSIAIPTNFTISVTTEILPVSMTKTSVDCTMYICGDSTECSNLLLQYGSFCTQLNRALTGIAVEQDKNTQEVFAQVKQIYKTPPIKDFGGFNFSQILPDPSKPSKRSFIEDLLFNKVTLADAGFIKQYGDCLGDIAARDLICAQKFNGLTVLPPLLTDEMIAQYTSALLAGTITSGWTFGAGAALQIPFAMQMAYRFNGIGVTQNVLYENQKLIANQFNSAIGKIQDSLSSTASALGKLQDVVNQNAQALNTLVKQLSSNFGCISSVLNDILSRLDKVEAEVQIDCLITGRLQSLQTYVTQQLIRAAEIRASANLAATKMSECVLGQSKRVDFCGKGYHLMSFPQSAPHGVVFLHVTYVPAQEKNFTTAPAICHDGKAHFPREGVFVSNGTHWFVTQRNFYEPQIITTDNTFVSGNCDVVIGIVNNTVYDPLQPELDSGGGGSDIIKLLNEQVNKEMQSSNLYMSMSSWCYTHSLDGAGLFLFDHAAEEYEHAKKLIIFLNENNVPVQLTSISAPEHKFEGLTQIFQKAYEHEQHISESINNIVDHAIKSKDHATFNFLQWYVAEQHEEEVLFKDILDKIELIGNENHGLYLADQYVKGIAKSRKS

SEQ ID NO: 9470 - protein, 1315 aa, Artificial Sequence
  SARS-CoV-2/Hong Kong/case85_VM20002868/2020__EPI_ISL_414519 spike protein (1-1147)(A972C_R995C) Ferritin construct
MFVFLVLVPLVSSQCVNLTTRTQLPPAYTNSFTRGVYYPDKVFRSSVLHSTQDLFLPFFSNVTWFHAIHVSGTNGTKRFDNPVLPFNDGVYFASTEKSNIIRGWIFGTTLDSKTQSLLIVNNATNVVIKVCEFQFCNDPFLGVYYHKNNKSWMESEFRVYSSANNCTFEYVSQPFLMDLEGKQGNFKNLREFVFKNIDGYFKIYSKHTPINLVRDLPQGFSALEPLVDLPIGINITRFQTLLALHRSYLTPGDSSSGWTAGAAAYYVGYLQPRTFLLKYNENGTITDAVDCALDPLSETKCTLKSFTVEKGIYQTSNFRVQPTESIVRFPNITNLCPFGEVFNATRFASVYAWNRKRISNCVADYSVLYNSASFSTFKCYGVSPTKLNDLCFTNVYADSFVIRGDEVRQIAPGQTGKIADYNYKLPDDFTGCVIAWNSNNLDSKVGGNYNYLYRLFRKSNLKPFERDISTEIYQAGSTPCNGVEGFNCYFPLQSYGFQPTNGVGYQPYRVVVLSFELLHAPATVCGPKKSTNLVKNKCVNFNFNGLTGTGVLTESNKKFLPFQQFGRDIADTTDAVRDPQTLEILDITPCSFGGVSVITPGTNTSNQVAVLYQDVNCTEVPVAIHADQLTPTWRVYSTGSNVFQTRAGCLIGAEHVNNSYECDIPIGAGICASYQTQTNSPRRARSVASQSIIAYTMSLGAENSVAYSNNSIAIPTNFTISVTTEILPVSMTKTSVDCTMYICGDSTECSNLLLQYGSFCTQLNRALTGIAVEQDKNTQEVFAQVKQIYKTPPIKDFGGFNFSQILPDPSKPSKRSFIEDLLFNKVTLADAGFIKQYGDCLGDIAARDLICAQKFNGLTVLPPLLTDEMIAQYTSALLAGTITSGWTFGAGAALQIPFAMQMAYRFNGIGVTQNVLYENQKLIANQFNSAIGKIQDSLSSTASALGKLQDVVNQNAQALNTLVKQLSSNFGCISSVLNDILSRLDKVEAEVQIDCLITGRLQSLQTYVTQQLIRAAEIRASANLAATKMSECVLGQSKRVDFCGKGYHLMSFPQSAPHGVVFLHVTYVPAQEKNFTTAPAICHDGKAHFPREGVFVSNGTHWFVTQRNFYEPQIITTDNTFVSGNCDVVIGIVNNTVYDPLQPELDSGGGGSDIIKLLNEQVNKEMQSSNLYMSMSSWCYTHSLDGAGLFLFDHAAEEYEHAKKLIIFLNENNVPVQLTSISAPEHKFEGLTQIFQKAYEHEQHISESINNIVDHAIKSKDHATFNFLQWYVAEQHEEEVLFKDILDKIELIGNENHGLYLADQYVKGIAKSRKS

SEQ ID NO: 9471 - protein, 1315 aa, Artificial Sequence; identical to SEQ ID NO: 9461
  SARS-CoV-2/England/200990660/2020__EPI_ISL_414523 spike protein (1-1147)(A972C_R995C) Ferritin construct

SEQ ID NO: 9472 - protein, 1315 aa, Artificial Sequence
  SARS-CoV-2/Australia/NSW09/2020__EPI_ISL_413595 spike protein (1-1147)(A972C_R995C) Ferritin construct
MFVFLVLLPLVSSQCVNLTTRTQLPPAYTNSFTRGVYYPDKVFRSSVLHSTQDLFLPFFSNVTWFHAIHVSGTNGTKRFDNPVLPFNDGVYFASTEKSNIIRGWIFGTTLDSKTQSLLIVNNATNVVIKVCEFQFCNDPFLGVYYHKNNKSWMESEFRVYSSANNCTFEYVSQPFLMDLEGKQGNFKNLREFVFKNIDGYFKIYSKHTPINLVRDLPQGFSALEPLVDLPIGINITRFQTLLALHRSYLTPGDSSSGWTAGAAAYYVGYLQPRTFLLKYNENGTITDAVDCALDPLSETKCTLKSFTVEKGIYQTSNFRVQPTESIVRFPNITNLCPFGEVFNATRFASVYAWNRKRISNCVADYSVLYNSASFSTFKCYGVSPTKLNDLCFTNVYADSFVIRGDEVRQIAPGQTGKIADYNYKLPDDFTGCVIAWNSNNLDSKVGGNYNYLYRLFRKSNLKPFERDISTEIYQAGSTPCNGVEGFNCYFPLQSYGFQPTNGVGYQPYRVVVLSFELLHAPATVCGPKKSTNLVKNKCVNFNFNGLTGTGVLTESNKKFLPFQQFGRDIADTTDAVRDPQTLEILDITPCSFGGVSVITPGTNTSNQVAVLYQDVNCTEVPVAIHADQLTPTWRVYSTGSNVFQTRAGCLIGAEHVNNSYECDIPIGAGICASYQTQTNSPRRARSVASQSIIAYTMSLGAENSVAYSNNSIAIPTNFTISVTTEILPVSMTKTSVDCTMYICGDSTECSNLLLQYGSFCTQLNRALTGIAVEQDKNTQEVFAQVKQIYKTPPIKDFGGFNFSQILPDPSKPSKRSFIEDLLFNKVTLADAGFIKQYGDCLGDIAARDLICAQKFNGLTVLPPLLTDEMIAQYTSALLAGTITSGWTFGAGAALQIPFAMQMAYRFNGIGVTQNVLYENQKLIANQFNSAIGKIQDSLSFTASALGKLQDVVNQNAQALNTLVKQLSSNFGCISSVLNDILSRLDKVEAEVQIDCLITGRLQSLQTYVTQQLIRAAEIRASANLAATKMSECVLGQSKRVDFCGKGYHLMSFPQSAPHGVVFLHVTYVPAQEKNFTTAPAICHDGKAHFPREGVFVSNGTHWFVTQRNFYEPQIITTDNTFVSGNCDVVIGIVNNTVYDPLQPELDSGGGGSDIIKLLNEQVNKEMQSSNLYMSMSSWCYTHSLDGAGLFLFDHAAEEYEHAKKLIIFLNENNVPVQLTSISAPEHKFEGLTQIFQKAYEHEQHISESINNIVDHAIKSKDHATFNFLQWYVAEQHEEEVLFKDILDKIELIGNENHGLYLADQYVKGIAKSRKS

SEQ ID NO: 9473 - protein, 1315 aa, Artificial Sequence; identical to SEQ ID NO: 9453
  SARS-CoV-2/Australia/NSW10/2020__EPI_ISL_413596 spike protein (1-1147)(A972C_R995C) Ferritin construct

SEQ ID NO: 9474 - protein, 1315 aa, Artificial Sequence
  SARS-CoV-2/Switzerland/1000477797/2020__EPI_ISL_413023 spike protein (1-1147)(A972C_R995C) Ferritin construct
MFVFLVLLPLVSSQCVNLTTRTQLPPAYTNSFTRGVYYPDKVFRSSVLHSTQDLFLPFFSNVTWFHAIHVSGTNGTKRFDNPVLPFNDGVYFASTEKSNIIRGWIFGTTLDSKTQSLLIVNNATNVVIKVCEFQFCNDPFLGVYYHKNNKSWMESEFRVYSSANNCTFEYVSQPFLMDLEGKQGNFKNLREFVFKNIDGYFNIYSKHTPINLVRDLPQGFSALEPLVDLPIGINITRFQTLLALHRSYLTPGDSSSGWTAGAAAYYVGYLQPRTFLLKYNENGTITDAVDCALDPLSETKCTLKSFTVEKGIYQTSNFRVQPTESIVRFPNITNLCPFGEVFNATRFASVYAWNRKRISNCVADYSVLYNSASFSTFKCYGVSPTKLNDLCFTNVYADSFVIRGDEVRQIAPGQTGKIADYNYKLPDDFTGCVIAWNSNNLDSKVGGNYNYLYRLFRKSNLKPFERDISTEIYQAGSTPCNGVEGFNCYFPLQSYGFQPTNGVGYQPYRVVVLSFELLHAPATVCGPKKSTNLVKNKCVNFNFNGLTGTGVLTESNKKFLPFQQFGRDIADTTDAVRDPQTLEILDITPCSFGGVSVITPGTNTSNQVAVLYQGVNCTEVPVAIHADQLTPTWRVYSTGSNVFQTRAGCLIGAEHVNNSYECDIPIGAGICASYQTQTNSPRRARSVASQSIIAYTMSLGAENSVAYSNNSIAIPTNFTISVTTEILPVSMTKTSVDCTMYICGDSTECSNLLLQYGSFCTQLNRALTGIAVEQDKNTQEVFAQVKQIYKTPPIKDFGGFNFSQILPDPSKPSKRSFIEDLLFNKVTLADAGFIKQYGDCLGDIAARDLICAQKFNGLTVLPPLLTDEMIAQYTSALLAGTITSGWTFGAGAALQIPFAMQMAYRFNGIGVTQNVLYENQKLIANQFNSAIGKIQDSLSSTASALGKLQDVVNQNAQALNTLVKQLSSNFGCISSVLNDILSRLDKVEAEVQIDCLITGRLQSLQTYVTQQLIRAAEIRASANLAATKMSECVLGQSKRVDFCGKGYHLMSFPQSAPHGVVFLHVTYVPAQEKNFTTAPAICHDGKAHFPREGVFVSNGTHWFVTQRNFYEPQIITTDNTFVSGNCDVVIGIVNNTVYDPLQPELDSGGGGSDIIKLLNEQVNKEMQSSNLYMSMSSWCYTHSLDGAGLFLFDHAAEEYEHAKKLIIFLNENNVPVQLTSISAPEHKFEGLTQIFQKAYEHEQHISESINNIVDHAIKSKDHATFNFLQWYVAEQHEEEVLFKDILDKIELIGNENHGLYLADQYVKGIAKSRKS

SEQ ID NO: 9475 - protein, 1315 aa, Artificial Sequence
  SARS-CoV-2/Belgium/BA-02291/2020__EPI_ISL_415159 spike protein (1-1147)(A972C_R995C) Ferritin construct
MFVFLVLLPLVSSQCVNLTTRTQLPPAYTNSFTRGVYYPDKVFRSSVLHSTQDLFLPFFSNVTWFHAIHVSGTNGTKRFDNPVLPFNDGVYFASTEKSNIIRGWIFGTTLDSKTQSLLIVNNATNVVIKVCEFQFCNDPFLGVYYHKNNKSWMESEFRVYSSANNCTFEYVSQPFLMDLEGKQGNFKNLREFVFKNIDGYFKIYSKHTPINLVRDLPQGFSALEPLVDLPIGINITRFQTLLALHRSYLTPGDSSSGWTAGAAAYYVGYLQPRTFLLKYNENGTITDAVDCALDPLSETKCTLKSFTVEKGIYQTSNFRVQPTESIVRFPNITNLCPFGEVFNATRFASVYAWNRKRISNCVADYSVLYNSASFSTFKCYGVSPTKLNDLCFTNVYADSFVIRGDEVRQIAPGQTGKIADYNYKLPDDFTGCVIAWNSNNLDSKVGGNYNYLYRLFRRSNLKPFERDISTEIYQAGSTPCNGVEGFNCYFPLQSYGFQPTNGVGYQPYRVVVLSFELLPAPATVCGPKKSTNLVKNKCVNFNFNGLTGTGVLTESNKKFLPFQQFGRDIADTTDAVRDPQTLEILDITPCSFGGVSVITPGTNTSNQVAVLYQGVNCTEVPVAIHADQLTPTWRVYSTGSNVFQTRAGCLIGAEHVNNSYECDIPIGAGICASYQTQTNSPRRARSVASQSIIAYTMSLGAENSVAYSNNSIAIPTNFTISVTTEILPVSMTKTSVDCTMYICGDSTECSNLLLQYGSFCTQLNRALTGIAVEQDKNTQEVFAQVKQIYKTPPIKDFGGFNFSQILPDPSKPSKRSFIEDLLFNKVTLADAGFIKQYGDCLGDIAARDLICAQKFNGLTVLPPLLTDEMIAQYTSALLAGTITSGWTFGAGAALQIPFAMQMAYRFNGIGVTQNVLYENQKLIANQFNSAIGKIQDSLSSAAPALGKLQDVVNQNAQALNTLVKQLSSNFGCISSVLNDILSRLDKVEAEVQIDCLITGRLQSLQTYVTQQLIRAAEIRASANLAATKMSECVLGQSKRVDFCGKGYHLMSFPQSAPHGVVFLHVTYVPAQEKNFTTAPAICHDGKAHFPREGVFVSNGTHWFVTQRNFYEPQIITTDNTFVSGNCDVVIGIVNNTVYDPLQPELDSGGGGSDIIKLLNEQVNKEMQSSNLYMSMSSWCYTHSLDGAGLFLFDHAAEEYEHAKKLIIFLNENNVPVQLTSISAPEHKFEGLTQIFQKAYEHEQHISESINNIVDHAIKSKDHATFNFLQWYVAEQHEEEVLFKDILDKIELIGNENHGLYLADQYVKGIAKSRKS

SEQ ID NO: 9476 - protein, 1315 aa, Artificial Sequence
  SARS-CoV-2/USA/WA8-UW5/2020__EPI_ISL_413486 spike protein (1-1147)(A972C_R995C) Ferritin construct
MFVFLVLLPLVSSQCVNLTTRTQLPPAYTNSFTRGVYYPDKVFRSSVLHSTQDLFLPFFSNVTWFHAIHVSGTNGTKRFDNPVLPFNDGVYFASTEKSNIIRGWIFGTTLDSKTQSLLIVNNATNVVIKVCEFQFCNDPFLGVYYHKNNKSWMESEFRVYSSANNCTFEYVSQPFLMDLEGKQGNFKNLREFVFKNIDGYFKIYSKHTPINLVRDLPQGFSALEPLVDLPIGINITRFQTLLALHRSYLTPGDSSSGWTAGAAAYYVGYLQPRTFLLKYNENGTITDAVDCALDPLSETKCTLKSFTVEKGIYQTSNFRVQPTESIVRFPNITNLCPFGEVFNATRFASVYAWNRKRISNCVADYSVLYNSASFSTFKCYGVSPTKLNDLCFTNVYADSFVIRGDEVRQIAPGQTGKIADYNYKLPDDFTGCVIAWNSNNLDSKVGGNYNYLYRLFRKSNLKPFERDISTEIYQAGSTPCNGVEGFNCYFPLQSYGFQPTNGVGYQPYRVVVLSFELLHAPATVCGPKKSTNLVKNKCVNFNFNGLTGTGVLTESNKKFLPFQQFGRDIADTTDAVRDPQTLEILDITPCSFGGVSVITPGTNTSNQVAVLYQDVNCTEVPVAIHADQLTPTWRVYSTGSNVFQTRAGCLIGAEYVNNSYECDIPIGAGICASYQTQTNSPRRARSVASQSIIAYTMSLGAENSVAYSNNSIAIPTNFTISVTTEILPVSMTKTSVDCTMYICGDSTECSNLLLQYGSFCTQLNRALTGIAVEQDKNTQEVFAQVKQIYKTPPIKDFGGFNFSQILPDPSKPSKRSFIEDLLFNKVTLADAGFIKQYGDCLGDIAARDLICAQKFNGLTVLPPLLTDEMIAQYTSALLAGTITSGWTFGAGAALQIPFAMQMAYRFNGIGVTQNVLYENQKLIANQFNSAIGKIQDSLSSTASALGKLQDVVNQNAQALNTLVKQLSSNFGCISSVLNDILSRLDKVEAEVQIDCLITGRLQSLQTYVTQQLIRAAEIRASANLAATKMSECVLGQSKRVDFCGKGYHLMSFPQSAPHGVVFLHVTYVPAQEKNFTTAPAICHDGKAHFPREGVFVSNGTHWFVTQRNFYEPQIITTDNTFVSGNCDVVIGIVNNTVYDPLQPELDSGGGGSDIIKLLNEQVNKEMQSSNLYMSMSSWCYTHSLDGAGLFLFDHAAEEYEHAKKLIIFLNENNVPVQLTSISAPEHKFEGLTQIFQKAYEHEQHISESINNIVDHAIKSKDHATFNFLQWYVAEQHEEEVLFKDILDKIELIGNENHGLYLADQYVKGIAKSRKS

SEQ ID NO: 9477 - protein, 1315 aa, Artificial Sequence
  SARS-CoV-2/England/20102000506/2020__EPI_ISL_415147 spike protein (1-1147)(A972C_R995C) Ferritin construct
MFVFLVLLPLVSSQCVNLTTRTQLPPAYTNSFTRGVYYPDKVFRSSVLHSTQDLFLPFFSNVTWFHAIHVSGTNGTKRFDNPVLPFNDGVYFASTEKSNIIRGWIFGTTLDSKTQSLLIVNNATNVVIKVCEFQFCNDPFLGVYYHKNNKSWMESEFRVYSSANNCTFEYVSQPFLMDLEGKQGNFKNLREFVFKNIDGYFKIYSKHTPINLVRDLPQGFSALEPLVDLPIGINITRFQTLLALHRSYLTPGDSSSGWTAGAAAYYVGYLQPRTFLLKYNENGTITDAVDCALDPLSETKCTLKSFTVEKGIYQTSNFRVQPTESIVRFPNITNLCPFGEVFNATRFASVYAWNRKRISNCVADYSVLYNSASFSTFKCYGVSPTKLNDLCFTNVYADSFVIRGDEVRQIAPGQTGKIADYNYKLPDDFTGCVIAWNSNNLDSKVGGNYNYLYRLFRKSNLKPFERDISTEIYQAGSTPCNGVEGFNCYFPLQSYGFQPTNGVGYQPYRVVVLSFELLHAPATVCGPKKSTNLVKNKCVNFNFNGLTGTGVLTESNKKFLPFQQFGRDIADTTDAVRDPQTLEILDITPCSFGGVSVITPGTNTSNQVAVLYQGVNCTEVPVAIHADQLTPTWRVYSTGSNVFQTRAGCLIGAEHVNNSYECDIPIGAGICASYQTQTNSPRRARSVASQSIIAYTMSLGAENSVAYSNNSIAIPTNFTISVTTEILPVSMTKTSVDCTMYICGDSTECSNLLLQYGSFCTQLNRALTGIAVEQDKNTQEVFAQVKQIYKTPPIKDFGGFNFSQILPDPSKPSKRSFIEDLLFNKVTLADAGFIKQYGYCLGDIAARDLICAQKFNGLTVLPPLLTDEMIAQYTSALLAGTITSGWTFGAGAALQIPFAMQMAYRFNGIGVTQNVLYENQKLIANQFNSAIGKIQDSLSSTASALGKLQDVVNQNAQALNTLVKQLSSNFGCISSVLNDILSRLDKVEAEVQIDCLITGRLQSLQTYVTQQLIRAAEIRASANLAATKMSECVLGQSKRVDFCGKGYHLMSFPQSAPHGVVFLHVTYVPAQEKNFTTAPAICHDGKAHFPREGVFVSNGTHWFVTQRNFYEPQIITTDNTFVSGNCDVVIGIVNNTVYDPLQPELDSGGGGSDIIKLLNEQVNKEMQSSNLYMSMSSWCYTHSLDGAGLFLFDHAAEEYEHAKKLIIFLNENNVPVQLTSISAPEHKFEGLTQIFQKAYEHEQHISESINNIVDHAIKSKDHATFNFLQWYVAEQHEEEVLFKDILDKIELIGNENHGLYLADQYVKGIAKSRKS

SEQ ID NO: 9478 - protein, 1315 aa, Artificial Sequence
  SARS-CoV-2/Belgium/VAG-03013/2020__EPI_ISL_415155 spike protein (1-1147)(A972C_R995C) Ferritin construct
MFVFLVLLPLVSSQCVNLTTRTQLPPAYTNSFTRGVYYPDKVFRSSVLHSTQDLFLPFFSNVTWFHAIHVSGTNGTKRFDNPVLPFNDGVYFASTEKSNIIRGWIFGTTLDSKTQSLLIVNNATNVVIKVCEFQFCNDPFLGVYYHKNNKSWMESEFRVYSSANNCTFEYVSQPFLMDLEGKQGNFKNLREFVFKNIDGYFKIYSKHTPINLVRDLPQGFSALEPLVDLPIGINITRFQTLLALHRSYLTPGDSSSGWTAGAAAYYVGYLQPRTFLLKYNENGTITDAVDCALDPLSETKCTLKSFTVEKGIYQTSNFRVQPTESIVRFPNITNLCPFGEVFNATRFASVYAWNRKRISNCVADYSVLYNSASFSTFKCYGVSPTKLNDLCFTNVYADSFVIRGDEVRQIAPGQTGKIADYNYKLPDDFTGCVIAWNSNNLDSKVGGNYNYLYRLFRKSNLKPFERDISTEIYQAGSTPCNGVEGFNCYFPLQSYGFQPTNGVGYQPYRVVVLSFELLHAPATVCGPKKSTNLVKNKCVNFNFNGLTGTGVLTESNKKFLPFQQFGRDIADTTDAVRDPQTLEILDITPCSFGGVSVITPGTNTSNQVAVLYQGVNCTEVPVAIHADQLTPTWRVYSTGSNVFQTRAGCLIGAEHVNNSYECDIPIGAGICASYQTQTNSPRRARSVASQSIIAYTMSLGAENSVAYSNNSIAIPTNFTISVTTEILPVSMTKTSVDCTMYICGDSTECSNLLLQYGSFCTQLNRALTGIAVEQDKNTQEVFAQVKQIYKTPPIKDFGGFNFSQILPDPSKPSKRSFIEDLLFNKVTLADAGFIKQYGDCLGDIAARDLICAQKFNGLTVLPPLLTDEMIAQYTSALLAGTITSGWTFGAGAALQIPFAMQMAYRFNGIGVTQNVLYENQKLIANQFNSAIGKIQDSLSSTATALGKLQDVVNQNAQALNTLVKQLSSNFGCISSVLNDILSRLDKVEAEVQIDCLITGRLQSLQTYVTQQLIRAAEIRASANLAATKMSECVLGQSKRVDFCGKGYHLMSFPQSAPHGVVFLHVTYVPAQEKNFTTAPAICHDGKAHFPREGVFVSNGTHWFVTQRNFYEPQIITTDNTFVSGNCDVVIGIVNNTVYDPLQPELDSGGGGSDIIKLLNEQVNKEMQSSNLYMSMSSWCYTHSLDGAGLFLFDHAAEEYEHAKKLIIFLNENNVPVQLTSISAPEHKFEGLTQIFQKAYEHEQHISESINNIVDHAIKSKDHATFNFLQWYVAEQHEEEVLFKDILDKIELIGNENHGLYLADQYVKGIAKSRKS

SEQ ID NO: 9479 - protein, 1315 aa, Artificial Sequence
  SARS-CoV-2/Belgium/BC-03016/2020__EPI_ISL_415157 spike protein (1-1147)(A972C_R995C) Ferritin construct
MFVFLVLLPLVSSQCVNLTTRTQLPPAYTNSFTRGVYYPDKVFRSSVLHSTQDLFLPFFSNVTWFHAIHVSGTNGTKRFDNPVLPFNDGVYFASTEKSNIIRGWIFGTTLDSKTQSLLIVNNATNVVIKVCEFQFCNDPFLGVYYHKNNKSWMESEFRVYSSANNCTFEYVSQPFLMDLEGKQGNFKNLREFVFKNIDGYFKIYSKHTPINLVRDLPQGFSALEPLVDLPIGINITRFQTLLALHRSYLTPGDSSSGWTAGAAAYYVGYLQPRTFLLKYNENGTITDAVDCALDPLSETKCTLKSFTVEKGIYQTSNFRVQPTESIVRFPNITNLCPFGEVFNATRFASVYAWNRKRISNCVADYSVLYNSASFSTFKCYGVSPTKLNDLCFTNVYADSFVIRGDEVRQIAPGQTGKIADYNYKLPDDFTGCVIAWNSNNLDSKVGGNYNYLYRLFRKSNLKPFERDISTEIYQAGSTPCNGVEGFNCYFPLQSYGFQPTNGVGYQPYRVVVLSFELLHAPATVCGPKKSTNLVKNKCVNFNFNGLTGTGVLTESNKKFLPFQQFGRDIADTTDAVRDPQTLEILDITPCSFGGVSVITPGTNTSNQVAVLYQGVNCTEVPVAIHADQLTPTWRVYSTGSNVFQTRAGCLIGAEHVNNSYECDIPIGAGICASYQTQTNSPRRARSVASQSIIAYTMSLGAENSVAYSNNSIAIPTNFTISVTTEILPVSMTKTSVDCTMYICGDSTECSNLLLQYGSFCTQLNRALTGIAVEQDKNTQEVFAQVKQIYKTPPIKDFGGFNFSQILPDPSKPSKRSFIEDLLFNKVTLADAGFIKQYGDCLGDIAARDLICAQKFNGLTVLPPLLTDEMIAQYTSALLAGTITSGWTFGAGAALQIPFAMQMAYRFNGIGVTQNVLYENQKLIANQFNSAIGKIQDSLSSTAPALGKLQDVVNQNAQALNTLVKQLSSNFGCISSVLNDILSRLDKVEAEVQIDCLITGRLQSLQTYVTQQLIRAAEIRASANLAATKMSECVLGQSKRVDFCGKGYHLMSFPQSAPHGVVFLHVTYVPAQEKNFTTAPAICHDGKAHFPREGVFVSNGTHWFVTQRNFYEPQIITTDNTFVSGNCDVVIGIVNNTVYDPLQPELDSGGGGSDIIKLLNEQVNKEMQSSNLYMSMSSWCYTHSLDGAGLFLFDHAAEEYEHAKKLIIFLNENNVPVQLTSISAPEHKFEGLTQIFQKAYEHEQHISESINNIVDHAIKSKDHATFNFLQWYVAEQHEEEVLFKDILDKIELIGNENHGLYLADQYVKGIAKSRKS

SEQ ID NO: 9480 - protein, 1315 aa, Artificial Sequence
  SARS-CoV-2/Germany/BavPat3/2020__EPI_ISL_414521 spike protein (1-1147)(A972C_R995C) Ferritin construct
MFVFLVLLPLVSSQCVNLTTRTQLPPAYTNSFTRGVYYPDKVFRSSVLHSTQDLFLPFFSNVTWFHAIHVSGTNGTKRFDNPVLPFNDGVYFASTEKSNIIRGWIFGTTLDSKTQSLLIVNNATNVVIKVCEFQFCNDPFLGVYYHKNNKSWMESEFRVYSSANNCTFEYVSQPFLMDLEGKQGNFKNLREFVFKNIDGYFKIYSKHTPINLVRDLPQGFSALEPLVDLPIGINITRFQTLLALHRSYLTPGDSSSGWTAGAAAYYVGYLQPRTFLLKYNENGTITDAVDCALDPLSETKCTLKSFTVEKGIYQTSNFRVQPTESIVRFPNITNLCPFGEVFNATRFASVYAWNRKRISNCVADYSVLYNSASFSTFKCYGVSPTKLNDLCFTNVYADSFVIRGDEVRQIAPGQTGKIADYNYKLPDDFTGCVIAWNSNNLDSKVGGNYNYLYRLFRKSNLKPFERDISTEIYQAGSTPCNGVEGFNCYFPLQSYGFQPTNGVGYQPYRVVVLSFELLHAPATVCGPKKSTNLVKNKCVNFNFNGLTGTGVLTESNKKFLPFQQFGRDIADTTDAVRDPQTLEILDITPCSFGGVSVITPGTNTSNQVAVLYQDVNCTEVPVAIHADQLTPTWRVYSTGSNVFQTRAGCLIGAEHVNNSYECDIPIGAGICASYQTQTNSPRRARSVASQSIIAYTMSLGAENSVAYSNNSIAIPTNFTISVTTEILPVSMTKTSVDCTMYICGDSTECSNLLLQYGSFCTQLNRALTGIAVEQDKNTQQVFAQVKQIYKTPPIKDFGGFNFSQILPDPSKPSKRSFIEDLLFNKVTLADAGFIKQYGDCLGDIAARDLICAQKFNGLTVLPPLLTDEMIAQYTSALLAGTITSGWTFGAGAALQIPFAMQMAYRFNGIGVTQNVLYENQKLIANQFNSAIGKIQDSLSSTASALGKLQDVVNQNAQALNTLVKQLSSNFGCISSVLNDILSRLDKVEAEVQIDCLITGRLQSLQTYVTQQLIRAAEIRASANLAATKMSECVLGQSKRVDFCGKGYHLMSFPQSAPHGVVFLHVTYVPAQEKNFTTAPAICHDGKAHFPREGVFVSNGTHWFVTQRNFYEPQIITTDNTFVSGNCDVVIGIVNNTVYDPLQPELDSGGGGSDIIKLLNEQVNKEMQSSNLYMSMSSWCYTHSLDGAGLFLFDHAAEEYEHAKKLIIFLNENNVPVQLTSISAPEHKFEGLTQIFQKAYEHEQHISESINNIVDHAIKSKDHATFNFLQWYVAEQHEEEVLFKDILDKIELIGNENHGLYLADQYVKGIAKSRKS

SEQ ID NO: 9481 - protein, 1315 aa, Artificial Sequence
  SARS-CoV-2/France/HF1805/2020__EPI_ISL_414628 spike protein (1-1147)(A972C_R995C) Ferritin construct
MFVFLVLLPLVSSQCVNLTTRTQLPPAYTNSFTRGVYYPDKVFRSSVLHSTQDLFLPFFSNVTWFHAIHVSGTNGTKRFDNPVLPFNDGVYFASTEKSNIIRGWIFGTTLDSKTQSLLIVNNATNVVIKVCEFQFCNDPFLGVYYHKNNKSWMESEFRVYSSANNCTFEYVSQPFLMDLEGKQGNFKNLREFVFKNIDGYFKIYSKHTPINLVRDLPQGFSALEPLVDLPIGINITRFQTLLALHRSYLTPGDSSSGWTAGAAAYYVGYLQPRTFLLKYNENGTITDAVDCALDPLSETKCTLKSFTVEKGIYQTSNFRVQPTESIVRFPNITNLCPFGEVFNATRFASVYAWNRKRISNCVADYSVLYNSASFSTFKCYGVSPTKLNDLCFTNVYADSFVIRGDEVRQIAPGQTGKIADYNYKLPDDFTGCVIAWNSNNLDSKVGGNYNYLYRLFRKSNLKPFERDISTEIYQAGSTPCNGVEGFNCYFPLQSYGFQPTNGVGYQPYRVVVLSFELLHAPATVCGPKKSTNLVKNKCVNFNFNGLTGTGVLTESNKKFLPFQQFGRDIADTTDAVRDPQTLEILDITPCSFGGVSVITPGTNTSNQVAVLYQGVNCTEVPVAIHADQLTPTWRVYSTGSNVFQTRAGCLIGAEHVNNSYECDIPIGAGICASYQTQTNSPRRARSVASQSIIAYTMSLGAENSVAYSNNSIAIPTNFTISVTTEILPVSMTKTSVDCTMYICGDSTECSNLLLQYGSFCTQLNRALTGIAVEQDKNTQEVFAQVKQIYKTPPIKDFGGFNFSQILPDPSKPSKRSFIEDLLFNKVTLADAGFIKQYGDCLGDIAARDLICAQKFNGLTVLPPLLTDEMIAQYTSALLAGTITSGWTFGAGAALQIPFAMQMAYRFNGIGVTQNVLYENQKLIANQFNSAIGKIQDSLSSTASALGKLQDVVNQNAQALNTLVKQLSSNFGCISSVLNDILSRLDKVEAEVQIDCLITGRLQSLQTYVTQQLIRAAEIRASANLAATKMSECVLGQSKRVDFCGKGYHLMSFPQSAPHGVVFLHVTYVPAQEKNFTTAPAICHDGKAHFPREGVFVSNGTHWFVTQRNFYEPQIITTDNTFVSGNCDVVIGVVNNTVYDPLQPELDSGGGGSDIIKLLNEQVNKEMQSSNLYMSMSSWCYTHSLDGAGLFLFDHAAEEYEHAKKLIIFLNENNVPVQLTSISAPEHKFEGLTQIFQKAYEHEQHISESINNIVDHAIKSKDHATFNFLQWYVAEQHEEEVLFKDILDKIELIGNENHGLYLADQYVKGIAKSRKS

SEQ ID NO: 9482 - protein, 1315 aa, Artificial Sequence
  SARS-CoV-2/Netherlands/ZuidHolland_9/2020__EPI_ISL_414445 spike protein (1-1147)(A972C_R995C) Ferritin construct
MFVFLVLLPLVSSQCVNLTTRTQLPPAYTNSFTRGVYYPDKVFRSSVLHSTQDLFLPFFSNVTWFHAIHVSGTNGTKRFDNPVLPFNDGVYFASTEKSNIIRGWIFGTTLDSKTQSLLIVNNATNVVIKVCEFQFCNDPFLGVYYHKNNKSWMESEFRVYSSANNCTFEYVSQPFLMDLEGKQGNFKNLREFVFKNIDGYFKIYSKHTPINLVRDLPQGFSALEPLVDLPIGINITRFQTLLALHRSYLTPGDSSSGWTAGAAAYYVGYLQPRTFLLKYNENGTITDAVDCALDPLSETKCTLKSFTVEKGIYQTSNFRVQPTESIVRFPNITNLCPFGEVFNATRFASVYAWNRKRISNCVADYSVLYNSASFSTFKCYGVSPTKLNDLCFTNVYADSFVIRGDEVRQIAPGQTGKIADYNYKLPDDFTGCVIAWNSNNLDSKVGGNYNYLYRLFRKSNLKPFERDISTEIYQAGSTPCNGVEGFNCYFPLQSYGFQPTNGVGYQPYRVVVLSFELLHAPATVCGPKKSTNLVKNKCVNFNFNGLTGTGVLTESNKKFLPFQQFGRDIADTTDAVRDPQTLEILDITPCSFGGVSVITPGTNTSNQVAVLYQGVNCTEVPVAIHADQLTPTWRVYSTGSNVFQTRAGCLIGAEHVNNSYECDIPIGAGICASYQTQTNSPRRARSVASQSIIAYTMSLGAENSVAYSNNSIAIPTNFTISVTTEILPVSMTKTSVDCTMYICGDSTECSNLLLQYGSFCTQLNRALTGIAVEQDKNTQEVFAQVKQIYKTPPIKDFGGFNFSQILPDPSKPSKRSFIEDLLFNKVTLADAGFIKQYGDCLGDIAARDLICVQKFNGLTVLPPLLTDEMIAQYTSALLAGTITSGWTFGAGAALQIPFAMQMAYRFNGIGVTQNVLYENQKLIANQFNSAIGKIQDSLSSTASALGKLQDVVNQNAQALNTLVKQLSSNFGCISSVLNDILSRLDKVEAEVQIDCLITGRLQSLQTYVTQQLIRAAEIRASANLAATKMSECVLGQSKRVDFCGKGYHLMSFPQSAPHGVVFLHVTYVPAQEKNFTTAPAICHDGKAHFPREGVFVSNGTHWFVTQRNFYEPQIITTDNTFVSGNCDVVIGIVNNTVYDPLQPELDSGGGGSDIIKLLNEQVNKEMQSSNLYMSMSSWCYTHSLDGAGLFLFDHAAEEYEHAKKLIIFLNENNVPVQLTSISAPEHKFEGLTQIFQKAYEHEQHISESINNIVDHAIKSKDHATFNFLQWYVAEQHEEEVLFKDILDKIELIGNENHGLYLADQYVKGIAKSRKS

SEQ ID NO: 9483 - protein, 1315 aa, Artificial Sequence
  SARS-CoV-2/Finland/FIN03032020A/2020__EPI_ISL_413602 spike protein (1-1147)(A972C_R995C) Ferritin construct
MFVFLVLLPLVSSQCVNLTTRTQLPPAYTNSFTRGVYYPDKVFRSSVLHSTQDLFLPFFSNVTWFHAIHVSGTNGTKRFDNPVLPFNDGVYFASTEKSNIIRGWIFGTTLDSKTQSLLIVNNATNVVIKVCEFQFCNDPFLGVYYHKNNKSWMESEFRVYSSANNCTFEYVSQPFLMDLEGKQGNFKNLREFVFKNIDGYFKIYSKHTPINLVRDLPQGFSALEPLVDLPIGINITRFQTLLALHRSYLTPGDSSSGWTAGAAAYYVGYLQPRTFLLKYNENGTITDAVDCALDPLSETKCTLKSFTVEKGIYQTSNFRVQPTESIVRFPNITNLCPFGEVFNATRFASVYAWNRKRISNCVADYSVLYNSASFSTFKCYGVSPTKLNDLCFTNVYADSFVIRGDEVRQIAPGQTGKIADYNYKLPDDFTGCVISWNSNNLDSKVGGNYNYLYRLFRKSNLKPFERDISTEIYQAGSTPCNGVEGFNCYFPLQSYGFQPTNGVGYQPYRVVVLSFELLHAPATVCGPKKSTNLVKNKCVNFNFNGLTGTGVLTESNKKFLPFQQFGRDIADTTDAVRDPQTLEILDITPCSFGGVSVITPGTNTSNQVAVLYQGVNCTEVPVAIHADQLTPTWRVYSTGSNVFQTRAGCLIGAEHVNNSYECDIPIGAGICASYQTQTNSPRRARSVASQSIIAYTMSLGAENSVAYSNNSIAIPTNFTISVTTEILPVSMTKTSVDCTMYICGDSTECSNLLLQYGSFCTQLNRALTGIAVEQDKNTQEVFAQVKQIYKTPPIKDFGGFNFSQILPDPSKPSKRSFIEDLLFNKVTLADAGFIKQYGDCLGDIAARDLICAQKFNGLTVLPPLLTDEMIAQYTSALLAGTITSGWTFGAGAALQIPFAMQMAYRFNGIGVTQNVLYENQKLIANQFNSAIGKIQDSLSSTASALGKLQDVVNQNAQALNTLVKQLSSNFGCISSVLNDILSRLDKVEAEVQIDCLITGRLQSLQTYVTQQLIRAAEIRASANLAATKMSECVLGQSKRVDFCGKGYHLMSFPQSAPHGVVFLHVTYVPAQEKNFTTAPAICHDGKAHFPREGVFVSNGTHWFVTQRNFYEPQIITTDNTFVSGNCDVVIGIVNNTVYDPLQPELDSGGGGSDIIKLLNEQVNKEMQSSNLYMSMSSWCYTHSLDGAGLFLFDHAAEEYEHAKKLIIFLNENNVPVQLTSISAPEHKFEGLTQIFQKAYEHEQHISESINNIVDHAIKSKDHATFNFLQWYVAEQHEEEVLFKDILDKIELIGNENHGLYLADQYVKGIAKSRKS

SEQ ID NO: 9484 - protein, 1315 aa, Artificial Sequence
  SARS-CoV-2/France/GE1977/2020__EPI_ISL_414632 spike protein (1-1147)(A972C_R995C) Ferritin construct
MFVFLVLLPLVSSQCVNLTTRTQLPPAYTNSFTRGVYYPDKVFRSSVLHSTQDLFLPFFSNVTWFHAIHVSGTNGTKRFDNPVLPFNDGVYFASTEKSNIIRGWIFGTTLDSKTQSLLIVNNATNVVIKVCEFQFCNDPFLGVYYHKNNKSWMESEFRVYSSANNCTFEYVSQPFLMDLEGKQGNFKNLREFVFKNIDGYFKIYSKHTPINLVRDLPQGFSALEPLVDLPIGINITRFQTLLALHRSYLTPGDSSSGWTAGAAAYYVGYLQPRTFLLKYNENGTITDAVDCALDPLSETKCTLKSFTVEKGIYQTSNFRVQPTESIVRFPNITNLCPFGEVFNATRFASVYAWNRKRISNCVADYSVLYNSASFSTFKCYGVSPTKLNDLCFTNVYADSFVIRGDEVRQIAPGQTGKIADYNYKLPDDFTGCVIAWNSNNLDSKVGGNYNYLYRLFRKSNLKPFERDISTEIYQAGSTPCNGVEGFNCYFPLQSYGFQPTNGVGYQPYRVVVLSFELLHAPATVCGPKKSTNLVKNKCVNFNFNGLTGTGVLTESNKKFLPFQQFGRDIADTTDAVRDPQTLEILDITPCSFGGVSVITPGTNTSNQVAVLYQGVNCTEVPVAIHADQLTPTWRVYSTGSNVFQTRAGCLIGAEHVNNSYECDIPIGAGICASYQTQTNSPRRARSVASQSIIAYTMSLGAENSVAYSNNSIAIPTNFTISVTTEILPVSMTKTSVDCTMYICGDSTECSNLLLQYGSFCTQLNRALTGIAVEQDKNTQEVFAQVKQIYKTPPIKDFGGFNFSQILPDPSKPSKRSFIEDLLFNKVTLADAGFIKQYGDCLGDIAARDLICAQKFNGLTVLPPLLTDEMIAQYTSALLAGTITSGWTFGAGAALQIPFAMQMAYRFNGIGVTQNVLYENQKLIANQFNSAIGKIQDSLFSTASALGKLQDVVNQNAQALNTLVKQLSSNFGCISSVLNDILSRLDKVEAEVQIDCLITGRLQSLQTYVTQQLIRAAEIRASANLAATKMSECVLGQSKRVDFCGKGYHLMSFPQSAPHGVVFLHVTYVPAQEKNFTTAPAICHDGKAHFPREGVFVSNGTHWFVTQRNFYEPQIITTDNTFVSGNCDVVIGIVNNTVYDPLQPELDSGGGGSDIIKLLNEQVNKEMQSSNLYMSMSSWCYTHSLDGAGLFLFDHAAEEYEHAKKLIIFLNENNVPVQLTSISAPEHKFEGLTQIFQKAYEHEQHISESINNIVDHAIKSKDHATFNFLQWYVAEQHEEEVLFKDILDKIELIGNENHGLYLADQYVKGIAKSRKS

SEQ ID NO: 9485 - protein, 1315 aa, Artificial Sequence
  SARS-CoV-2/Finland/FIN-313/2020__EPI_ISL_414641 spike protein (1-1147)(A972C_R995C) Ferritin construct
MFVFLVLLPLVSSQCVNLTTRTQLPPAYTNSFTRGVYYPDKVFRSSVLHSTQDLFLPFFSNVTWFHAIHVSGTNGTKRFDNPVLPFNDGVYFASTEKSNIIRGWIFGTTLDSKTQSLLIVNNATNVVIKVCEFQFCNDPFLGVYYHKNNKSWMESEFRVYSSANNCTFEYVSQPFLMDLEGKQGNFKNLREFVFKNIDGYFKIYSKHTPINLVRDLPQGFSALEPLVDLPIGINITRFKTLLALHRSYLTPGDSSSGWTAGAAAYYVGYLQPRTFLLKYNENGTITDAVDCALDPLSETKCTLKSFTVEKGIYQTSNFRVQPTESIVRFPNITNLCPFGEVFNATRFASVYAWNRKRISNCVADYSVLYNSASFSTFKCYGVSPTKLNDLCFTNVYADSFVIRGDEVRQIAPGQTGKIADYNYKLPDDFTGCVIAWNSNNLDSKVGGNYNYLYRLFRKSNLKPFERDISTEIYQAGSTPCNGVEGFNCYFPLQSYGFQPTNGVGYQPYRVVVLSFELLHAPATVCGPKKSTNLVKNKCVNFNFNGLTGTGVLTESNKKFLPFQQFGRDIADTTDAVRDPQTLEILDITPCSFGGVSVITPGTNTSNQVAVLYQGVNCTEVPVAIHADQLTPTWRVYSTGSNVFQTRAGCLIGAEHVNNSYECDIPIGAGICASYQTQTNSPRRARSVASQSIIAYTMSLGAENSVAYSNNSIAIPTNFTISVTTEILPVSMTKTSVDCTMYICGDSTECSNLLLQYGSFCTQLNRALTGIAVEQDKNTQEVFAQVKQIYKTPPIKDFGGFNFSQILPDPSKPSKRSFIEDLLFNKVTLADAGFIKQYGDCLGDIAARDLICAQKFNGLTVLPPLLTDEMIAQYTSALLAGTITSGWTFGAGAALQIPFAMQMAYRFNGIGVTQNVLYENQKLIANQFNSAIGKIQDSLSSTASALGKLQDVVNQNAQALNTLVKQLSSNFGCISSVLNDILSRLDKVEAEVQIDCLITGRLQSLQTYVTQQLIRAAEIRASANLAATKMSECVLGQSKRVDFCGKGYHLMSFPQSAPHGVVFLHVTYVPAQEKNFTTAPAICHDGKAHFPREGVFVSNGTHWFVTQRNFYEPQIITTDNTFVSGNCDVVIGIVNNTVYDPLQPELDSGGGGSDIIKLLNEQVNKEMQSSNLYMSMSSWCYTHSLDGAGLFLFDHAAEEYEHAKKLIIFLNENNVPVQLTSISAPEHKFEGLTQIFQKAYEHEQHISESINNIVDHAIKSKDHATFNFLQWYVAEQHEEEVLFKDILDKIELIGNENHGLYLADQYVKGIAKSRKS

SEQ ID NO: 9486 - protein, 1315 aa, Artificial Sequence
  SARS-CoV-2/Netherlands/ZuidHolland_2/2020__EPI_ISL_414556 spike protein (1-1147)(A972C_R995C) Ferritin construct
MFVFLVLLPLVSSQCVNLTTRTQLPPAYTNSFTRGVYYPDKVFRSSVLHSTQDLFLPFFSNVTWFHAIHVSGTNGTKRFDNPVLPFNDGVYFASTEKSNIIRGWIFGTTLDSKTQSLLIVNNATNVVIKVCEFQFCNDPFLGVYYHKNNKSWMESEFRVYSSANNCTFEYVSQPFLMDLEGKQGNFKNLREFVFKNIDGYFKIYSKHTPINLVRDLPQGFSALEPLVDLPIGINITRFQTLLALHRSYLTPGDSSSGWTAGAAAYYVGYLQPRTFLLKYNENGTITDAVDCALDPLSETKCTLKSFTVEKGIYQTSNFRVQPTESIVRFPNITNLCPFGEVFNATRFASVYAWNRKRISNCVADYSVLYNSASFSTFKCYGVSPTKLNDLCFTNVYADSFVIRGDEVRQIAPGQTGKIADYNYKLPDDFTGCVIAWNSNNLDSKVGGNYNYLYRLFRKSNLKPFERDISTEIYQAGSTPCNGVEGFNCYFPLQSYGFQPTNGVGYQPYRVVVLSFELLHAPATVCGPKKSTNLVKNKCVNFNFNGLTGTGVLTESNKKFLPFQQFGRDIADTTDAVRDPQTLEILDITPCSFGGVSVITPGTNTSNQVAVLYQGVNCTEVPVAIHADQLTPTWRVYSTGSNVFQTRAGCLIGAEHVNNSYECDIPIGAGICASYQTQTNSPRRARSVASQSIIAYTMSLGAENSVAYSNNSIAIPTNFTISVTTEILPVSMTKTSVDCTMYICGDSTECSNLLLQYGSFCTQLNRALTGIALEQDKNTQEVFAQVKQIYKTPPIKDFGGFNFSQILPDPSKPSKRSFIEDLLFNKVTLADAGFIKQYGDCLGDIAARDLICAQKFNGLTVLPPLLTDEMIAQYTSALLAGTITSGWTFGAGAALQIPFAMQMAYRFNGIGVTQNVLYENQKLIANQFNSAIGKIQDSLSSTASALGKLQDVVNQNAQALNTLVKQLSSNFGCISSVLNDILSRLDKVEAEVQIDCLITGRLQSLQTYVTQQLIRAAEIRASANLAATKMSECVLGQSKRVDFCGKGYHLMSFPQSAPHGVVFLHVTYVPAQEKNFTTAPAICHDGKAHFPREGVFVSNGTHWFVTQRNFYEPQIITTDNTFVSGNCDVVIGIVNNTVYDPLQPELDSGGGGSDIIKLLNEQVNKEMQSSNLYMSMSSWCYTHSLDGAGLFLFDHAAEEYEHAKKLIIFLNENNVPVQLTSISAPEHKFEGLTQIFQKAYEHEQHISESINNIVDHAIKSKDHATFNFLQWYVAEQHEEEVLFKDILDKIELIGNENHGLYLADQYVKGIAKSRKS

SEQ ID NO: 9487 - protein, 1315 aa, Artificial Sequence
  SARS-CoV-2/USA/WA-UW31/2020__EPI_ISL_414618 spike protein (1-1147)(A972C_R995C) Ferritin construct
MFVFLVLLPLVSSQCVNLTTRTQLPPAYTNSFTRGVYYPDKVFRSSVLHSTQDLFLPFFSNVTWFHAIHVSGTNGTKRFDNPVLPFNDGVYFASTEKSNIIRGWIFGTTLDSKTQSLLIVNNATNVVIKVCEFQFCNDPFLGVYYHKNNKSWMESEFRVYSSANNCTFEYVSQPFLMDLEGKQGNFKNLREFVFKNIDGYFKIYSKHTPINLVRDLPQGFSALEPLVDLPIGINITRFQTLLALHRSYLTPGDSSSGWTAGAAAYYVGYLQPRTFLLKYNENGTITDAVDCALDPLSETKCTLKSFTVEKGIYQTSNFRVQPTESIVRFPNITNLCPFGEVFNATRFASVYAWNRKRISNCVADYSVLYNSASFSTFKCYGVSPTKLNDLCFTNVYADSFVIRGDEVRQIAPGQTGKIADYNYKLPDDFTGCVIAWNSNNLDSKVGGNYNYLYRLFRKSNLKPFERDISTEIYQAGSTPCNGAEGFNCYFPLQSYGFQPTNGVGYQPYRVVVLSFELLHAPATVCGPKKSTNLVKNKCVNFNFNGLTGTGVLTESNKKFLPFQQFGRDIADTTDAVRDPQTLEILDITPCSFGGVSVITPGTNTSNQVAVLYQDVNCTEVPVAIHADQLTPTWRVYSTGSNVFQTRAGCLIGAEHVNNSYECDIPIGAGICASYQTQTNSPRRARSVASQSIIAYTMSLGAENSVAYSNNSIAIPTNFTISVTTEILPVSMTKTSVDCTMYICGDSTECSNLLLQYGSFCTQLNRALTGIAVEQDKNTQEVFAQVKQIYKTPPIKDFGGFNFSQILPDPSKPSKRSFIEDLLFNKVTLADAGFIKQYGDCLGDIAARDLICAQKFNGLTVLPPLLTDEMIAQYTSALLAGTITSGWTFGAGAALQIPFAMQMAYRFNGIGVTQNVLYENQKLIANQFNSAIGKIQDSLSSTASALGKLQDVVNQNAQALNTLVKQLSSNFGCISSVLNDILSRLDKVEAEVQIDCLITGRLQSLQTYVTQQLIRAAEIRASANLAATKMSECVLGQSKRVDFCGKGYHLMSFPQSAPHGVVFLHVTYVPAQEKNFTTAPAICHDGKAHFPREGVFVSNGTHWFVTQRNFYEPQIITTDNTFVSGNCDVVIGIVNNTVYDPLQPELDSGGGGSDIIKLLNEQVNKEMQSSNLYMSMSSWCYTHSLDGAGLFLFDHAAEEYEHAKKLIIFLNENNVPVQLTSISAPEHKFEGLTQIFQKAYEHEQHISESINNIVDHAIKSKDHATFNFLQWYVAEQHEEEVLFKDILDKIELIGNENHGLYLADQYVKGIAKSRKS

SEQ ID NO: 9488 - protein, 1315 aa, Artificial Sequence
  SARS-CoV-2/South Korea/SNU01/2020__EPI_ISL_411929 spike protein (1-1147)(A972C_R995C) Ferritin construct
MFVFLVLLPLVSSQCVNLTTRTQLPPAYTNSFTRGVYYPDKVFRSSVLHSTQDLFLPFFSNVTWFHAIHVSGTNGTKRFDNPVLPFNDGVYFASTEKSNIIRGWIFGTTLDSKTQSLLIVNNATNVVIKVCEFQFCNDPFLGVYYHKNNKSWMESEFRVYSSANNCTFEYVSQPFLMDLEGKQGNFKNLREFVFKNIDGYFKIYSKHTPINLVRDLPQGFWALEPLVDLPIGINITRFQTLLALHRSYLTPGDSSSGWTAGAAAYYVGYLQPRTFLLKYNENGTITDAVDCALDPLSETKCTLKSFTVEKGIYQTSNFRVQPTESIVRFPNITNLCPFGEVFNATRFASVYAWNRKRISNCVADYSVLYNSASFSTFKCYGVSPTKLNDLCFTNVYADSFVIRGDEVRQIAPGQTGKIADYNYKLPDDFTGCVIAWNSNNLDSKVGGNYNYLYRLFRKSNLKPFERDISTEIYQAGSTPCNGVEGFNCYFPLQSYGFQPTNGVGYQPYRVVVLSFELLHAPATVCGPKKSTNLVKNKCVNFNFNGLTGTGVLTESNKKFLPFQQFGRDIADTTDAVRDPQTLEILDITPCSFGGVSVITPGTNTSNQVAVLYQDVNCTEVPVAIHADQLTPTWRVYSTGSNVFQTRAGCLIGAEHVNNSYECDIPIGAGICASYQTQTNSPRRARSVASQSIIAYTMSLGAENSVAYSNNSIAIPTNFTISVTTEILPVSMTKTSVDCTMYICGDSTECSNLLLQYGSFCTQLNRALTGIAVEQDKNTQEVFAQVKQIYKTPPIKDFGGFNFSQILPDPSKPSKRSFIEDLLFNKVTLADAGFIKQYGDCLGDIAARDLICAQKFNGLTVLPPLLTDEMIAQYTSALLAGTITSGWTFGAGAALQIPFAMQMAYRFNGIGVTQNVLYENQKLIANQFNSAIGKIQDSLSSTASALGKLQDVVNQNAQALNTLVKQLSSNFGCISSVLNDILSRLDKVEAEVQIDCLITGRLQSLQTYVTQQLIRAAEIRASANLAATKMSECVLGQSKRVDFCGKGYHLMSFPQSAPHGVVFLHVTYVPAQEKNFTTAPAICHDGKAHFPREGVFVSNGTHWFVTQRNFYEPQIITTDNTFVSGNCDVVIGIVNNTVYDPLQPELDSGGGGSDIIKLLNEQVNKEMQSSNLYMSMSSWCYTHSLDGAGLFLFDHAAEEYEHAKKLIIFLNENNVPVQLTSISAPEHKFEGLTQIFQKAYEHEQHISESINNIVDHAIKSKDHATFNFLQWYVAEQHEEEVLFKDILDKIELIGNENHGLYLADQYVKGIAKSRKS

SEQ ID NO: 9489 - protein, 1315 aa, Artificial Sequence
  SARS-CoV-2/China/WF0004/2020__EPI_ISL_413694 spike protein (1-1147)(A972C_R995C) Ferritin construct
MFVFLVLLPLVSSQCVNLTTRTQLPPAYTNSFTRGVYYPDKVFRSSVLHSTQDLFLPFFSNVTWFHAIHVSGTNGTKRFDNPVLPFNDGVYFASTEKSNIIRGWIFGTTLDSKTQSLLIVNNATNVVIKVCEFQFCNDPFLGVYYHKNNKSWTESEFRVYSSANNCTFEYVSQPFLMDLEGKQGNFKNLREFVFKNIDGYFKIYSKHTPINLVRDLPQGFSALEPLVDLPIGINITRFQTLLALHRSYLTPGDSSSGWTAGAAAYYVGYLQPRTFLLKYNENGTITDAVDCALDPLSETKCTLKSFTVEKGIYQTSNFRVQPTESIVRFPNITNLCPFGEVFNATRFASVYAWNRKRISNCVADYSVLYNSASFSTFKCYGVSPTKLNDLCFTNVYADSFVIRGDEVRQIAPGQTGKIADYNYKLPDDFTGCVIAWNSNNLDSKVGGNYNYLYRLFRKSNLKPFERDISTEIYQAGSTPCNGVEGFNCYFPLQSYGFQPTNGVGYQPYRVVVLSFELLHAPATVCGPKKSTNLVKNKCVNFNFNGLTGTGVLTESNKKFLPFQQFGRDIADTTDAVRDPQTLEILDITPCSFGGVSVITPGTNTSNQVAVLYQDVNCTEVPVAIHADQLTPTWRVYSTGSNVFQTRAGCLIGAEHVNNSYECDIPIGAGICASYQTQTNSPRRARSVASQSIIAYTMSLGAENSVAYSNNSIAIPTNFTISVTTEILPVSMTKTSVDCTMYICGDSTECSNLLLQYGSFCTQLNRALTGIAVEQDKNTQEVFAQVKQIYKTPPIKDFGGFNFSQILPDPSKPSKRSFIEDLLFNKVTLADAGFIKQYGDCLGDIAARDLICAQKFNGLTVLPPLLTDEMIAQYTSALLAGTITSGWTFGAGAALQIPFAMQMAYRFNGIGVTQNVLYENQKLIANQFNSAIGKIQDSLSSTASALGKLQDVVNQNAQALNTLVKQLSSNFGCISSVLNDILSRLDKVEAEVQIDCLITGRLQSLQTYVTQQLIRAAEIRASANLAATKMSECVLGQSKRFDFCGKGYHLMSFPQSAPHGVVFLHVTYVPAQEKNFTTAPAICHDGKAHFPREGVFVSNGTHWFVTQRNFYEPQIITTDNTFVSGNCDVVIGIVNNTVYDPLQPELDSGGGGSDIIKLLNEQVNKEMQSSNLYMSMSSWCYTHSLDGAGLFLFDHAAEEYEHAKKLIIFLNENNVPVQLTSISAPEHKFEGLTQIFQKAYEHEQHISESINNIVDHAIKSKDHATFNFLQWYVAEQHEEEVLFKDILDKIELIGNENHGLYLADQYVKGIAKSRKS

SEQ ID NO: 9490 - protein, 1315 aa, Artificial Sequence
  SARS-CoV-2/China/WF0028/2020__EPI_ISL_413791 spike protein (1-1147)(A972C_R995C) Ferritin construct
MFVFLVLLPLVSSQCVNLTTRTQLPPAYTNSFTRGVYYPDKVFRSSVLHSTQDLFLPFFSNVTWFHAIHVSGTNGTKRFDNPVLPFNDGVYFASTEKSNIIRGWIFGTTLDSKTQSLLIVNNATNVVIKVCEFQFCNDPFLGVYYHKNNKSWMESEFRVYSSANNCTFEYVSQPFLMDLEGKQGNFKNLREFVFKNIDGYFKIYSKHTPINLVRDLPQGFSALEPLVDLPIGINITRFQTLLALHRSYLTPGDSSSGWTAGAAAYYVGYLQPRTFLLKYNENGTITDAVDCALDPLSETKCTLKSFTVEKGIYQTSNFRVQPTESIVRFPNITNLCPFGEVFNATRFASVYAWNRKRISNCVADYSVLYNSASFSTFKCYGVSPTKLNDLCFTNVYADSFVIRGDEVRQIAPGQTGKIADYNYKLPDDFTGCVIAWNSNNLDSKVGGNYNYLYRLFRKSNLKPFERDISTEIYQAGSTPCNGVEGFNCYFPLQSYGFQPTNGVGYQPYRVVVLSFELLHAPATVCGPKKSTNLVKNKCVNFNFNGLTGTGVLTESNKKFLPFQQFGRDIADTTDAVRDPQTLEILDITPCSFGGVSVITPGTNTSNQVAVLYQDVNCTEVPVAIHADQLTPTWRVYSTGSNVFQTRAGCLIGAEHVNNSYECDIPIGAGICASYQTQTNSPRRARSVASQSIIAYTMSLGAENSVAYSNNSIAIPTNFTISVTTEILPVSMTKTSVDCTMYICGDSTECSNLLLQYGSFCTQLNRALTGIAVEQDKNTQEVFAQVKQIYKTPPIKDFGGFNFSQILPDPSKPSKRSFIEDLLFNKVTLADAGFIKQYGDCLGDIAARDLICAQKFNGLTVLPPLLTDEMIAQYTSALLAGTITSGWTFGAGAALQIPFAMQMAYRFNGIGVTQNVLYENQKLIANQFNSAIGKIQDSLSSTASALGKLQDVVNQNAQALNTLVKQLSSNFGCISSVLNDILSRLDKVEAEVQIDCLITGRLQSLQTYVTQQLIRAAEIRASANLAATKMSECVLGQSKRVDFCGKGYHLMSFPQSAPHGVVFLHVTYVPAQEKNFTTAPAICHDGKAHFPREGVFVSNGTHWFVTQRNFYEPQIITTDNTFVSGNCDVVIGIVNNTVYDPLQPELESGGGGSDIIKLLNEQVNKEMQSSNLYMSMSSWCYTHSLDGAGLFLFDHAAEEYEHAKKLIIFLNENNVPVQLTSISAPEHKFEGLTQIFQKAYEHEQHISESINNIVDHAIKSKDHATFNFLQWYVAEQHEEEVLFKDILDKIELIGNENHGLYLADQYVKGIAKSRKS

SEQ ID NO: 9491 - protein, 1315 aa, Artificial Sequence
  SARS-CoV-2/2019-nCoV/USA-CruiseA-18/2020__MT159716.1 spike protein (1-1147)(A972C_R995C) Ferritin construct
MFVFLVLLPLVSSQCVNLTTRTQLPPAYTNSFTRGVYYPDKVFRSSVLHSTQDLFLPFFSNVTWFHAIHVSGTNGTKRFDNPVLPFNDGVYFASTEKSNIIRGWIFGTTLDSKTQSLLIVNNATNVVIKVCEFQFCNDPFLGVYYHKNNKSWMESELRVYSSANNCTFEYVSQPFLMDLEGKQGNFKNLREFVFKNIDGYFKIYSKHTPINLVRDLPQGFSALEPLVDLPIGINITRFQTLLALHRSYLTPGDSSSGWTAGAAAYYVGYLQPRTFLLKYNENGTITDAVDCALDPLSETKCTLKSFTVEKGIYQTSNFRVQPTESIVRFPNITNLCPFGEVFNATRFASVYAWNRKRISNCVADYSVLYNSASFSTFKCYGVSPTKLNDLCFTNVYADSFVIRGDEVRQIAPGQTGKIADYNYKLPDDFTGCVIAWNSNNLDSKVGGNYNYLYRLFRKSNLKPFERDISTEIYQAGSTPCNGVEGFNCYFPLQSYGFQPTNGVGYQPYRVVVLSFELLHAPATVCGPKKSTNLVKNKCVNFNFNGLTGTGVLTESNKKFLPFQQFGRDIADTTDAVRDPQTLEILDITPCSFGGVSVITPGTNTSNQVAVLYQDVNCTEVPVAIHADQLTPTWRVYSTGSNVFQTRAGCLIGAEHVNNSYECDIPIGAGICASYQTQTNSPRRARSVASQSIIAYTMSLGAENSVAYSNNSIAIPTNFTISVTTEILPVSMTKTSVDCTMYICGDSTECSNLLLQYGSFCTQLNRALTGIAVEQDKNTQEVFAQVKQIYKTPPIKDFGGFNFSQILPDPSKPSKRSFIEDLLFNKVTLADAGFIKQYGDCLGDIAARDLICAQKFNGLTVLPPLLTDEMIAQYTSALLAGTITSGWTFGAGAALQIPFAMQMAYRFNGIGVTQNVLYENQKLIANQFNSAIGKIQDSLSSTASALGKLQDVVNQNAQALNTLVKQLSSNFGCISSVLNDILSRLDKVEAEVQIDCLITGRLQSLQTYVTQQLIRAAEIRASANLAATKMSECVLGQSKRVDFCGKGYHLMSFPQSAPHGVVFLHVTYVPAQEKNFTTAPAICHDGKAHFPREGVFVSNGTHWFVTQRNFYEPQIITTDNTFVSGNCDVVIGIVNNTVYDPLQPELDSGGGGSDIIKLLNEQVNKEMQSSNLYMSMSSWCYTHSLDGAGLFLFDHAAEEYEHAKKLIIFLNENNVPVQLTSISAPEHKFEGLTQIFQKAYEHEQHISESINNIVDHAIKSKDHATFNFLQWYVAEQHEEEVLFKDILDKIELIGNENHGLYLADQYVKGIAKSRKS

SEQ ID NO: 9492 - protein, 1315 aa, Artificial Sequence
  SARS-CoV-2/SARS-CoV-2/Yunnan-01/human/2020/CHN__MT049951.1 spike protein (1-1147)(A972C_R995C) Ferritin construct
MFVFLVLLPLVSSQCVNLTTRTQLPPANTNSFTRGVYYPDKVFRSSVLHSTQDLFLPFFSNVTWFHAIHVSGTNGTKRFDNPVLPFNDGVYFASTEKSNIIRGWIFGTTLDSKTQSLLIVNNATNVVIKVCEFQFCNDPFLGVYYHKNNKSWMESEFRVYSSANNCTFEYVSQPFLMDLEGKQGNFKNLREFVFKNIDGYFKIYSKHTPINLVRDLPQGFSALEPLVDLPIGINITRFQTLLALHRSYLTPGDSSSGWTAGAAAYYVGYLQPRTFLLKYNENGTITDAVDCALDPLSETKCTLKSFTVEKGIYQTSNFRVQPTESIVRFPNITNLCPFGEVFNATRFASVYAWNRKRISNCVADYSVLYNSASFSTFKCYGVSPTKLNDLCFTNVYADSFVIRGDEVRQIAPGQTGKIADYNYKLPDDFTGCVIAWNSNNLDSKVGGNYNYLYRLFRKSNLKPFERDISTEIYQAGSTPCNGVEGFNCYFPLQSYGFQPTNGVGYQPYRVVVLSFELLHAPATVCGPKKSTNLVKNKCVNFNFNGLTGTGVLTESNKKFLPFQQFGRDIADTTDAVRDPQTLEILDITPCSFGGVSVITPGTNTSNQVAVLYQDVNCTEVPVAIHADQLTPTWRVYSTGSNVFQTRAGCLIGAEHVNNSYECDIPIGAGICASYQTQTNSPRRARSVASQSIIAYTMSLGAENSVAYSNNSIAIPTNFTISVTTEILPVSMTKTSVDCTMYICGDSTECSNLLLQYGSFCTQLNRALTGIAVEQDKNTQEVFAQVKQIYKTPPIKDFGGFNFSQILPDPSKPSKRSFIEDLLFNKVTLADAGFIKQYGDCLGDIAARDLICAQKFNGLTVLPPLLTDEMIAQYTSALLAGTITSGWTFGAGAALQIPFAMQMAYRFNGIGVTQNVLYENQKLIANQFNSAIGKIQDSLSSTASALGKLQDVVNQNAQALNTLVKQLSSNFGCISSVLNDILSRLDKVEAEVQIDCLITGRLQSLQTYVTQQLIRAAEIRASANLAATKMSECVLGQSKRVDFCGKGYHLMSFPQSAPHGVVFLHVTYVPAQEKNFTTAPAICHDGKAHFPREGVFVSNGTHWFVTQRNFYEPQIITTDNTFVSGNCDVVIGIVNNTVYDPLQPELDSGGGGSDIIKLLNEQVNKEMQSSNLYMSMSSWCYTHSLDGAGLFLFDHAAEEYEHAKKLIIFLNENNVPVQLTSISAPEHKFEGLTQIFQKAYEHEQHISESINNIVDHAIKSKDHATFNFLQWYVAEQHEEEVLFKDILDKIELIGNENHGLYLADQYVKGIAKSRKS

SEQ ID NO: 9493 - protein, 1315 aa, Artificial Sequence
  SARS-CoV-2/USA/WA-UW292/2020__EPI_ISL_418077 spike protein (1-1147)(A972C_R995C) Ferritin construct
MFVFLVLLPLVSSQCVNLTTRTQLPPAYTNSFTRGVYYPDKVFRSSVLHSTQDLFLPFFSNVTWFHAIHVSGTNGTKRFDNPVLPFNDGVYFASTEKSNIIRGWIFGTTLDSKTQSLLIVNNATNVVIKVCEFQFCNDPFLGVYYHKNNKSWMESEFRVYSSANNCTFEYVSQPFLMDLEGKQGNFKNLREFVFKNIDGYFKIYSKHTPINLVRDLPQGFSALEPLVDLPIGINITRFQTLLALHRSYLTPGDSSSGWTAGAAAYYVGYLQPRTFLLKYNENGTITDAVDCALDPLSETKCTLKSFTVEKGIYQTSNFRVQPTESIVRFPNITNLCPFGEVFNATRFASVYAWNRKRISNCVADYSVLYNSASFSTFKCYGVSPTKLNDLCFTNVYADSFVIRGDEVRQIAPGQTGKIADYNYKLPDDFTGCVIAWNSNNLDSKVGGNYNYLYRLFRKSNLKPFERDISTEIYQASSTPCNGVEGFNCYFPLQSYGFQPTNGVGYQPYRVVVLSFELLHAPATVCGPKKSTNLVKNKCVNFNFNGLTGTGVLTESNKKFLPFQQFGRDIADTTDAVRDPQTLEILDITPCSFGGVSVITPGTNTSNQVAVLYQDVNCTEVPVAIHADQLTPTWRVYSTGSNVFQTRAGCLIGAEHVNNSYECDIPIGAGICASYQTQTNSPRRARSVASQSIIAYTMSLGAENSVAYSNNSIAIPTNFTISVTTEILPVSMTKTSVDCTMYICGDSTECSNLLLQYGSFCTQLNRALTGIAVEQDKNTQEVFAQVKQIYKTPPIKDFGGFNFSQILPDPSKPSKRSFIEDLLFNKVTLADAGFIKQYGDCLGDIAARDLICAQKFNGLTVLPPLLTDEMIAQYTSALLAGTITSGWTFGAGAALQIPFAMQMAYRFNGIGVTQNVLYENQKLIANQFNSAIGKIQDSLSSTASALGKLQDVVNQNAQALNTLVKQLSSNFGCISSVLNDILSRLDKVEAEVQIDCLITGRLQSLQTYVTQQLIRAAEIRASANLAATKMSECVLGQSKRVDFCGKGYHLMSFPQSAPHGVVFLHVTYVPAQEKNFTTAPAICHDGKAHFPREGVFVSNGTHWFVTQRNFYEPQIITTDNTFVSGNCDVVIGIVNNTVYDPLQPELDSGGGGSDIIKLLNEQVNKEMQSSNLYMSMSSWCYTHSLDGAGLFLFDHAAEEYEHAKKLIIFLNENNVPVQLTSISAPEHKFEGLTQIFQKAYEHEQHISESINNIVDHAIKSKDHATFNFLQWYVAEQHEEEVLFKDILDKIELIGNENHGLYLADQYVKGIAKSRKS

SEQ ID NO: 9494 - protein, 1315 aa, Artificial Sequence
  SARS-CoV-2/Iceland/192/2020__EPI_ISL_417819 spike protein (1-1147)(A972C_R995C) Ferritin construct
MFVFFVLLPLVSSQCVNLTTRTQLPPAYTNSFTRGVYYPDKVFRSSVLHSTQDLFLPFFSNVTWFHAIHVSGTNGTKRFDNPVLPFNDGVYFASTEKSNIIRGWIFGTTLDSKTQSLLIVNNATNVVIKVCEFQFCNDPFLGVYYHKNNKSWMESEFRVYSSANNCTFEYVSQPFLMDLEGKQGNFKNLREFVFKNIDGYFKIYSKHTPINLVRDLPQGFSALEPLVDLPIGINITRFQTLLALHRSYLTPGDSSSGWTAGAAAYYVGYLQPRTFLLKYNENGTITDAVDCALDPLSETKCTLKSFTVEKGIYQTSNFRVQPTESIVRFPNITNLCPFGEVFNATRFASVYAWNRKRISNCVADYSVLYNSASFSTFKCYGVSPTKLNDLCFTNVYADSFVIRGDEVRQIAPGQTGKIADYNYKLPDDFTGCVIAWNSNNLDSKVGGNYNYLYRLFRKSNLKPFERDISTEIYQAGSTPCNGVEGFNCYFPLQSYGFQPTNGVGYQPYRVVVLSFELLHAPATVCGPKKSTNLVKNKCVNFNFNGLTGTGVLTESNKKFLPFQQFGRDIADTTDAVRDPQTLEILDITPCSFGGVSVITPGTNTSNQVAVLYQGVNCTEVPVAIHADQLTPTWRVYSTGSNVFQTRAGCLIGAEHVNNSYECDIPIGAGICASYQTQTNSPRRARSVASQSIIAYTMSLGAENSVAYSNNSIAIPTNFTISVTTEILPVSMTKTSVDCTMYICGDSTECSNLLLQYGSFCTQLNRALTGIAVEQDKNTQEVFAQVKQIYKTPPIKDFGGFNFSQILPDPSKPSKRSFIEDLLFNKVTLADAGFIKQYGDCLGDIAARDLICAQKFNGLTVLPPLLTDEMIAQYTSALLAGTITSGWTFGAGAALQIPFAMQMAYRFNGIGVTQNVLYENQKLIANQFNSAIGKIQDSLSSTASALGKLQDVVNQNAQALNTLVKQLSSNFGCISSVLNDILSRLDKVEAEVQIDCLITGRLQSLQTYVTQQLIRAAEIRASANLAATKMSECVLGQSKRVDFCGKGYHLMSFPQSAPHGVVFLHVTYVPAQEKNFTTAPAICHDGKAHFPREGVFVSNGTHWFVTQRNFYEPQIITTDNTFVSGNCDVVIGIVNNTVYDPLQPELDSGGGGSDIIKLLNEQVNKEMQSSNLYMSMSSWCYTHSLDGAGLFLFDHAAEEYEHAKKLIIFLNENNVPVQLTSISAPEHKFEGLTQIFQKAYEHEQHISESINNIVDHAIKSKDHATFNFLQWYVAEQHEEEVLFKDILDKIELIGNENHGLYLADQYVKGIAKSRKS

SEQ ID NO: 9495 - protein, 1315 aa, Artificial Sequence
  SARS-CoV-2/Belgium/ULG-6939/2020__EPI_ISL_417020 spike protein (1-1147)(A972C_R995C) Ferritin construct
MFVFLVLLPLVSSQCVNLTTRTQLPPAYTNSFTRGVYYPDKVFRSSVLHSTQDLFLPFFSNVTWFHAIHVSGTNGTKRFDNPVLPFNDGVYFASTEKSNIIRGWIFGTTLDSKTQSLLIVNNATNVVIKVCEFQFCNDPFLGVYYHKNNKSWMESEFRVYSSANNCTFEYVSQPFLMDLEGKQGNFKNLREFVFKNIDGYFKIYSKHTPINLVRDLPQGFSALEPLVDLPIGINITRFQTLLALHRSYLTPGDSSSGWTAGAAAYYVGYLQPRTFLLKYNENGTITDAVDCALDPLSETKCTLKSFTVEKGIYQTSNFRVQPTESIVRFPNITNLCPFGEVFNATRFASVYAWNRKRISNCVADYSVLYNSASFSTFKCYGVSPTKLNDLCFTNVYADSFVIRGDEVRQIAPGQTGKIADYNYKLPDDFTGCVIAWNSNNLDSKVGGNYNYLYRLFRKSNLKPFERDISTEIYQAGSTPCNGVEGFNCYFPLQSYGFQPTNGVGYQPYRVVVLSFELLHAPATVCGPKKSTNLVKNKCVNFNFNGLTGTGVLTESNKKFLPFQQFGRDIADTTDAVRDPQTLEILDITPCSFGGVSVITPGTNTSNQVAVLYQGVNCTEVPVAIHADQLTPTWRVYSTGSNVFQTRAGCLIGAEHVNNSYECDIPIGAGICASYQTQTNSPRRARSVASQSIIAYTMSLGAENSVVYSNNSIAIPTNFTISVTTEILPVSMTKTSVDCTMYICGDSTECSNLLLQYGSFCTQLNRALTGIAVEQDKNTQEVFAQVKQIYKTPPIKDFGGFNFSQILPDPSKPSKRSFIEDLLFNKVTLADAGFIKQYGDCLGDIAARDLICAQKFNGLTVLPPLLTDEMIAQYTSALLAGTITSGWTFGAGAALQIPFAMQMAYRFNGIGVTQNVLYENQKLIANQFNSAIGKIQDSLSSTASALGKLQDVVNQNAQALNTLVKQLSSNFGCISSVLNDILSRLDKVEAEVQIDCLITGRLQSLQTYVTQQLIRAAEIRASANLAATKMSECVLGQSKRVDFCGKGYHLMSFPQSAPHGVVFLHVTYVPAQEKNFTTAPAICHDGKAHFPREGVFVSNGTHWFVTQRNFYEPQIITTDNTFVSGNCDVVIGIVNNTVYDPLQPELDSGGGGSDIIKLLNEQVNKEMQSSNLYMSMSSWCYTHSLDGAGLFLFDHAAEEYEHAKKLIIFLNENNVPVQLTSISAPEHKFEGLTQIFQKAYEHEQHISESINNIVDHAIKSKDHATFNFLQWYVAEQHEEEVLFKDILDKIELIGNENHGLYLADQYVKGIAKSRKS

SEQ ID NO: 9496 - protein, 1315 aa, Artificial Sequence
  SARS-CoV-2/France/HF2496/2020__EPI_ISL_418231 spike protein (1-1147)(A972C_R995C) Ferritin construct
MFVFLVLLPLVSSQCVNLTTRTQLPPAYTNSFTRGVYYPDKVFRSSVLHSTQDLFLPFFSNVTWFHAIHVSGTNGTKRFDNPVLPFNDGVYFASTEKSNIIRGWIFGTTLDSKTQSLLIVNNATNVVIKVCEFQFCNDPFLGVYYHKNNKSWMESEFRVYSSANNCTFEYVSQPFLMDLEGKQGNFKNLREFVFKNIDGYFKIYSKHTPINLVRDLPQGFSALEPLVDLPIGINITRFQTLLALHRSYLTPGDSSSGWTAGAAAYYVGYLQPRTFLLKYNENGTITDAVDCALDPLSETKCTLKSFTVEKGIYQTSNFRVQPTESIVRFPNITNLCPFGEVFNATRFASVYAWNRKRISNCVADYSVLYNSASFSTFKCYGVSPTKLNDLCFTNVYADSFVIRGDEVRQIAPGQTGKIADYNYKLPDDFTGCVIAWNSNNLDSKVGGNYNYLYRLFRKSNLKPFERDISTEIYQAGSTPCNGVEGFNCYFPLQSYGFQPTNGVGYQPYRVVVLSFELLHAPATVCGPKKSTNLVKNKCVNFNFNGLTGTGVLTESNKKFLPFQQFGRDIADTTDAVRDPQTLEILDITPCSFGGVSVITPGTNTSNQVAVLYQGVNCTEVPVAIHADQLTPTWRVYSTGSNVFQTRAGCLIGAEHVNNSYECDIPIGAGICASYQTQTNSPRRARSVASQSIIAYTMSLGAENSVAYSNNSIAIPTNFTISVTTEILPVSMTKTSVDCTMYICGDSTECSNLLLQYGSFCTQLNRALTGIAVEQDKNTQEVFAQVKQIYKTPPIKDFGGFNFSQILPDPSKPSKRSFIEDLLFNKVTLADAGFIKQYGDCLGDIVARDLICAQKFNGLTVLPPLLTDEMIAQYTSALLAGTITSGWTFGAGAALQIPFAMQMAYRFNGIGVTQNVLYENQKLIANQFNSAIGKIQDSLSSTASALGKLQDVVNQNAQALNTLVKQLSSNFGCISSVLNDILSRLDKVEAEVQIDCLITGRLQSLQTYVTQQLIRAAEIRASANLAATKMSECVLGQSKRVDFCGKGYHLMSFPQSAPHGVVFLHVTYVPAQEKNFTTAPAICHDGKAHFPREGVFVSNGTHWFVTQRNFYEPQIITTDNTFVSGNCDVVIGIVNNTVYDPLQPELDSGGGGSDIIKLLNEQVNKEMQSSNLYMSMSSWCYTHSLDGAGLFLFDHAAEEYEHAKKLIIFLNENNVPVQLTSISAPEHKFEGLTQIFQKAYEHEQHISESINNIVDHAIKSKDHATFNFLQWYVAEQHEEEVLFKDILDKIELIGNENHGLYLADQYVKGIAKSRKS

SEQ ID NO: 9497 - protein, 1315 aa, Artificial Sequence
  SARS-CoV-2/USA/WA-UW291/2020__EPI_ISL_418076 spike protein (1-1147)(A972C_R995C) Ferritin construct
MFVFLVLLPLVSSQCVNLTTRTQLPPAYTNSFTRGVYYPDKVFRSSVLHSTQDLFLPFFSNVTWFHAIHVSGTNGTKRFDNPVLPFNDGVYFASTEKSNIIRGWIFGTTLDSKTQSLLIVNNATNVVIKVCEFQFCNDPFLGVYYHKNNKSWMESEFRVYSSANNCTFEYVSQPFLMDLEGKQGNFKNLREFVFKNIDGYFKIYSKHTPINLVRDLPQGFSALEPLVDLPIGINITRFQTLLALHRSYLTPGDSSSGWTAGAAAYYVGYLQPRTFLLKYNENGTITDAVDCALDPLSETKCTLKSFTVEKGIYQTSNFRVQPTESIVRFPNITNLCPFGEVFNATRFASVYAWNRKRISNCVADYSVLYNSASFSTFKCYGVSPTKLNDLCFTNVYADSFVIRGDEVRQIAPGQTGKIADYNYKLPDDFTGCVIAWNSNNLDSKVGGNYNYLYRLFRKSNLKPFERDISTEIYQAGSTPCNGVEGFNCYFPLQSYGFQPTNGVGYQPYRVVVLSFELLHAPATVCGPKKSTNLVKNKCVNFNFNGLTGTGVLTESNKKFLPFQQFGRDIADTTDAVRDPQTLEILDITPCSFGGVSVITPGTNTSNQVAVLYQGVNCTEVPVAIHADQLTPTWRVYSTGSNVFQTRAGCLIGAEHVNNSYECDIPIGAGICASYQTQTNSPRRARSVASQSIIAYTMSLGAENSVAYSNNSIAIPTNFTISVTTEILPVSMTKTSVDCTMYICGDSTECSNLLLQYGSFCTQLNRALTGIAVEQDKNTQEVFAQVKQIYKTPPIKDFGGFNFSQILPDPSKPSKRSFIEDLLFNKVTLADAGFIKQYGDCLGDIAARDLICAQKFNGLTVLPPLLTDEMIAQYTSALLAGTITSGWTFGAGAALQIPFAMQMAYRFNGIGVTQNVLYENQKLIANQFNSAIGKIQYSLSSTASALGKLQDVVNQNAQALNTLVKQLSSNFGCISSVLNDILSRLDKVEAEVQIDCLITGRLQSLQTYVTQQLIRAAEIRASANLAATKMSECVLGQSKRVDFCGKGYHLMSFPQSAPHGVVFLHVTYVPAQEKNFTTAPAICHDGKAHFPREGVFVSNGTHWFVTQRNFYEPQIITTDNTFVSGNCDVVIGIVNNTVYDPLQPELDSGGGGSDIIKLLNEQVNKEMQSSNLYMSMSSWCYTHSLDGAGLFLFDHAAEEYEHAKKLIIFLNENNVPVQLTSISAPEHKFEGLTQIFQKAYEHEQHISESINNIVDHAIKSKDHATFNFLQWYVAEQHEEEVLFKDILDKIELIGNENHGLYLADQYVKGIAKSRKS

SEQ ID NO: 9498 - protein, 1315 aa, Artificial Sequence; identical to SEQ ID NO: 9461
  SARS-CoV-2/Portugal/PT0034/2020__EPI_ISL_418019 spike protein (1-1147)(A972C_R995C) Ferritin construct

SEQ ID NO: 9499 - protein, 1315 aa, Artificial Sequence; identical to SEQ ID NO: 9453
  SARS-CoV-2/Iceland/202/2020__EPI_ISL_417750 spike protein (1-1147)(A972C_R995C) Ferritin construct

SEQ ID NO: 9500 - protein, 1315 aa, Artificial Sequence
  SARS-CoV-2/USA/WA-UW261/2020__EPI_ISL_418046 spike protein (1-1147)(A972C_R995C) Ferritin construct
MFVFLVLLPLVSSQCVNLTTRTQLPPAYTNSFTRGVYYPDKVFRSSVLHSTQDLFLPFFSNVTWFHAIHVSGTNGTKRFDNPVLPFNDGVYFASTEKSNIIRGWIFGTTLDSKTQSLLIVNNATNVVIKVCEFQFCNDPFLGVYYHKNNKSWMESEFRVYSSANNCTFEYVSQPFLMDLEGKQGNFKNLREFVFKNIDGYFKIYSKHTPINLVRDLPQGFSALEPLVDLPIGINITRFQTLLALHRSYLTPGDSSSGWTAGAAAYYVGYLQPRTFLLKYNENGTITDAVDCALDPLSETKCTLKSFTVEKGIYQTSNFRVQPTESIVRFPNITNLCPFGEVFNATRFTSVYAWNRKRISNCVADYSVLYNSASFSTFKCYGVSPTKLNDLCFTNVYADSFVIRGDEVRQIAPGQTGKIADYNYKLPDDFTGCVIAWNSNNLDSKVGGNYNYLYRLFRKSNLKPFERDISTEIYQAGSTPCNGVEGFNCYFPLQSYGFQPTNGVGYQPYRVVVLSFELLHAPATVCGPKKSTNLVKNKCVNFNFNGLTGTGVLTESNKKFLPFQQFGRDIADTTDAVRDPQTLEILDITPCSFGGVSVITPGTNTSNQVAVLYQDVNCTEVPVAIHADQLTPTWRVYSTGSNVFQTRAGCLIGAEHVNNSYECDIPIGAGICASYQTQTNSPRRARSVASQSIIAYTMSLGAENSVAYSNNSIAIPTNFTISVTTEILPVSMTKTSVDCTMYICGDSTECSNLLLQYGSFCTQLNRALTGIAVEQDKNTQEVFAQVKQIYKTPPIKDFGGFNFSQILPDPSKPSKRSFIEDLLFNKVTLADAGFIKQYGDCLGDIAARDLICAQKFNGLTVLPPLLTDEMIAQYTSALLAGTITSGWTFGAGAALQIPFAMQMAYRFNGIGVTQNVLYENQKLIANQFNSAIGKIQDSLSSTASALGKLQDVVNQNAQALNTLVKQLSSNFGCISSVLNDILSRLDKVEAEVQIDCLITGRLQSLQTYVTQQLIRAAEIRASANLAATKMSECVLGQSKRVDFCGKGYHLMSFPQSAPHGVVFLHVTYVPAQEKNFTTAPAICHDGKAHFPREGVFVSNGTHWFVTQRNFYEPQIITTDNTFVSGNCDVVIGIVNNTVYDPLQPELDSGGGGSDIIKLLNEQVNKEMQSSNLYMSMSSWCYTHSLDGAGLFLFDHAAEEYEHAKKLIIFLNENNVPVQLTSISAPEHKFEGLTQIFQKAYEHEQHISESINNIVDHAIKSKDHATFNFLQWYVAEQHEEEVLFKDILDKIELIGNENHGLYLADQYVKGIAKSRKS

SEQ ID NO: 9501 - protein, 1315 aa, Artificial Sequence
  SARS-CoV-2/Portugal/PT0035/2020__EPI_ISL_418020 spike protein (1-1147)(A972C_R995C) Ferritin construct
MFVFLVLLPLVSSQCVNLTTRTQLPPAYTNSFTRGVYYPDKVFRSSVLHSTQDLFLPFFSNVTWFHAIHVSGTNGTKRFDNPVLPFNDGVYFASTEKSNIIRGWIFGTTLDSKTQSLLIVNNATNVVIKVCEFQFCNDPFLGVYYHKNNKSWMESEFRVYSSANNCTFEYVSQPFLMDLEGKQGNFKNLREFVFKNIDGYFKIYSKHTPINLVRDLPQGFSALEPLVDLPIGINITRFQTLLALHRSYLTPGDSSSGWTAGAAAYYVGYLQPRTFLLKYNENGTITDAVDCALDPLSETKCTLKSFTVEKGIYQTSNFRVQPTESIVRFPNITNLCPFGEVFNATRFASVYAWNRKRISNCVADYSVLYNSASFSTFKCYGVSPTKLNDLCFTNVYADSFVIRGDEVRQIAPGQTGKIADYNYKLPDDFTGCVIAWNSNNLDSKVGGNYNYLYRLFRKSNLKPFERDISTEIYQAGSTPCNGVEGFNCYFPLQSYGFQPTNGVGYQPYRVVVLSFELLHAPATVCGPKKSTNLVKNKCVNFNFNGLTGTGVLTESNKKFLPFQQFGRDIADTTDAVRDPQTLEILDITPCSFGGVSVITPGTNTSNQVAVLYQDVNCTEVPVAIHADQLTPTWRVYSTGSNVFQTRAGCLIGAEHVNNSYECDIPIGAGICASYQTQTNSPRRARSVASQSIIAYTMSLGAENSVAYSNNSIAIPTNFTISVTTEILPVSMTKTSVDCTMYICGDSTECSNLLLQYGSFCTQLNRALTGIAVEQDKNTQEVFAQVKQIYKTPPIKDFGGFNFSQILPDPSKPSKRSFIEDLLFNKVTLADAGFIKQYGDCLGDISARDLICAQKFNGLTVLPPLLTDEMIAQYTSALLAGTITSGWTFGAGAALQIPFAMQMAYRFNGIGVTQNVLYENQKLIANQFNSAIGKIQDSLSSTASALGKLQDVVNQNAQALNTLVKQLSSNFGCISSVLNDILSRLDKVEAEVQIDCLITGRLQSLQTYVTQQLIRAAEIRASANLAATKMSECVLGQSKRVDFCGKGYHLMSFPQSAPHGVVFLHVTYVPAQEKNFTTAPAICHDGKAHFPREGVFVSNGTHWFVTQRNFYEPQIITTDNTFVSGNCDVVIGIVNNTVYDPLQPELDSGGGGSDIIKLLNEQVNKEMQSSNLYMSMSSWCYTHSLDGAGLFLFDHAAEEYEHAKKLIIFLNENNVPVQLTSISAPEHKFEGLTQIFQKAYEHEQHISESINNIVDHAIKSKDHATFNFLQWYVAEQHEEEVLFKDILDKIELIGNENHGLYLADQYVKGIAKSRKS

SEQ ID NO: 9502 - protein, 1315 aa, Artificial Sequence
  SARS-CoV-2/USA/NY-NYUMC7/2020__EPI_ISL_418192 spike protein (1-1147)(A972C_R995C) Ferritin construct
MFVFLVLLPLVSSQCVNLTTRTQLPPAYTNSFTRGVYYPDKVFRSSVLHSTQDLFLPFFSNVTWFHAIHVSGTNGTKRFDNPVLPFNDGVYFASTEKSNIIRGWIFGTTLDSKTQSLLIVNNATNVVIKVCEFQFCNDPFLGVYHHKNNKSWMESEFRVYSSANNCTFEYVSQPFLMDLEGKQGNFKNLREFVFKNIDGYFKIYSKHTPINLVRDLPQGFSALEPLVDLPIGINITRFQTLLALHRSYLTPGDSSSGWTAGAAAYYVGYLQPRTFLLKYNENGTITDAVDCALDPLSETKCTLKSFTVEKGIYQTSNFRVQPTESIVRFPNITNLCPFGEVFNATRFASVYAWNRKRISNCVADYSVLYNSASFSTFKCYGVSPTKLNDLCFTNVYADSFVIRGDEVRQIAPGQTGKIADYNYKLPDDFTGCVIAWNSNNLDSKVGGNYNYLYRLFRKSNLKPFERDISTEIYQAGSTPCNGVEGFNCYFPLQSYGFQPTNGVGYQPYRVVVLSFELLHAPATVCGPKKSTNLVKNKCVNFNFNGLTGTGVLTESNKKFLPFQQFGRDIADTTDAVRDPQTLEILDITPCSFGGVSVITPGTNTSNQVAVLYQGVNCTEVPVAIHADQLTPTWRVYSTGSNVFQTRAGCLIGAEHVNNSYECDIPIGAGICASYQTQTNSPRRARSVASQSIIAYTMSLGAENSVAYSNNSIAIPTNFTISVTTEILPVSMTKTSVDCTMYICGDSTECSNLLLQYGSFCTQLNRALTGIAVEQDKNTQEVFAQVKQIYKTPPIKDFGGFNFSQILPDPSKPSKRSFIEDLLFNKVTLADAGFIKQYGDCLGDIAARDLICAQKFNGLTVLPPLLTDEMIAQYTSALLAGTITSGWTFGAGAALQIPFAMQMAYRFNGIGVTQNVLYENQKLIANQFNSAIGKIQDSLSSTASALGKLQDVVNQNAQALNTLVKQLSSNFGCISSVLNDILSRLDKVEAEVQIDCLITGRLQSLQTYVTQQLIRAAEIRASANLAATKMSECVLGQSKRVDFCGKGYHLMSFPQSAPHGVVFLHVTYVPAQEKNFTTAPAICHDGKAHFPREGVFVSNGTHWFVTQRNFYEPQIITTDNTFVSGNCDVVIGIVNNTVYDPLQPELDSGGGGSDIIKLLNEQVNKEMQSSNLYMSMSSWCYTHSLDGAGLFLFDHAAEEYEHAKKLIIFLNENNVPVQLTSISAPEHKFEGLTQIFQKAYEHEQHISESINNIVDHAIKSKDHATFNFLQWYVAEQHEEEVLFKDILDKIELIGNENHGLYLADQYVKGIAKSRKS

SEQ ID NO: 9503 - protein, 1315 aa, Artificial Sequence
  SARS-CoV-2/Iceland/189/2020__EPI_ISL_417709 spike protein (1-1147)(A972C_R995C) Ferritin construct
MFVFLVLLPLVSSQCVNLTTRTQLPPAYTNSFTRGVYYPDKVFRSSVLHSTQDLFLPFFSNVTWFHAIHVSGTNGTKRFDNPVLPFNDGVYFASTEKSNIIRGWIFGTTLDSKTQSLLIVNNATNVVIKVCEFQFCNDPFLGVYYHKNNKSWMESEFRVYSSANNCTFEYVSQPFLMDLEGKQGNFKNLREFVFKNIDGYFKIYSKHTPINLVRDLPQGFSALEPLVDLPIGINITRFQTLLALHRSYLTPGDSSSGWTAGAAAYYVGYLQPRTFLLKYNENGTITDAVDCALDPLSETKCTLKSFTVEKGIYQTSNFRVQPTESIVRFPNITNLCPFGEVFNATRFASVYAWNRKRISNCVADYSVLYNSASFSTFKCYGVSPTKLNDLCFTNVYADSFVIRGDEVRQIAPGQTGKIADYNYKLPDDFTGCVIAWNSNNLDSKVGGNYNYLYRLFRKSNLKPFERDISTEIYQAGSTPCNGVEGFNCYFPLQSYGFQPTNGVGYQPYRVVVLSFELLHAPATVCGPKKSTNLVKNKCVNFNFNGLTGTGVLTESNKKFLPFQQFGRDIADTTDAVRDPQTLEILDITPCSFGGVSVITPGTNTSNQVAVLYQGVNCTEVPVAIHADQLTPTWRVYSTGSNVFQTRAGCLIGAEHVNNSYECDIPIGAGICASYQTQTNSPRRARSVASQSIIAYTMSLGAENSVAYSNNSIAIPTNFTISVTTEILPVSMTKTSVDCTMYICGDSTECSNLLLQYGSFCTQLNRALTGIAVEQDKNTQEVFAQVKQIYKTPPIKDFGGFNFSQILPDPSKPSKRSFIEDLLFNKVTLADAGFTKQYGDCLGDIAARDLICAQKFNGLTVLPPLLTDEMIAQYTSALLAGTITSGWTFGAGAALQIPFAMQMAYRFNGIGVTQNVLYENQKLIANQFNSAIGKIQDSLSSTASALGKLQDVVNQNAQALNTLVKQLSSNFGCISSVLNDILSRLDKVEAEVQIDCLITGRLQSLQTYVTQQLIRAAEIRASANLAATKMSECVLGQSKRVDFCGKGYHLMSFPQSAPHGVVFLHVTYVPAQEKNFTTAPAICHDGKAHFPREGVFVSNGTHWFVTQRNFYEPQIITTDNTFVSGNCDVVIGIVNNTVYDPLQPELDSGGGGSDIIKLLNEQVNKEMQSSNLYMSMSSWCYTHSLDGAGLFLFDHAAEEYEHAKKLIIFLNENNVPVQLTSISAPEHKFEGLTQIFQKAYEHEQHISESINNIVDHAIKSKDHATFNFLQWYVAEQHEEEVLFKDILDKIELIGNENHGLYLADQYVKGIAKSRKS

SEQ ID NO: 9504 - protein, 1315 aa, Artificial Sequence
  SARS-CoV-2/Australia/NSW56/2020__EPI_ISL_417408 spike protein (1-1147)(A972C_R995C) Ferritin construct
MFVFLVLLPLVSSQCVNLTTRTQLPPAYTNSFTRGVYYPDKVFRSSVLHSTQDLFLPFFSNVTWFHAIHVSGTNGTKRFDNPVLPFNDGVYFASTEKSNIIRGWIFGTTLDSKTQSLLIVNNATNVVIKVCEFQFCNDPFLGVYYHKNNKSWMESEFRVYSSANNCTFEYVSQPFLMDLEGKQGNFKNLREFVFKNIDGYFKIYSKHTPINLVRDLPQGFSALEPLVDLPIGINITRFQTLLALHRSYLTPGDSSSGWTAGAAAYYVGYLQPRTFLLKYNENGTITDAVDCALDPLSETKCTLKSFTVEKGIYQTSNFRVQPTESIVRFPNITNLCPFGEVFNATRFASVYAWNRKRISNCVADYSVLYNSASFSTFKCYGVSPTKLNDLCFTNVYADSFVIRGDEVRQIAPGQTGKIADYNYKLPDDFTGCVIAWNSNNLDSKVGGNYNYLYRLFRKSNLKPFERDISTEIYQAGSTPCNGVEGFNCYFPLQSYGFQPTNGVGYQPYRVVVLSFELLHAPATVCGPKKSTNLVKNKCVNFNFNGLTGTGVLTESNKKFLPFQQFGRDIADTTDAVRDPQTLEILDITPCSFGGVSVITPGTNTSNQVAVLYQDVNCTEVPVAIHADQLTPTWRVYSTGSNVFQTRAGCLIGAEHVNNSYECDIPIGAGICASYQTQTNSPRRARSVASQSIIAYTMSLGAENSVAYSNNSIAIPTNFTISVTTEILPVSMTKTSVDCTMYICGDSTECSNLLLQYGSFCTQLNRALTGIAVEQDKNTQEVFAQVKQIYKTPPIKDFGGFNFSQILPDSSKPSKRSFIEDLLFNKVTLADAGFIKQYGDCLGDIAARDLICAQKFNGLTVLPPLLTDEMIAQYTSALLAGTITSGWTFGAGAALQIPFAMQMAYRFNGIGVTQNVLYENQKLIANQFNSAIGKIQDSLSSTASALGKLQDVVNQNAQALNTLVKQLSSNFGCISSVLNDILSRLDKVEAEVQIDCLITGRLQSLQTYVTQQLIRAAEIRASANLAATKMSECVLGQSKRVDFCGKGYHLMSFPQSAPHGVVFLHVTYVPAQEKNFTTAPAICHDGKAHFPREGVFVSNGTHWFVTQRNFYEPQIITTDNTFVSGNCDVVIGIVNNTVYDPLQPELDSGGGGSDIIKLLNEQVNKEMQSSNLYMSMSSWCYTHSLDGAGLFLFDHAAEEYEHAKKLIIFLNENNVPVQLTSISAPEHKFEGLTQIFQKAYEHEQHISESINNIVDHAIKSKDHATFNFLQWYVAEQHEEEVLFKDILDKIELIGNENHGLYLADQYVKGIAKSRKS

SEQ ID NO: 9505 - protein, 1315 aa, Artificial Sequence
  SARS-CoV-2/Iceland/280/2020__EPI_ISL_417608 spike protein (1-1147)(A972C_R995C) Ferritin construct
MFVFLVLLPLVSSQCVNLTTRTQLPPAYTNSFTRGVYYPDKVFRSSVLHSTQDLFLPFFSNVTWFHAIHVSGTNGTKRFDNPVLPFNDGVYFASTEKSNIIRGWIFGTTLDSKTQSLLIVNNATNVVIKVCEFQFCNDPFLGVYYHKNNKSWMESEFRVYSSANNCTFEYVSQPFLMDLEGKQGNFKNLREFVFKNIDGYFKIYSKHTPINLVRDLPQGFSALEPLVDLPIGINITRFQTLLALHRSYLTPGDSSSGWTAGAAAYYVGYLQPRTFLLKYNENGTITDAVDCALDPLSETKCTLKSFTVEKGIYQTSNFRVQPTESIVRFPNITNLCPFGEVFNATRFASVYAWNRKRISNCVADYSVLYNSASFSTFKCYGVSPTKLNDLCFTNVYADSFVIRGDEVRQIAPGQTGKIADYNYKLPDDFTGCVIAWNSNNLDSKVGGNYNYLYRLFRKSNLKPFERDISTEIYQAGSTPCNGVEGFNCYFPLQSYGFQPTNGVGYQPYRVVVLSFELLHAPATVCGPKKSTNLVKNKCVNFNFNGLTGTGVLTESNKKFLPFQQFGRDIADTTDAVRDPQTLEILDITPCSFGGVSVITPGTNTSNQVAVLYQGVNCTEVPVAIHADQLTPTWRVYSTGSNVFQTRAGCLIGAEHVNNSYECDIPIGAGICASYHTQTNSPRRARSVASQSIIAYTMSLGAENSVAYSNNSIAIPTNFTISVTTEILPVSMTKTSVDCTMYICGDSTECSNLLLQYGSFCTQLNRALTGIAVEQDKNTQEVFAQVKQIYKTPPIKDFGGFNFSQILPDPSKPSKRSFIEDLLFNKVTLADAGFIKQYGDCLGDIAARDLICAQKFNGLTVLPPLLTDEMIAQYTSALLAGTITSGWTFGAGAALQIPFAMQMAYRFNGIGVTQNVLYENQKLIANQFNSAIGKIQDSLSSTASALGKLQDVVNQNAQALNTLVKQLSSNFGCISSVLNDILSRLDKVEAEVQIDCLITGRLQSLQTYVTQQLIRAAEIRASANLAATKMSECVLGQSKRVDFCGKGYHLMSFPQSAPHGVVFLHVTYVPAQEKNFTTAPAICHDGKAHFPREGVFVSNGTHWFVTQRNFYEPQIITTDNTFVSGNCDVVIGIVNNTVYDPLQPELDSGGGGSDIIKLLNEQVNKEMQSSNLYMSMSSWCYTHSLDGAGLFLFDHAAEEYEHAKKLIIFLNENNVPVQLTSISAPEHKFEGLTQIFQKAYEHEQHISESINNIVDHAIKSKDHATFNFLQWYVAEQHEEEVLFKDILDKIELIGNENHGLYLADQYVKGIAKSRKS

SEQ ID NO: 9506 - protein, 1315 aa, Artificial Sequence; identical to SEQ ID NO: 9461
  SARS-CoV-2/Iceland/247/2020__EPI_ISL_417575 spike protein (1-1147)(A972C_R995C) Ferritin construct

SEQ ID NO: 9507 - protein, 1315 aa, Artificial Sequence
  SARS-CoV-2/Iceland/238/2020__EPI_ISL_417566 spike protein (1-1147)(A972C_R995C) Ferritin construct
MFVFLVLLPLVSSQCVNLTTRTQLPPAYTNSFTRGVYYPDKVFRSSVLHSTQDLFLPFFSNVTWFHAIHVSGTNGTKRFDNPVLPFNDGVYFASTEKSNIIRGWIFGTTLDSKTQSLLIVNNATNVVIKVCEFQFCNDPFLGVYYHKNNKSWMESEFRVYSSANNCTFEYVSQPFLMDLEGKQGNFKNLREFVFKNIDGYFKIYSKHTPINLVRDLPQGFSALEPLVDLPIGINITRFQTLLALHRSYLTPGDSSSGWTAGAAAYYVGYLQPRTFLLKYNENGTITDAVDCALDPLSETKCTLKSFTVEKGIYQTSNFRVQPTESIVRFPNITNLCPFGEVFNATRFASVYAWNRKRISNCVADYSVLYNSASFSTFKCYGVSPTKLNDLCFTNVYADSFVIRGDEVRQIAPGQTGKIADYNYKLPDDFTGCVIAWNSNNLDSKVGGNYNYLYRLFRKSNLKPFERDISTEIYQAGSTPCNGVEGFNCYFPLQSYGFQPTNGVGYQPYRVVVLSFELLHAPATVCGPKKSTNLVKNKCVNFNFNGLTGTGVLTESNKKFLPFQQFGRDIADTTDAVRDPQTLEILDITPCSFGGVSVITPGTNTSNQVAVLYQGVNCTEVPVAIHADQLTPTWRVYSTGSNVFQTRAGCLIGAEHVNNSYECDIPIGAGICASYQTQTNSPRRARSVASQSIIAYTMSLGAENSVAYSNNSIAIPTNFTISVTTEILPVSMTKTSVDCTMYICGDSTECSNLLLQYGSFCTQLNRALTGIAVEQDKNTQEVFAQVKQIYKTPPIKDFGGFNFSQILPDPSKPSKRSFIEDLLFNKVTLADVGFIKQYGDCLGDIAARDLICAQKFNGLTVLPPLLTDEMIAQYTSALLAGTITSGWTFGAGAALQIPFAMQMAYRFNGIGVTQNVLYENQKLIANQFNSAIGKIQDSLSSTASALGKLQDVVNQNAQALNTLVKQLSSNFGCISSVLNDILSRLDKVEAEVQIDCLITGRLQSLQTYVTQQLIRAAEIRASANLAATKMSECVLGQSKRVDFCGKGYHLMSFPQSAPHGVVFLHVTYVPAQEKNFTTAPAICHDGKAHFPREGVFVSNGTHWFVTQRNFYEPQIITTDNTFVSGNCDVVIGIVNNTVYDPLQPELDSGGGGSDIIKLLNEQVNKEMQSSNLYMSMSSWCYTHSLDGAGLFLFDHAAEEYEHAKKLIIFLNENNVPVQLTSISAPEHKFEGLTQIFQKAYEHEQHISESINNIVDHAIKSKDHATFNFLQWYVAEQHEEEVLFKDILDKIELIGNENHGLYLADQYVKGIAKSRKS

SEQ ID NO: 9508 - protein, 1315 aa, Artificial Sequence
  SARS-CoV-2/Greece/16/2020__EPI_ISL_418265 spike protein (1-1147)(A972C_R995C) Ferritin construct
MFVFLVLLPLVSSQCVNLTTRTQLPPAYTNSFTRGVYYPDKVFRSSVLHSTQDLFLPFFSNVTWFHAIHVSGTNGTKRFDNPVLPFNDGVYFASTEKSNIIRGWIFGTTLDSKTQSLLIVNNATNVVIKVCEFQFCNDPFLGVYYHKNNKSWMESEFRVYSSANNCTFEYVSQPFLMDLEGKQGNFKNLREFVFKNVDGYFKIYSKHTPINLVRDLPQGFSALEPLVDLPIGINITRFQTLLALHRSYLTPGDSSSGWTAGAAAYYVGYLQPRTFLLKYNENGTITDAVDCALDPLSETKCTLKSFTVEKGIYQTSNFRVQPTESIVRFPNITNLCPFGEVFNATRFASVYAWNRKRISNCVADYSVLYNSASFSTFKCYGVSPTKLNDLCFTNVYADSFVIRGDEVRQIAPGQTGKIADYNYKLPDDFTGCVIAWNSNNLDSKVGGNYNYLYRLFRKSNLKPFERDISTEIYQAGSTPCNGVEGFNCYFPLQSYGFQPTNGVGYQPYRVVVLSFELLHAPATVCGPKKSTNLVKNKCVNFNFNGLTGTGVLTESNKKFLPFQQFGRDIADTTDAVRDPQTLEILDITPCSFGGVSVITPGTNTSNQVAVLYQDVNCTEVPVAIHADQLTPTWRVYSTGSNVFQTRAGCLIGAEHVNNSYECDIPIGAGICASYQTQTNSPRRARSVASQSIIAYTMSLGAENSVAYSNNSIAIPTNFTISVTTEILPVSMTKTSVDCTMYICGDSTECSNLLLQYGSFCTQLNRALTGIAVEQDKNTQEVFAQVKQIYKTPPIKDFGGFNFSQILPDPSKPSKRSFIEDLLFNKVTLADAGFIKQYGDCLGDIAARDLICAQKFNGLTVLPPLLTDEMIAQYTSALLAGTITSGWTFGAGAALQIPFAMQMAYRFNGIGVTQNVLYENQKLIANQFNSAIGKIQDSLSSTASALGKLQDVVNQNAQALNTLVKQLSSNFGCISSVLNDILSRLDKVEAEVQIDCLITGRLQSLQTYVTQQLIRAAEIRASANLAATKMSECVLGQSKRVDFCGKGYHLMSFPQSAPHGVVFLHVTYVPAQEKNFTTAPAICHDGKAHFPREGVFVSNGTHWFVTQRNFYEPQIITTDNTFVSGNCDVVIGIVNNTVYDPLQPELDSGGGGSDIIKLLNEQVNKEMQSSNLYMSMSSWCYTHSLDGAGLFLFDHAAEEYEHAKKLIIFLNENNVPVQLTSISAPEHKFEGLTQIFQKAYEHEQHISESINNIVDHAIKSKDHATFNFLQWYVAEQHEEEVLFKDILDKIELIGNENHGLYLADQYVKGIAKSRKS

SEQ ID NO: 9509 - protein, 1315 aa, Artificial Sequence
  SARS-CoV-2/Iceland/319/2020__EPI_ISL_417648 spike protein (1-1147)(A972C_R995C) Ferritin construct
MFVFLVLLPLVSSQCVNLTTRTQLPPAYTNSFTRGVYYPDKVFRSSVLHSTQDLFLPFFSNVTWFHAIHVSGTNGTKRFDNPVLPFNDGVYFASTEKSNIIRGWIFGTTLDSKTQSLLIVNNATNVVIKVCEFQFCNDPFLGVYYHKNNKSWMESEFRVYSSANNCTFEYVSQPFLIDLEGKQGNFKNLREFVFKNIDGYFKIYSKHTPINLVRDLPQGFSALEPLVDLPIGINITRFQTLLALHRSYLTPGDSSSGWTAGAAAYYVGYLQPRTFLLKYNENGTITDAVDCALDPLSETKCTLKSFTVEKGIYQTSNFRVQPTESIVRFPNITNLCPFGEVFNATRFASVYAWNRKRISNCVADYSVLYNSASFSTFKCYGVSPTKLNDLCFTNVYADSFVIRGDEVRQIAPGQTGKIADYNYKLPDDFTGCVIAWNSNNLDSKVGGNYNYLYRLFRKSNLKPFERDISTEIYQAGSTPCNGVEGFNCYFPLQSYGFQPTNGVGYQPYRVVVLSFELLHAPATVCGPKKSTNLVKNKCVNFNFNGLTGTGVLTESNKKFLPFQQFGRDIADTTDAVRDPQTLEILDITPCSFGGVSVITPGTNTSNQVAVLYQGVNCTEVPVAIHADQLTPTWRVYSTGSNVFQTRAGCLIGAEHVNNSYECDIPIGAGICASYQTQTNSPRRARSVASQSIIAYTMSLGAENSVAYSNNSIAIPTNFTISVTTEILPVSMTKTSVDCTMYICGDSTECSNLLLQYGSFCTQLNRALTGIAVEQDKNTQEVFAQVKQIYKTPPIKDFGGFNFSQILPDPSKPSKRSFIEDLLFNKVTLADAGFIKQYGDCLGDIAARDLICAQKFNGLTVLPPLLTDEMIAQYTSALLAGTITSGWTFGAGAALQIPFAMQMAYRFNGIGVTQNVLYENQKLIANQFNSAIGKIQDSLSSTASALGKLQDVVNQNAQALNTLVKQLSSNFGCISSVLNDILSRLDKVEAEVQIDCLITGRLQSLQTYVTQQLIRAAEIRASANLAATKMSECVLGQSKRVDFCGKGYHLMSFPQSAPHGVVFLHVTYVPAQEKNFTTAPAICHDGKAHFPREGVFVSNGTHWFVTQRNFYEPQIITTDNTFVSGNCDVVIGIVNNTVYDPLQPELDSGGGGSDIIKLLNEQVNKEMQSSNLYMSMSSWCYTHSLDGAGLFLFDHAAEEYEHAKKLIIFLNENNVPVQLTSISAPEHKFEGLTQIFQKAYEHEQHISESINNIVDHAIKSKDHATFNFLQWYVAEQHEEEVLFKDILDKIELIGNENHGLYLADQYVKGIAKSRKS

SEQ ID NO: 9510 - protein, 1315 aa, Artificial Sequence
  SARS-CoV-2/Congo/94/2020__EPI_ISL_417947 spike protein (1-1147)(A972C_R995C) Ferritin construct
MFVFLVLLPLVSSQCVNLTTRTQLPPAYTNSFTRGVYYPDKVFRSSVLHSTQDLFLPFFSNVTWFHAIHVSGTNGTKRFDNPVLPFNDGVYFASTEKSNIIRGWIFGTTLDSKTQSLLIVNNATNVVIKVCEFQFCNDPFLGVYYHKNNKSWMESEFRVYSSANNCTFEYVSQPFLMDLEGKQGNFKNLREFVFKNIDGYFKIYSKHTPINLVRDLPQGFSALEPLVDLPIGINITRFQTLLALHRSYLTPGDSSSGWTAGAAAYYVGYLQPRTFLLKYNENGTITDAVDCALDPLSETKCTLKSFTVEKGIYQTSNFRVQPTESIVRFPNITNLCPFGEVFNATRFASVYAWNRKRISNCVADYSVLYNSASFSTFKCYGVSPTKLNDLCFTNVYADSFVIRGDEVRQIAPGQTGKIADYNYKLPDDFTGCVIAWNSNNLDSKVGGNYNYLYRLFRKSNLKPFERDISTEIYQAGSTPCNGVEGFNCYFPLQSYGFQPTNGVGYQPYRVVVLSFELLHAPATVCGPKKSTNLVKNKCVNFNFNGLTGTGVLTESNKKFLPFQQFGRDIADTTDAVRDPQTLEILDITPCSFGGVSVITPGTNTSNQVAVLYQGVNCTEVPVAIHADQLTPTWRVYSTGSNVFQTRAGCLIGAEHVNNSYECDIPIGAGICASYQTQTNSPRRARSVASQSIIAYTMSLGAENSVAYSNNSIAIPTNFTISVTTEILPVSMTKTSVDCTMYICGDSTECSNLLLQYGSFCTQLNRALTGIAVEQDKNTQEVFAQVKQIYKTPPIKDFGGFNFSQILPDPSKPSKRSFIEDILFNKVTLADAGFIKQYGDCLGDIAARDLICAQKFNGLTVLPPLLTDEMIAQYTSALLAGTITSGWTFGAGAALQIPFAMQMAYRFNGIGVTQNVLYENQKLIANQFNSAIGKIQDSLSSTASALGKLQDVVNQNAQALNTLVKQLSSNFGCISSVLNDILSRLDKVEAEVQIDCLITGRLQSLQTYVTQQLIRAAEIRASANLAATKMSECVLGQSKRVDFCGKGYHLMSFPQSAPHGVVFLHVTYVPAQEKNFTTAPAICHDGKAHFPREGVFVSNGTHWFVTQRNFYEPQIITTDNTFVSGNCDVVIGIVNNTVYDPLQPELDSGGGGSDIIKLLNEQVNKEMQSSNLYMSMSSWCYTHSLDGAGLFLFDHAAEEYEHAKKLIIFLNENNVPVQLTSISAPEHKFEGLTQIFQKAYEHEQHISESINNIVDHAIKSKDHATFNFLQWYVAEQHEEEVLFKDILDKIELIGNENHGLYLADQYVKGIAKSRKS

SEQ ID NO: 9511 - protein, 1315 aa, Artificial Sequence
  SARS-CoV-2/Congo/158/2020__EPI_ISL_417950 spike protein (1-1147)(A972C_R995C) Ferritin construct
MFVFLVLLPLVSSQCVNLTTRTQLPPAYTNSFTRGVYYPDKVFRSSVLHSTQDLFLPFFSNVTWFHAIHVSGTNGTKRFDNPVLPFNDGVYFASTEKSNIIRGWIFGTTLDSKTQSLLIVNNATNVVIKVCEFQFCNDPFLGVYYHKNNKSWMESEFRVYSSANNCTFEYVSQPFLMDLEGKQGNFKNLREFVFKNIDGYFKIYSKHTPINLVRDLPQGFSALEPLVDLPIGINITRFQTLLALHRSYLTPGDSSSGWTAGAAAYYVGYLQPRTFLLKYNENGTITDAVDCALDPLSETKCTLKSFTVEKGIYQTSNFRVQPTESIVRFPNITNLCPFGEVFNATRFASVYAWNRKRISNCVADYSVLYNSASFSTFKCYGVSPTKLNDLCFTNVYADSFVIRGDEVRQIAPGQTGKIADYNYKLPDDFTGCVIAWNSNNLDSKVGGNYNYLYRLFRKSNLKPFERDISTEIYQAGSTPCNGVEGFNCYFPLQSYGFQPTNGVGYQPYRVVVLSFELLHAPATVCGPKKSTNLVKNKCVNFNFNGLTGTGVLTESNKKFLPFQQFGRDIADTTDAVRDPQTLEILDITPCSFGGVSVITPGTNTSNQVAVLYQDVNCTEVPVAIHADQLTPTWRVYSTGSNVFQTRAGCLIGAEHVNNSYECDIPIGAGICASYQTQTNSPRRARSVASQSIIAYTMSLGAENSVAYSNNSIAIPTNFTISVTTEILPVSMTKTSVDCTMYICGDSTECSNLLLQYGSFCTQLNRALTGIAVEQDKNTQEVFAQVKQIYKTPPIKDFGGFNFSQILPDPSKPSKRSFIEDLLFNKVTLADAGFIKQYGDCLGDIAARDLICAQKFNGLTVLPPLLTDEMIAQYTSALLAGTITSGWTFGAGAALQIPFAMQMAYRFNGIGVTQNVLYENQKLIANQFNSAIGKIQDSLSSTASALGKLQDVVNQNAQALNTLVKQLSSNFGCISSVLNDILSRLDKVEAEVQIDCLITGRLQSLQTYVTQQLIRAAEIRASANLAATKMSECVLGQSKRVDFCGKGYHLMSFPQSAPHGVVFLHVTYVPAQEKNFTTAPAICHDGKAHFPREGVFVSNGTHWFVTQRNFYEPQIITTDNTFLSGNCDVVIGIVNNTVYDPLQPELDSGGGGSDIIKLLNEQVNKEMQSSNLYMSMSSWCYTHSLDGAGLFLFDHAAEEYEHAKKLIIFLNENNVPVQLTSISAPEHKFEGLTQIFQKAYEHEQHISESINNIVDHAIKSKDHATFNFLQWYVAEQHEEEVLFKDILDKIELIGNENHGLYLADQYVKGIAKSRKS

SEQ ID NO: 9512 - protein, 1315 aa, Artificial Sequence
  SARS-CoV-2/USA/UT-00034/2020__EPI_ISL_417977 spike protein (1-1147)(A972C_R995C) Ferritin construct
MFVFLVLLPLVSSQCVNLTTRTQLPPAYTNSFTRGVYYPDKVFRSSVLHSTQDLFLPFFSNVTWFHAIHVSGTNGTKRFDNPVLPFNDGVYFASTEKSNIIRGWIFGTTLDSKTQSLLIVNNATNVVIKVCEFQFCNDPFLGVYYYKNNKSWMESEFRVYSSANNCTFEYVSQPFLMDLEGKQGNFKNLREFVFKNIDGYFKIYSKHTPINLVRDLPQGFSALEPLVDLPIGINITRFQTLLALHRSYLTPGDSSSGWTAGAAAYYVGYLQPRTFLLKYNENGTITDAVDCALDPLSETKCTLKSFTVEKGIYQTSNFRVQPTESIVRFPNITNLCPFGEVFNATRFASVYAWNRKRISNCVADYSVLYNSASFSTFKCYGVSPTKLNDLCFTNVYADSFVIRGDEVRQIAPGQTGKIADYNYKLPDDFTGCVIAWNSNNLDSKVGGNYNYLYRLFRKSNLKPFERDISTEIYQAGSTPCNGVEGFNCYFPLQSYGFQPTNGVGYQPYRVVVLSFELLHAPATVCGPKKSTNLVKNKCVNFNFNGLTGTGVLTESNKKFLPFQQFGRDIADTTDAVRDPQTLEILDITPCSFGGVSVITPGTNTSNQVAVLYQGVNCTEVPVAIHADQLTPTWRVYSTGSNVFQTRAGCLIGAEHVNNSYECDIPIGAGICASYQTQTNSPRRARSVASQSIIAYTMSLGAENSVAYSNNSIAIPTNFTISVTTEILPVSMTKTSVDCTMYICGDSTECSNLLLQYGSFCTQLNRALTGIAVEQDKNTQEVFAQVKQIYKTPPIKDFGGFNFSQILPDPSKPSKRSFIEDLLFNKVTLADAGFIKQYGDCLGDIAARDLICAQKFNGLTVLPPLLTDEMIAQYTSALLAGTITSGWTFGAGAALQIPFAMQMAYRFNGIGVTQNVLYENQKLIANQFNSAIGKIQDSLSSTASALGKLQDVVNQNAQALNTLVKQLSSNFGCISSVLNDILSRLDKVEAEVQIDCLITGRLQSLQTYVTQQLIRAAEIRASANLAATKMSECVLGQSKRVDFCGKGYHLMSFPQSAPHGVVFLHVTYVPAQEKNFTTAPAICHDGKAHFPREGVFVSNGTHWFVTQRNFYEPQIITTDNTFVSGNCDVVIGIVNNTVYDPLQPELDSGGGGSDIIKLLNEQVNKEMQSSNLYMSMSSWCYTHSLDGAGLFLFDHAAEEYEHAKKLIIFLNENNVPVQLTSISAPEHKFEGLTQIFQKAYEHEQHISESINNIVDHAIKSKDHATFNFLQWYVAEQHEEEVLFKDILDKIELIGNENHGLYLADQYVKGIAKSRKS

SEQ ID NO: 9513 - protein, 1315 aa, Artificial Sequence
  SARS-CoV-2/USA/UT-00033/2020__EPI_ISL_417976 spike protein (1-1147)(A972C_R995C) Ferritin construct
MFVFLVLLPLVSSQCVNLTTRTQLPPAYTNSFTRGVYYPDKVFRSSVLHSTQDLFLPFFSNVTWFHAIHVSGTNGTKRFDNPVLPFNDGVYFASTEKSNIIRGWIFGTTLDSKTQSLLIVNNATNVVIKVCEFQFCNDPFLGVYYHKNNKSWMESEFRVYSSANNCTFEYVSQPFLMDLEGKQGNFKNLREFVFKNIDGYFKIYSKHTPINLVRDLPQGFSALEPLVDLPIGINITRFQTLLALHRSYLTPGDSSSGLTAGAAAYYVGYLQPRTFLLKYNENGTITDAVDCALDPLSETKCTLKSFTVEKGIYQTSNFRVQPTESIVRFPNITNLCPFGEVFNATRFASVYAWNRKRISNCVADYSVLYNSASFSTFKCYGVSPTKLNDLCFTNVYADSFVIRGDEVRQIAPGQTGKIADYNYKLPDDFTGCVIAWNSNNLDSKVGGNYNYLYRLFRKSNLKPFERDISTEIYQAGSTPCNGVEGFNCYFPLQSYGFQPTNGVGYQPYRVVVLSFELLHAPATVCGPKKSTNLVKNKCVNFNFNGLTGTGVLTESNKKFLPFQQFGRDIADTTDAVRDPQTLEILDITPCSFGGVSVITPGTNTSNQVAVLYQGVNCTEVPVAIHADQLTPTWRVYSTGSNVFQTRAGCLIGAEHVNNSYECDIPIGAGICASYQTQTNSPRRARSVASQSIIAYTMSLGAENSVAYSNNSIAIPTNFTISVTTEILPVSMTKTSVDCTMYICGDSTECSNLLLQYGSFCTQLNRALTGIAVEQDKNTQEVFAQVKQIYKTPPIKDFGGFNFSQILPDPSKPSKRSFIEDLLFNKVTLADAGFIKQYGDCLGDIAARDLICAQKFNGLTVLPPLLTDEMIAQYTSALLAGTITSGWTFGAGAALQIPFAMQMAYRFNGIGVTQNVLYENQKLIANQFNSAIGKIQDSLSSTASALGKLQDVVNQNAQALNTLVKQLSSNFGCISSVLNDILSRLDKVEAEVQIDCLITGRLQSLQTYVTQQLIRAAEIRASANLAATKMSECVLGQSKRVDFCGKGYHLMSFPQSAPHGVVFLHVTYVPAQEKNFTTAPAICHDGKAHFPREGVFVSNGTHWFVTQRNFYEPQIITTDNTFVSGNCDVVIGIVNNTVYDPLQPELDSGGGGSDIIKLLNEQVNKEMQSSNLYMSMSSWCYTHSLDGAGLFLFDHAAEEYEHAKKLIIFLNENNVPVQLTSISAPEHKFEGLTQIFQKAYEHEQHISESINNIVDHAIKSKDHATFNFLQWYVAEQHEEEVLFKDILDKIELIGNENHGLYLADQYVKGIAKSRKS

SEQ ID NO: 9514 - protein, 1315 aa, Artificial Sequence
  SARS-CoV-2/USA/WI-13/2020__EPI_ISL_417516 spike protein (1-1147)(A972C_R995C) Ferritin construct
MFVFLVLLPLVSSQCVNLTTRTQLPPAYTNSFTRGVYYPDKVFRSSVLHSTQDLFLPFFSNVTWFHAIHVSGTNGTKRFDNPVLPFNDGVYFASTEKSNIIRGWIFGTTLDSKTQSLLIVNNATNVVIKVCEFQFCNDPFLGVYYHKNNKSWMESEFRVYSSANNCTFEYVSQPFLMDLEGKQGNFKNLREFVFKNIDGYFKIYSKHTPINLVRDLPQGFSALEPLVDLPIGINITRFQTLLALHRSYLTPGDSSSGWTAGAAAYYVGYLQPRTFLLKYNENGTITDAVDCALDPLSETKCTLKSFTVEKGIYQTSNFRVLPTESIVRFPNITNLCPFGEVFNATRFASVYAWNRKRISNCVADYSVLYNSASFSTFKCYGVSPTKLNDLCFTNVYADSFVIRGDEVRQIAPGQTGKIADYNYKLPDDFTGCVIAWNSNNLDSKVGGNYNYLYRLFRKSNLKPFERDISTEIYQAGSTPCNGVEGFNCYFPLQSYGFQPTNGVGYQPYRVVVLSFELLHAPATVCGPKKSTNLVKNKCVNFNFNGLTGTGVLTESNKKFLPFQQFGRDIADTTDAVRDPQTLEILDITPCSFGGVSVITPGTNTSNQVAVLYQGVNCTEVPVAIHADQLTPTWRVYSTGSNVFQTRAGCLIGAEHVNNSYECDIPIGAGICASYQTQTNSPRRARSVASQSIIAYTMSLGAENSVAYSNNSIAIPTNFTISVTTEILPVSMTKTSVDCTMYICGDSTECSNLLLQYGSFCTQLNRALTGIAVEQDKNTQEVFAQVKQIYKTPPIKDFGGFNFSQILPDPSKPSKRSFIEDLLFNKVTLADAGFIKQYGDCLGDIAARDLICAQKFNGLTVLPPLLTDEMIAQYTSALLAGTITSGWTFGAGAALQIPFAMQMAYRFNGIGVTQNVLYENQKLIANQFNSAIGKIQDSLSSTASALGKLQDVVNQNAQALNTLVKQLSSNFGCISSVLNDILSRLDKVEAEVQIDCLITGRLQSLQTYVTQQLIRAAEIRASANLAATKMSECVLGQSKRVDFCGKGYHLMSFPQSAPHGVVFLHVTYVPAQEKNFTTAPAICHDGKAHFPREGVFVSNGTHWFVTQRNFYEPQIITTDNTFVSGNCDVVIGIVNNTVYDPLQPELDSGGGGSDIIKLLNEQVNKEMQSSNLYMSMSSWCYTHSLDGAGLFLFDHAAEEYEHAKKLIIFLNENNVPVQLTSISAPEHKFEGLTQIFQKAYEHEQHISESINNIVDHAIKSKDHATFNFLQWYVAEQHEEEVLFKDILDKIELIGNENHGLYLADQYVKGIAKSRKS

SEQ ID NO: 9515 - protein, 1314 aa, Artificial Sequence
  SARS-CoV-2/India/1-27/2020__EPI_ISL_413522 spike protein (1-1146)(A971C_R994C) Ferritin construct
MFVFLVLLPLVSSQCVNLTTRTQLPPAYTNSFTRGVYYPDKVFRSSVLHSTQDLFLPFFSNVTWFHAIHVSGTNGTKRFDNPVLPFNDGVYFASTEKSNIIRGWIFGTTLDSKTQSLLIVNNATNVVIKVCEFQFCNDPFLGVYHKNNKSWMESEFRVYSSANNCTFEYVSQPFLMDLEGKQGNFKNLREFVFKNIDGYFKIYSKHTPINLVRDLPQGFSALEPLVDLPIGINITRFQTLLALHRSYLTPGDSSSGWTAGAAAYYVGYLQPRTFLLKYNENGTITDAVDCALDPLSETKCTLKSFTVEKGIYQTSNFRVQPTESIVRFPNITNLCPFGEVFNATRFASVYAWNRKRISNCVADYSVLYNSASFSTFKCYGVSPTKLNDLCFTNVYADSFVIRGDEVIQIAPGQTGKIADYNYKLPDDFTGCVIAWNSNNLDSKVGGNYNYLYRLFRKSNLKPFERDISTEIYQAGSTPCNGVEGFNCYFPLQSYGFQPTNGVGYQPYRVVVLSFELLHAPATVCGPKKSTNLVKNKCVNFNFNGLTGTGVLTESNKKFLPFQQFGRDIADTTDAVRDPQTLEILDITPCSFGGVSVITPGTNTSNQVAVLYQDVNCTEVPVAIHADQLTPTWRVYSTGSNVFQTRAGCLIGAEHVNNSYECDIPIGAGICASYQTQTNSPRRARSVASQSIIAYTMSLGAENSVAYSNNSIAIPTNFTISVTTEILPVSMTKTSVDCTMYICGDSTECSNLLLQYGSFCTQLNRALTGIAVEQDKNTQEVFAQVKQIYKTPPIKDFGGFNFSQILPDPSKPSKRSFIEDLLFNKVTLADAGFIKQYGDCLGDIAARDLICAQKFNGLTVLPPLLTDEMIAQYTSALLAGTITSGWTFGAGAALQIPFAMQMAYRFNGIGVTQNVLYENQKLIANQFNSAIGKIQDSLSSTASALGKLQDVVNQNAQALNTLVKQLSSNFGCISSVLNDILSRLDKVEAEVQIDCLITGRLQSLQTYVTQQLIRAAEIRASANLAATKMSECVLGQSKRVDFCGKGYHLMSFPQSAPHGVVFLHVTYVPAQEKNFTTAPAICHDGKAHFPREGVFVSNGTHWFVTQRNFYEPQIITTDNTFVSGNCDVVIGIVNNTVYDPLQPELDSGGGGSDIIKLLNEQVNKEMQSSNLYMSMSSWCYTHSLDGAGLFLFDHAAEEYEHAKKLIIFLNENNVPVQLTSISAPEHKFEGLTQIFQKAYEHEQHISESINNIVDHAIKSKDHATFNFLQWYVAEQHEEEVLFKDILDKIELIGNENHGLYLADQYVKGIAKSRKS

SEQ ID NO: 9516 - protein, 1309 aa, Artificial Sequence
  SARS-CoV-2/pangolin/Guangxi/P4L/2017__EPI_ISL_410538 spike protein (1-1141)(A966C_R989C) Ferritin construct
MFVFLFVLPLVSSQCVNLTTRTGIPPGYTNSSTRGVYYPDKVFRSSILHLTQDLFLPFFSNVTWFNTINYQGGFKKFDNPVLPFNDGVYFASTEKSNIIRGWIFGTTLDARTQSLLIVNNATNVVIKVCEFQFCTDPFLGVYYHNNNKTWVENEFRVYSSANNCTFEYISQPFLMDLEGKQGNFKNLREFVFKNVDGYFKIYSKHTPIDLVRDLPRGFAALEPLVDLPIGINITRFQTLLALHRSYLTPGNLESGWTTGAAAYYVGYLQQRTFLLSYNQNGTITDAVDCSLDPLSETKCTLKSLTVEKGIYQTSNFRVQPTISIVRFPNITNLCPFGEVFNASKFASVYAWNRKRISNCVADYSVLYNSTSFSTFKCYGVSPTKLNDLCFTNVYADSFVVKGDEVRQIAPGQTGVIADYNYKLPDDFTGCVIAWNSVKQDALTGGNYGYLYRLFRKSKLKPFERDISTEIYQAGSTPCNGQVGLNCYYPLERYGFHPTTGVNYQPFRVVVLSFELLNGPATVCGPKLSTTLVKDKCVNFNFNGLTGTGVLTTSKKQFLPFQQFGRDISDTTDAVRDPQTLEILDITPCSFGGVSVITPGTNTSNQVAVLYQDVNCTEVPMAIHAEQLTPAWRVYSAGANVFQTRAGCLVGAEHVNNSYECDIPVGAGICASYHSMSSLRSVNQRSIIAYTMSLGAENSVAYSNNSIAIPTNFTISVTTEILPVSMTKTSVDCTMYICGDSIECSNLLLQYGSFCTQLNRALTGIAVEQDKNTQEVFAQVKQIYKTPPIKDFGGFNFSQILPDPSKPSKRSFIEDLLFNKVTLADAGFIKQYGDCLGDIAARDLICAQKFNGLTVLPPLLTDEMIAQYTSALLAGTITSGWTFGAGAALQIPFAMQMAYRFNGIGVTQNVLYENQKLIANQFNSAIGKIQDSLSSTASALGKLQDVVNQNAQALNTLVKQLSSNFGCISSVLNDILSRLDKVEAEVQIDCLITGRLQSLQTYVTQQLIRAAEIRASANLAATKMSECVLGQSKRVDFCGKGYHLMSFPQSAPHGVVFLHVTYVPAQEKNFTTAPAICHEGKAHFPREGVFVSNGTHWFITQRNFYEPQIITTDNTFVSGSCDVVIGIVNNTVYDPLQPELDSGGGGSDIIKLLNEQVNKEMQSSNLYMSMSSWCYTHSLDGAGLFLFDHAAEEYEHAKKLIIFLNENNVPVQLTSISAPEHKFEGLTQIFQKAYEHEQHISESINNIVDHAIKSKDHATFNFLQWYVAEQHEEEVLFKDILDKIELIGNENHGLYLADQYVKGIAKSRKS

SEQ ID NO: 9517 - protein, 1309 aa, Artificial Sequence
  SARS-CoV-2/pangolin/Guangxi/P5L/2017__EPI_ISL_410540 spike protein (1-1141)(A966C_R989C) Ferritin construct
MFVFLFVLPLVSSQCVNLTTRTGIPPGYTNSSTRGVYYPDKVFRSSILHLTQDLFLPFFSNVTWFNTINYQGGFKKFDNPVLPFNDGVYFASTEKSNIIRGWIFGTTLDARTQSLLIVNNATNVVIKVCEFQFCTDPFLGVYYHNNNKTWVENEFRVYSSANNCTFEYISQPFLMDLEGKQGNFKNLREFVFKNVDGYFKIYSKHTPIDLVRDLPRGFAALEPLVDLPIGINITRFQTLLALHRSYLTPGKLESGWTTGAAAYYVGYLQQRTFLLSYNQNGTITDAVDCSLDPLSETKCTLKSLTVEKGIYQTSNFRVQPTISIVRFPNITNLCPFGEVFNASKFASVYAWNRKRISNCVADYSVLYNSTSFSTFKCYGVSPTKLNDLCFTNVYADSFVVKGDEVRQIAPGQTGVIADYNYKLPDDFTGCVIAWNSVKQDALTGGNYGYLYRLFRKSKLKPFERDISTEIYQAGSTPCNGQVGLNCYYPLERYGFHPTTGVNYQPFRVVVLSFELLNGPATVCGPKLSTTLVKDKCVNFNFNGLTGTGVLTTSKKQFLPFQQFGRDISDTTDAVRDPQTLEILDITPCSFGGVSVITPGTNTSNQVAVLYQDVNCTEVPMAIHAEQLTPAWRVYSAGANVFQTRAGCLVGAEHVNNSYECDIPVGAGICASYHSMSSFRSVNQRSIIAYTMSLGAENSVAYSNNSIAIPTNFTISVTTEILPVSMTKTSVDCTMYICGDSIECSNLLLQYGSFCTQLNRALTGIAVEQDKNTQEVFAQVKQIYKTPPIKDFGGFNFSQILPDPSKPSKRSFIEDLLFNKVTLADAGFIKQYGDCLGDIAARDLICAQKFNGLTVLPPLLTDEMIAQYTSALLAGTITSGWTFGAGAALQIPFAMQMAYRFNGIGVTQNVLYENQKLIANQFNSAIGKIQDSLSSTASALGKLQDVVNQNAQALNTLVKQLSSNFGCISSVLNDILSRLDKVEAEVQIDCLITGRLQSLQTYVTQQLIRAAEIRASANLAATKMSECVLGQSKRVDFCGKGYHLMSFPQSAPHGVVFLHVTYVPAQEKNFTTAPAICHEGKAHFPREGVFVSNGTHWFITQRNFYEPQIITTDNTFVSGSCDVVIGIVNNTVYDPLQPELDSGGGGSDIIKLLNEQVNKEMQSSNLYMSMSSWCYTHSLDGAGLFLFDHAAEEYEHAKKLIIFLNENNVPVQLTSISAPEHKFEGLTQIFQKAYEHEQHISESINNIVDHAIKSKDHATFNFLQWYVAEQHEEEVLFKDILDKIELIGNENHGLYLADQYVKGIAKSRKS

SEQ ID NO: 9518 - protein, 1309 aa, Artificial Sequence
  SARS-CoV-2/pangolin/Guangxi/P5E/2017__EPI_ISL_410541 spike protein (1-1141)(A966C_R989C) Ferritin construct
MFVFLFVLPLVSSQCVNLTTRTGIPPGYTNSSTRGVYYPDKVFRSSILHLTQDLFLPFFSNVTWFNTITYQGGSKKFDNPVLPFNDGVYFASTEKSNIIRGWIFGTTLDARTQSLLIVNNATNVVIKVCEFQFCTDPFLGVYYHNNNKTWVENEFRVYSSANNCTFEYISQPFLMDLEGKQGNFKNLREFVFKNVDGYFKIYSKHTPIDLVRDLPRGFAALEPLVDLPIGINITRFQTLLALHRSYLTPGKLESGWTTGAAAYYVGYLQQRTFLLSYNQNGTITDAVDCSLDPLSETKCTLKSLTVEKGIYQTSNFRVQPTISIVRFPNITNLCPFGEVFNASKFASVYAWNRKRISNCVADYSVLYNSTSFSTFKCYGVSPTKLNDLCFTNVYADSFVVKGDEVRQIAPGQTGVIADYNYKLPDDFTGCVIAWNSVKQDALTGDNYGYLYRLFRKSKLKPFERDISTEIYQAGSTPCNGQVGLNCYYPLERYGFHPTTGVNYQPFRVVVLSFELLNGPATVCGPKLSTTLVKDKCVNFNFNGLTGTGVLTTSKKQFLPFQQFGRDISDTTDAVRDPQTLEILDITPCSFGGVSVITPGTNTSNQVAVLYQDVNCTEVPMAIHAEQLTPAWRVYSAGANVFQTRAGCLVGAEHVNNSYECDIPVGAGICASYHSMSSFRSVNQRSIIAYTMSLGAENSVAYSNNSIAIPTNFTISVTTEILPVSMTKTSVDCTMYICGDSIECSNLLLQYGSFCTQLNRALTGIAVEQDKNTQEVFAQVKQIYKTPPIKDFGGFNFSQILPDPSKPSKRSFIEDLLFNKVTLADAGFIKQYGDCLGDIAARDLICAQKFNGLTVLPPLLTDEMIAQYTSALLAGTITSGWTFGAGAALQIPFAMQMAYRFNGIGVTQNVLYENQKLIANQFNSAIGKIQDSLSSTASALGKLQDVVNQNAQALNTLVKQLSSNFGCISSVLNDILSRLDKVEAEVQIDCLITGRLQSLQTYVTQQLIRAAEIRASANLAATKMSECVLGQSKRVDFCGKGYHLMSFPQSAPHGVVFLHVTYVPAQEKNFTTAPAICHEGKAHFPREGVFVSNGTHWFITQRNFYEPQIITTDNTFVSGSCDVVIGIVNNTVYDPLQPELDSGGGGSDIIKLLNEQVNKEMQSSNLYMSMSSWCYTHSLDGAGLFLFDHAAEEYEHAKKLIIFLNENNVPVQLTSISAPEHKFEGLTQIFQKAYEHEQHISESINNIVDHAIKSKDHATFNFLQWYVAEQHEEEVLFKDILDKIELIGNENHGLYLADQYVKGIAKSRKS

SEQ ID NO: 9519 - protein, 1307 aa, Artificial Sequence
  SARS-CoV-2/pangolin/Guangxi/P1E/2017__EPI_ISL_410539 spike protein (1-1139)(A964C_R987C) Ferritin construct
MFVFLFVLPLVSSQCVNLTTRTGIQPGYTNSSTRGVYYPDKVFRSSILHLTQDLFLPFFSNVTWFNTINYQGGFKKFDNPVLPFNDGVYFASTEKSNIIRGWIFGTTLDARTQSLLIVNNATNVVIKVCEFQFCTDPFLGVYYHNNNKTWVENEFRVYSSANNCTFEYISQPFLMDLEGKQGNFKNLREFVFKNVDGYFKIYSKHTPIDLVRDLPRGFAALEPLVDLPIGINITRFQTLLALHRSYLTPGKLESGWTTGAAAYYVGYLQQRTFLLSYNQNGTITDAVDCSLDPLSETKCTLKSLTVEKGIYQTSNFRVQPTISIVRFPNITNLCPFGEVFNASKFASVYAWNRKRISNCVADYSVLYNSTSFSTFKCYGVSPTKLNDLCFTNVYADSFVVKGDEVRQIAPGQTGVIADYNYKLPDDFTGCVIAWNSVKQDALTGGNYLYRLFRKSKLKPFERDISTEIYQAGSTPCNGQVGLNCYYPLERYGFHPTTGVNYQPFRVVVLSFELLNGPATVCGPKLSTTLVKDKCVNFNFNGLTGTGVLTTSKKQFLPFQQFGRDISDTTDAVRDPQTLEILDITPCSFGGVSVITPGTNTSNQVAVLYQDVNCTEVPMAIHAEQLTPAWRVYSAGANVFQTRAGCLVGAEHVNNSYECDIPVGAGICASYHSMSSLRSVNQRSIIAYTMSLGAENSVAYSNNSIAIPTNFTISVTTEILPVSMTKTSVDCTMYICGDSIECSNLLLQYGSFCTQLNRALTGIAVEQDKNTQEVFAQVKQIYKTPPIKDFGGFNFSQILPDPSKPSKRSFIEDLLFNKVTLADAGFIKQYGDCLGDIAARDLICAQKFNGLTVLPPLLTDEMIAQYTSALLAGTITSGWTFGAGAALQIPFAMQMAYRFNGIGVTQNVLYENQKLIANQFNSAIGKIQDSLSSTASALGKLQDVVNQNAQALNTLVKQLSSNFGCISSVLNDILSRLDKVEAEVQIDCLITGRLQSLQTYVTQQLIRAAEIRASANLAATKMSECVLGQSKRVDFCGKGYHLMSFPQSAPHGVVFLHVTYVPAQEKNFTTAPAICHEGKAHFPREGVFVSNGTHWFITQRNFYEPQIITTDNTFVSGSCDVVIGIVNNTVYDPLQPELDSGGGGSDIIKLLNEQVNKEMQSSNLYMSMSSWCYTHSLDGAGLFLFDHAAEEYEHAKKLIIFLNENNVPVQLTSISAPEHKFEGLTQIFQKAYEHEQHISESINNIVDHAIKSKDHATFNFLQWYVAEQHEEEVLFKDILDKIELIGNENHGLYLADQYVKGIAKSRKS

SEQ ID NO: 9520 - protein, 1315 aa, Artificial Sequence
  SARS-CoV-2/Wuhan/WIV05/2019__EPI_ISL_402128 spike protein (1-1147)(A890C_V1040C) Ferritin construct
MFVFLVLLPLVSSQCVNLTTRTQLPPAYTNSFTRGVYYPDKVFRSSVLHSTQDLFLPFFSNVTWFHAIHVSGTNGTKRFDNPVLPFNDGVYFASTEKSNIIRGWIFGTTLDSKTQSLLIVNNATNVVIKVCEFQFCNDPFLGVYYHKNNKSWMESEFRVYSSANNCTFEYVSQPFLMDLEGKQGNFKNLREFVFKNIDGYFKIYSKHTPINLVRDLPQGFSALEPLVDLPIGINITRFQTLLALHRSYLTPGDSSSGWTAGAAAYYVGYLQPRTFLLKYNENGTITDAVDCALDPLSETKCTLKSFTVEKGIYQTSNFRVQPTESIVRFPNITNLCPFGEVFNATRFASVYAWNRKRISNCVADYSVLYNSASFSTFKCYGVSPTKLNDLCFTNVYADSFVIRGDEVRQIAPGQTGKIADYNYKLPDDFTGCVIAWNSNNLDSKVGGNYNYLYRLFRKSNLKPFERDISTEIYQAGSTPCNGVEGFNCYFPLQSYGFQPTNGVGYQPYRVVVLSFELLHAPATVCGPKKSTNLVKNKCVNFNFNGLTGTGVLTESNKKFLPFQQFGRDIADTTDAVRDPQTLEILDITPCSFGGVSVITPGTNTSNQVAVLYQDVNCTEVPVAIHADQLTPTWRVYSTGSNVFQTRAGCLIGAEHVNNSYECDIPIGAGICASYQTQTNSPRRARSVASQSIIAYTMSLGAENSVAYSNNSIAIPTNFTISVTTEILPVSMTKTSVDCTMYICGDSTECSNLLLQYGSFCTQLNRALTGIAVEQDKNTQEVFAQVKQIYKTPPIKDFGGFNFSQILPDPSKPSKRSFIEDLLFNKVTLADAGFIKQYGDCLGDIAARDLICAQKFNGLTVLPPLLTDEMIAQYTSALLAGTITSGWTFGCGAALQIPFAMQMAYRFNGIGVTQNVLYENQKLIANQFNSAIGKIQDSLSSTASALGKLQDVVNQNAQALNTLVKQLSSNFGAISSVLNDILSRLDKVEAEVQIDRLITGRLQSLQTYVTQQLIRAAEIRASANLAATKMSECVLGQSKRCDFCGKGYHLMSFPQSAPHGVVFLHVTYVPAQEKNFTTAPAICHDGKAHFPREGVFVSNGTHWFVTQRNFYEPQIITTDNTFVSGNCDVVIGIVNNTVYDPLQPELDSGGGGSDIIKLLNEQVNKEMQSSNLYMSMSSWCYTHSLDGAGLFLFDHAAEEYEHAKKLIIFLNENNVPVQLTSISAPEHKFEGLTQIFQKAYEHEQHISESINNIVDHAIKSKDHATFNFLQWYVAEQHEEEVLFKDILDKIELIGNENHGLYLADQYVKGIAKSRKS

SEQ ID NO: 9521 - protein, 1311 aa, Artificial Sequence; identical to SEQ ID NO: 9253
  SARS-CoV-2/bat/Yunnan/RaTG13/2013__EPI_ISL_402131 spike protein (1-1143)(A886C_V1036C) Ferritin construct

SEQ ID NO: 9522 - protein, 1315 aa, Artificial Sequence; identical to SEQ ID NO: 9254
  SARS-CoV-2/Wuhan/HBCDC-HB-01/2019__EPI_ISL_402132 spike protein (1-1147)(A890C_V1040C) Ferritin construct

SEQ ID NO: 9523 - protein, 1315 aa, Artificial Sequence; identical to SEQ ID NO: 9255
  SARS-CoV-2/Guangdong/20SF028/2020__EPI_ISL_403936 spike protein (1-1147)(A890C_V1040C) Ferritin construct

SEQ ID NO: 9524 - protein, 1315 aa, Artificial Sequence; identical to SEQ ID NO: 9256
  SARS-CoV-2/Shenzhen/SZTH-001/2020__EPI_ISL_406592 spike protein (1-1147)(A890C_V1040C) Ferritin construct

SEQ ID NO: 9525 - protein, 1315 aa, Artificial Sequence; identical to SEQ ID NO: 9257
  SARS-CoV-2/Shenzhen/SZTH-004/2020__EPI_ISL_406595 spike protein (1-1147)(A890C_V1040C) Ferritin construct

SEQ ID NO: 9526 - protein, 1315 aa, Artificial Sequence; identical to SEQ ID NO: 9258
  SARS-CoV-2/France/IDF0372/2020__EPI_ISL_406596 spike protein (1-1147)(A890C_V1040C) Ferritin construct

SEQ ID NO: 9527 - protein, 1315 aa, Artificial Sequence; identical to SEQ ID NO: 9259
  SARS-CoV-2/Australia/VIC01/2020__EPI_ISL_406844 spike protein (1-1147)(A890C_V1040C) Ferritin construct

SEQ ID NO: 9528 - protein, 1315 aa, Artificial Sequence; identical to SEQ ID NO: 9260
  SARS-CoV-2/Germany/BavPat1/2020__EPI_ISL_406862 spike protein (1-1147)(A890C_V1040C) Ferritin construct

SEQ ID NO: 9529 - protein, 1315 aa, Artificial Sequence; identical to SEQ ID NO: 9261
  SARS-CoV-2/Wuhan/HBCDC-HB-02/2020__EPI_ISL_412978 spike protein (1-1147)(A890C_V1040C) Ferritin construct

SEQ ID NO: 9530 - protein, 1315 aa, Artificial Sequence; identical to SEQ ID NO: 9262
  SARS-CoV-2/Australia/QLD02/2020__EPI_ISL_407896 spike protein (1-1147)(A890C_V1040C) Ferritin construct

SEQ ID NO: 9531 - protein, 1315 aa, Artificial Sequence; identical to SEQ ID NO: 9263
  SARS-CoV-2/India/1-31/2020__EPI_ISL_413523 spike protein (1-1147)(A890C_V1040C) Ferritin construct

SEQ ID NO: 9532 - protein, 1315 aa, Artificial Sequence; identical to SEQ ID NO: 9264
  SARS-CoV-2/Guangdong/GD2020087-P0008/2020__EPI_ISL_413863 spike protein (1-1147)(A890C_V1040C) Ferritin construct

SEQ ID NO: 9533 - protein, 1315 aa, Artificial Sequence; identical to SEQ ID NO: 9265
  SARS-CoV-2/Sweden/01/2020__EPI_ISL_411951 spike protein (1-1147)(A890C_V1040C) Ferritin construct

SEQ ID NO: 9534 - protein, 1315 aa, Artificial Sequence; identical to SEQ ID NO: 9266
  SARS-CoV-2/Tianmen/HBCDC-HB-07/2020__EPI_ISL_412983 spike protein (1-1147)(A890C_V1040C) Ferritin construct

SEQ ID NO: 9535 - protein, 1315 aa, Artificial Sequence; identical to SEQ ID NO: 9267
  SARS-CoV-2/Hong Kong/case42_VM20002493/2020__EPI_ISL_414527 spike protein (1-1147)(A890C_V1040C) Ferritin construct

SEQ ID NO: 9536 - protein, 1315 aa, Artificial Sequence; identical to SEQ ID NO: 9268
  SARS-CoV-2/USA/CruiseA-23/2020__EPI_ISL_414482 spike protein (1-1147)(A890C_V1040C) Ferritin construct

SEQ ID NO: 9537 - protein, 1315 aa, Artificial Sequence; identical to SEQ ID NO: 9269
  SARS-CoV-2/Hong Kong/case85_VM20002868/2020__EPI_ISL_414519 spike protein (1-1147)(A890C_V1040C) Ferritin construct

SEQ ID NO: 9538 - protein, 1315 aa, Artificial Sequence; identical to SEQ ID NO: 9260
  SARS-CoV-2/England/200990660/2020__EPI_ISL_414523 spike protein (1-1147)(A890C_V1040C) Ferritin construct

SEQ ID NO: 9539 - protein, 1315 aa, Artificial Sequence; identical to SEQ ID NO: 9271
  SARS-CoV-2/Australia/NSW09/2020__EPI_ISL_413595 spike protein (1-1147)(A890C_V1040C) Ferritin construct

SEQ ID NO: 9540 - protein, 1315 aa, Artificial Sequence; identical to SEQ ID NO: 9252
  SARS-CoV-2/Australia/NSW10/2020__EPI_ISL_413596 spike protein (1-1147)(A890C_V1040C) Ferritin construct

SEQ ID NO: 9541 - protein, 1315 aa, Artificial Sequence; identical to SEQ ID NO: 9273
  SARS-CoV-2/Switzerland/1000477797/2020__EPI_ISL_413023 spike protein (1-1147)(A890C_V1040C) Ferritin construct

SEQ ID NO: 9542 - protein, 1315 aa, Artificial Sequence; identical to SEQ ID NO: 9274
  SARS-CoV-2/Belgium/BA-02291/2020__EPI_ISL_415159 spike protein (1-1147)(A890C_V1040C) Ferritin construct

SEQ ID NO: 9543 - protein, 1315 aa, Artificial Sequence; identical to SEQ ID NO: 9275
  SARS-CoV-2/USA/WA8-UW5/2020__EPI_ISL_413486 spike protein (1-1147)(A890C_V1040C) Ferritin construct

SEQ ID NO: 9544 - protein, 1315 aa, Artificial Sequence; identical to SEQ ID NO: 9276
  SARS-CoV-2/England/20102000506/2020__EPI_ISL_415147 spike protein (1-1147)(A890C_V1040C) Ferritin construct

SEQ ID NO: 9545 - protein, 1315 aa, Artificial Sequence; identical to SEQ ID NO: 9277
  SARS-CoV-2/Belgium/VAG-03013/2020__EPI_ISL_415155 spike protein (1-1147)(A890C_V1040C) Ferritin construct

SEQ ID NO: 9546 - protein, 1315 aa, Artificial Sequence; identical to SEQ ID NO: 9278
  SARS-CoV-2/Belgium/BC-03016/2020__EPI_ISL_415157 spike protein (1-1147)(A890C_V1040C) Ferritin construct

SEQ ID NO: 9547 - protein, 1315 aa, Artificial Sequence; identical to SEQ ID NO: 9279
  SARS-CoV-2/Germany/BavPat3/2020__EPI_ISL_414521 spike protein (1-1147)(A890C_V1040C) Ferritin construct

SEQ ID NO: 9548 - protein, 1315 aa, Artificial Sequence; identical to SEQ ID NO: 9280
  SARS-CoV-2/France/HF1805/2020__EPI_ISL_414628 spike protein (1-1147)(A890C_V1040C) Ferritin construct

SEQ ID NO: 9549 - protein, 1315 aa, Artificial Sequence; identical to SEQ ID NO: 9281
  SARS-CoV-2/Netherlands/ZuidHolland_9/2020__EPI_ISL_414445 spike protein (1-1147)(A890C_V1040C) Ferritin construct

SEQ ID NO: 9550 - protein, 1315 aa, Artificial Sequence; identical to SEQ ID NO: 9282
  SARS-CoV-2/Finland/FIN03032020A/2020__EPI_ISL_413602 spike protein (1-1147)(A890C_V1040C) Ferritin construct

SEQ ID NO: 9551 - protein, 1315 aa, Artificial Sequence; identical to SEQ ID NO: 9283
  SARS-CoV-2/France/GE1977/2020__EPI_ISL_414632 spike protein (1-1147)(A890C_V1040C) Ferritin construct

SEQ ID NO: 9552 - protein, 1315 aa, Artificial Sequence; identical to SEQ ID NO: 9284
  SARS-CoV-2/Finland/FIN-313/2020__EPI_ISL_414641 spike protein (1-1147)(A890C_V1040C) Ferritin construct

SEQ ID NO: 9553 - protein, 1315 aa, Artificial Sequence; identical to SEQ ID NO: 9285
  SARS-CoV-2/Netherlands/ZuidHolland_2/2020__EPI_ISL_414556 spike protein (1-1147)(A890C_V1040C) Ferritin construct

SEQ ID NO: 9554 - protein, 1315 aa, Artificial Sequence; identical to SEQ ID NO: 9286
  SARS-CoV-2/USA/WA-UW31/2020__EPI_ISL_414618 spike protein (1-1147)(A890C_V1040C) Ferritin construct

SEQ ID NO: 9555 - protein, 1315 aa, Artificial Sequence; identical to SEQ ID NO: 9287
  SARS-CoV-2/South Korea/SNU01/2020__EPI_ISL_411929 spike protein (1-1147)(A890C_V1040C) Ferritin construct

SEQ ID NO: 9556 - protein, 1315 aa, Artificial Sequence; identical to SEQ ID NO: 9288
  SARS-CoV-2/China/WF0004/2020__EPI_ISL_413694 spike protein (1-1147)(A890C_V1040C) Ferritin construct

SEQ ID NO: 9557 - protein, 1315 aa, Artificial Sequence; identical to SEQ ID NO: 9289
  SARS-CoV-2/China/WF0028/2020__EPI_ISL_413791 spike protein (1-1147)(A890C_V1040C) Ferritin construct

SEQ ID NO: 9558 - protein, 1315 aa, Artificial Sequence; identical to SEQ ID NO: 9290
  SARS-CoV-2/2019-nCoV/USA-CruiseA-18/2020__MT159716.1 spike protein (1-1147)(A890C_V1040C) Ferritin construct

SEQ ID NO: 9559 - protein, 1315 aa, Artificial Sequence; identical to SEQ ID NO: 9291
  SARS-CoV-2/SARS-CoV-2/Yunnan-01/human/2020/CHN__MT049951.1 spike protein (1-1147)(A890C_V1040C) Ferritin construct

SEQ ID NO: 9560 - protein, 1315 aa, Artificial Sequence; identical to SEQ ID NO: 9292
  SARS-CoV-2/USA/WA-UW292/2020__EPI_ISL_418077 spike protein (1-1147)(A890C_V1040C) Ferritin construct

SEQ ID NO: 9561 - protein, 1315 aa, Artificial Sequence; identical to SEQ ID NO: 9293
  SARS-CoV-2/Iceland/192/2020__EPI_ISL_417819 spike protein (1-1147)(A890C_V1040C) Ferritin construct

SEQ ID NO: 9562 - protein, 1315 aa, Artificial Sequence; identical to SEQ ID NO: 9294
  SARS-CoV-2/Belgium/ULG-6939/2020__EPI_ISL_417020 spike protein (1-1147)(A890C_V1040C) Ferritin construct

SEQ ID NO: 9563 - protein, 1315 aa, Artificial Sequence; identical to SEQ ID NO: 9295
  SARS-CoV-2/France/HF2496/2020__EPI_ISL_418231 spike protein (1-1147)(A890C_V1040C) Ferritin construct

SEQ ID NO: 9564 - protein, 1315 aa, Artificial Sequence; identical to SEQ ID NO: 9296
  SARS-CoV-2/USA/WA-UW291/2020__EPI_ISL_418076 spike protein (1-1147)(A890C_V1040C) Ferritin construct

SEQ ID NO: 9565 - protein, 1315 aa, Artificial Sequence; identical to SEQ ID NO: 9260
  SARS-CoV-2/Portugal/PT0034/2020__EPI_ISL_418019 spike protein (1-1147)(A890C_V1040C) Ferritin construct

SEQ ID NO: 9566 - protein, 1315 aa, Artificial Sequence; identical to SEQ ID NO: 9252
  SARS-CoV-2/Iceland/202/2020__EPI_ISL_417750 spike protein (1-1147)(A890C_V1040C) Ferritin construct

SEQ ID NO: 9567 - protein, 1315 aa, Artificial Sequence; identical to SEQ ID NO: 9299
  SARS-CoV-2/USA/WA-UW261/2020__EPI_ISL_418046 spike protein (1-1147)(A890C_V1040C) Ferritin construct

SEQ ID NO: 9568 - protein, 1315 aa, Artificial Sequence; identical to SEQ ID NO: 9300
  SARS-CoV-2/Portugal/PT0035/2020__EPI_ISL_418020 spike protein (1-1147)(A890C_V1040C) Ferritin construct

SEQ ID NO: 9569 - protein, 1315 aa, Artificial Sequence; identical to SEQ ID NO: 9301
  SARS-CoV-2/USA/NY-NYUMC7/2020__EPI_ISL_418192 spike protein (1-1147)(A890C_V1040C) Ferritin construct

SEQ ID NO: 9570 - protein, 1315 aa, Artificial Sequence; identical to SEQ ID NO: 9302
  SARS-CoV-2/Iceland/189/2020__EPI_ISL_417709 spike protein (1-1147)(A890C_V1040C) Ferritin construct

SEQ ID NO: 9571 - protein, 1315 aa, Artificial Sequence; identical to SEQ ID NO: 9303
  SARS-CoV-2/Australia/NSW56/2020__EPI_ISL_417408 spike protein (1-1147)(A890C_V1040C) Ferritin construct

SEQ ID NO: 9572 - protein, 1315 aa, Artificial Sequence; identical to SEQ ID NO: 9304
  SARS-CoV-2/Iceland/280/2020__EPI_ISL_417608 spike protein (1-1147)(A890C_V1040C) Ferritin construct

SEQ ID NO: 9573 - protein, 1315 aa, Artificial Sequence; identical to SEQ ID NO: 9260
  SARS-CoV-2/Iceland/247/2020__EPI_ISL_417575 spike protein (1-1147)(A890C_V1040C) Ferritin construct

SEQ ID NO: 9574 - protein, 1315 aa, Artificial Sequence; identical to SEQ ID NO: 9306
  SARS-CoV-2/Iceland/238/2020__EPI_ISL_417566 spike protein (1-1147)(A890C_V1040C) Ferritin construct

SEQ ID NO: 9575 - protein, 1315 aa, Artificial Sequence; identical to SEQ ID NO: 9307
  SARS-CoV-2/Greece/16/2020__EPI_ISL_418265 spike protein (1-1147)(A890C_V1040C) Ferritin construct

SEQ ID NO: 9576 - protein, 1315 aa, Artificial Sequence; identical to SEQ ID NO: 9308
  SARS-CoV-2/Iceland/319/2020__EPI_ISL_417648 spike protein (1-1147)(A890C_V1040C) Ferritin construct

SEQ ID NO: 9577 - protein, 1315 aa, Artificial Sequence; identical to SEQ ID NO: 9309
  SARS-CoV-2/Congo/94/2020__EPI_ISL_417947 spike protein (1-1147)(A890C_V1040C) Ferritin construct

SEQ ID NO: 9578 - protein, 1315 aa, Artificial Sequence; identical to SEQ ID NO: 9310
  SARS-CoV-2/Congo/158/2020__EPI_ISL_417950 spike protein (1-1147)(A890C_V1040C) Ferritin construct

SEQ ID NO: 9579 - protein, 1315 aa, Artificial Sequence; identical to SEQ ID NO: 9311
  SARS-CoV-2/USA/UT-00034/2020__EPI_ISL_417977 spike protein (1-1147)(A890C_V1040C) Ferritin construct

SEQ ID NO: 9580 - protein, 1315 aa, Artificial Sequence; identical to SEQ ID NO: 9312
  SARS-CoV-2/USA/UT-00033/2020__EPI_ISL_417976 spike protein (1-1147)(A890C_V1040C) Ferritin construct

SEQ ID NO: 9581 - protein, 1315 aa, Artificial Sequence; identical to SEQ ID NO: 9313
  SARS-CoV-2/USA/WI-13/2020__EPI_ISL_417516 spike protein (1-1147)(A890C_V1040C) Ferritin construct

SEQ ID NO: 9582 - protein, 1314 aa, Artificial Sequence; identical to SEQ ID NO: 9314
  SARS-CoV-2/India/1-27/2020__EPI_ISL_413522 spike protein (1-1146)(A889C_V1039C) Ferritin construct

SEQ ID NO: 9583 - protein, 1309 aa, Artificial Sequence; identical to SEQ ID NO: 9315
  SARS-CoV-2/pangolin/Guangxi/P4L/2017__EPI_ISL_410538 spike protein (1-1141)(A884C_V1034C) Ferritin construct

SEQ ID NO: 9584 - protein, 1309 aa, Artificial Sequence; identical to SEQ ID NO: 9316
  SARS-CoV-2/pangolin/Guangxi/P5L/2017__EPI_ISL_410540 spike protein (1-1141)(A884C_V1034C) Ferritin construct

SEQ ID NO: 9585 - protein, 1309 aa, Artificial Sequence; identical to SEQ ID NO: 9317
  SARS-CoV-2/pangolin/Guangxi/P5E/2017__EPI_ISL_410541 spike protein (1-1141)(A884C_V1034C) Ferritin construct

SEQ ID NO: 9586 - protein, 1307 aa, Artificial Sequence; identical to SEQ ID NO: 9318
  SARS-CoV-2/pangolin/Guangxi/P1E/2017__EPI_ISL_410539 spike protein (1-1139)(A882C_V1032C) Ferritin construct

SEQ ID NO: 9587 - protein, 1315 aa, Artificial Sequence
  SARS-CoV-2/Wuhan/WIV05/2019__EPI_ISL_402128 spike protein (1-1147)(T874C_S1055C) Ferritin construct
MFVFLVLLPLVSSQCVNLTTRTQLPPAYTNSFTRGVYYPDKVFRSSVLHSTQDLFLPFFSNVTWFHAIHVSGTNGTKRFDNPVLPFNDGVYFASTEKSNIIRGWIFGTTLDSKTQSLLIVNNATNVVIKVCEFQFCNDPFLGVYYHKNNKSWMESEFRVYSSANNCTFEYVSQPFLMDLEGKQGNFKNLREFVFKNIDGYFKIYSKHTPINLVRDLPQGFSALEPLVDLPIGINITRFQTLLALHRSYLTPGDSSSGWTAGAAAYYVGYLQPRTFLLKYNENGTITDAVDCALDPLSETKCTLKSFTVEKGIYQTSNFRVQPTESIVRFPNITNLCPFGEVFNATRFASVYAWNRKRISNCVADYSVLYNSASFSTFKCYGVSPTKLNDLCFTNVYADSFVIRGDEVRQIAPGQTGKIADYNYKLPDDFTGCVIAWNSNNLDSKVGGNYNYLYRLFRKSNLKPFERDISTEIYQAGSTPCNGVEGFNCYFPLQSYGFQPTNGVGYQPYRVVVLSFELLHAPATVCGPKKSTNLVKNKCVNFNFNGLTGTGVLTESNKKFLPFQQFGRDIADTTDAVRDPQTLEILDITPCSFGGVSVITPGTNTSNQVAVLYQDVNCTEVPVAIHADQLTPTWRVYSTGSNVFQTRAGCLIGAEHVNNSYECDIPIGAGICASYQTQTNSPRRARSVASQSIIAYTMSLGAENSVAYSNNSIAIPTNFTISVTTEILPVSMTKTSVDCTMYICGDSTECSNLLLQYGSFCTQLNRALTGIAVEQDKNTQEVFAQVKQIYKTPPIKDFGGFNFSQILPDPSKPSKRSFIEDLLFNKVTLADAGFIKQYGDCLGDIAARDLICAQKFNGLTVLPPLLTDEMIAQYCSALLAGTITSGWTFGAGAALQIPFAMQMAYRFNGIGVTQNVLYENQKLIANQFNSAIGKIQDSLSSTASALGKLQDVVNQNAQALNTLVKQLSSNFGAISSVLNDILSRLDKVEAEVQIDRLITGRLQSLQTYVTQQLIRAAEIRASANLAATKMSECVLGQSKRVDFCGKGYHLMSFPQCAPHGVVFLHVTYVPAQEKNFTTAPAICHDGKAHFPREGVFVSNGTHWFVTQRNFYEPQIITTDNTFVSGNCDVVIGIVNNTVYDPLQPELDSGGGGSDIIKLLNEQVNKEMQSSNLYMSMSSWCYTHSLDGAGLFLFDHAAEEYEHAKKLIIFLNENNVPVQLTSISAPEHKFEGLTQIFQKAYEHEQHISESINNIVDHAIKSKDHATFNFLQWYVAEQHEEEVLFKDILDKIELIGNENHGLYLADQYVKGIAKSRKS

SEQ ID NO: 9588 - protein, 1311 aa, Artificial Sequence
  SARS-CoV-2/bat/Yunnan/RaTG13/2013__EPI_ISL_402131 spike protein (1-1143)(T870C_S1051C) Ferritin construct
MFVFLVLLPLVSSQCVNLTTRTQLPPAYTNSSTRGVYYPDKVFRSSVLHLTQDLFLPFFSNVTWFHAIHVSGTNGIKRFDNPVLPFNDGVYFASTEKSNIIRGWIFGTTLDSKTQSLLIVNNATNVVIKVCEFQFCNDPFLGVYYHKNNKSWMESEFRVYSSANNCTFEYVSQPFLMDLEGKQGNFKNLREFVFKNIDGYFKIYSKHTPINLVRDLPPGFSALEPLVDLPIGINITRFQTLLALHRSYLTPGDSSSGWTAGAAAYYVGYLQPRTFLLKYNENGTITDAVDCALDPLSETKCTLKSFTVEKGIYQTSNFRVQPTDSIVRFPNITNLCPFGEVFNATTFASVYAWNRKRISNCVADYSVLYNSTSFSTFKCYGVSPTKLNDLCFTNVYADSFVITGDEVRQIAPGQTGKIADYNYKLPDDFTGCVIAWNSKHIDAKEGGNFNYLYRLFRKANLKPFERDISTEIYQAGSKPCNGQTGLNCYYPLYRYGFYPTDGVGHQPYRVVVLSFELLNAPATVCGPKKSTNLVKNKCVNFNFNGLTGTGVLTESNKKFLPFQQFGRDIADTTDAVRDPQTLEILDITPCSFGGVSVITPGTNASNQVAVLYQDVNCTEVPVAIHADQLTPTWRVYSTGSNVFQTRAGCLIGAEHVNNSYECDIPIGAGICASYQTQTNSRSVASQSIIAYTMSLGAENSVAYSNNSIAIPTNFTISVTTEILPVSMTKTSVDCTMYICGDSTECSNLLLQYGSFCTQLNRALTGIAVEQDKNTQEVFAQVKQIYKTPPIKDFGGFNFSQILPDPSKPSKRSFIEDLLFNKVTLADAGFIKQYGDCLGDIAARDLICAQKFNGLTVLPPLLTDEMIAQYCSALLAGTITSGWTFGAGAALQIPFAMQMAYRFNGIGVTQNVLYENQKLIANQFNSAIGKIQDSLSSTASALGKLQDVVNQNAQALNTLVKQLSSNFGAISSVLNDILSRLDKVEAEVQIDRLITGRLQSLQTYVTQQLIRAAEIRASANLAATKMSECVLGQSKRVDFCGKGYHLMSFPQCAPHGVVFLHVTYVPAQEKNFTTAPAICHDGKAHFPREGVFVSNGTHWFVTQRNFYEPQIITTDNTFVSGSCDVVIGIVNNTVYDPLQPELDSGGGGSDIIKLLNEQVNKEMQSSNLYMSMSSWCYTHSLDGAGLFLFDHAAEEYEHAKKLIIFLNENNVPVQLTSISAPEHKFEGLTQIFQKAYEHEQHISESINNIVDHAIKSKDHATFNFLQWYVAEQHEEEVLFKDILDKIELIGNENHGLYLADQYVKGIAKSRKS

SEQ ID NO: 9589 - protein, 1315 aa, Artificial Sequence
  SARS-CoV-2/Wuhan/HBCDC-HB-01/2019__EPI_ISL_402132 spike protein (1-1147)(T874C_S1055C) Ferritin construct
MFVFLVLLPLVSSQCVNLTTRTQLPPAYTNSITRGVYYPDKVFRSSVLHSTQDLFLPFFSNVTWFHAIHVSGTNGTKRFDNPVLPFNDGVYFASTEKSNIIRGWIFGTTLDSKTQSLLIVNNATNVVIKVCEFQFCNDPFLGVYYHKNNKSWMESEFRVYSSANNCTFEYVSQPFLMDLEGKQGNFKNLREFVFKNIDGYFKIYSKHTPINLVRDLPQGFSALEPLVDLPIGINITRFQTLLALHRSYLTPGDSSSGWTAGAAAYYVGYLQPRTFLLKYNENGTITDAVDCALDPLSETKCTLKSFTVEKGIYQTSNFRVQPTESIVRFPNITNLCPFGEVFNATRFASVYAWNRKRISNCVADYSVLYNSASFSTFKCYGVSPTKLNDLCFTNVYADSFVIRGDEVRQIAPGQTGKIADYNYKLPDDFTGCVIAWNSNNLDSKVGGNYNYLYRLFRKSNLKPFERDISTEIYQAGSTPCNGVEGFNCYFPLQSYGFQPTNGVGYQPYRVVVLSFELLHAPATVCGPKKSTNLVKNKCVNFNFNGLTGTGVLTESNKKFLPFQQFGRDIADTTDAVRDPQTLEILDITPCSFGGVSVITPGTNTSNQVAVLYQDVNCTEVPVAIHADQLTPTWRVYSTGSNVFQTRAGCLIGAEHVNNSYECDIPIGAGICASYQTQTNSPRRARSVASQSIIAYTMSLGAENSVAYSNNSIAIPTNFTISVTTEILPVSMTKTSVDCTMYICGDSTECSNLLLQYGSFCTQLNRALTGIAVEQDKNTQEVFAQVKQIYKTPPIKDFGGFNFSQILPDPSKPSKRSFIEDLLFNKVTLADAGFIKQYGDCLGDIAARDLICAQKFNGLTVLPPLLTDEMIAQYCSALLAGTITSGWTFGAGAALQIPFAMQMAYRFNGIGVTQNVLYENQKLIANQFNSAIGKIQDSLSSTASALGKLQDVVNQNAQALNTLVKQLSSNFGAISSVLNDILSRLDKVEAEVQIDRLITGRLQSLQTYVTQQLIRAAEIRASANLAATKMSECVLGQSKRVDFCGKGYHLMSFPQCAPHGVVFLHVTYVPAQEKNFTTAPAICHDGKAHFPREGVFVSNGTHWFVTQRNFYEPQIITTDNTFVSGNCDVVIGIVNNTVYDPLQPELDSGGGGSDIIKLLNEQVNKEMQSSNLYMSMSSWCYTHSLDGAGLFLFDHAAEEYEHAKKLIIFLNENNVPVQLTSISAPEHKFEGLTQIFQKAYEHEQHISESINNIVDHAIKSKDHATFNFLQWYVAEQHEEEVLFKDILDKIELIGNENHGLYLADQYVKGIAKSRKS

SEQ ID NO: 9590 - protein, 1315 aa, Artificial Sequence
  SARS-CoV-2/Guangdong/20SF028/2020__EPI_ISL_403936 spike protein (1-1147)(T874C_S1055C) Ferritin construct
MFVFLVLLPLVSSQCVNLTTRTQLPPAYTNSFTRGVYYPDKVFRSSVLYSTQDLFLPFFSNVTWFHAIHVSGTNGTKRFDNPVLPFNDGVYFASTEKSNIIRGWIFGTTLDSKTQSLLIVNNATNVVIKVCEFQFCNDPFLGVYYHKNNKSWMESEFRVYSSANNCTFEYVSQPFLMDLEGKQGNFKNLREFVFKNIDGYFKIYSKHTPINLVRDLPQGFSALEPLVDLPIGINITRFQTLLALHRSYLTPGDSSSGWTAGAAAYYVGYLQPRTFLLKYNENGTITDAVDCALDPLSETKCTLKSFTVEKGIYQTSNFRVQPTESIVRFPNITNLCPFGEVFNATRFASVYAWNRKRISNCVADYSVLYNSASFSTFKCYGVSPTKLNDLCFTNVYADSFVIRGDEVRQIAPGQTGKIADYNYKLPDDFTGCVIAWNSNNLDSKVGGNYNYLYRLFRKSNLKPFERDISTEIYQAGSTPCNGVEGFNCYFPLQSYGFQPTNGVGYQPYRVVVLSFELLHAPATVCGPKKSTNLVKNKCVNFNFNGLTGTGVLTESNKKFLPFQQFGRDIADTTDAVRDPQTLEILDITPCSFGGVSVITPGTNTSNQVAVLYQDVNCTEVPVAIHADQLTPTWRVYSTGSNVFQTRAGCLIGAEHVNNSYECDIPIGAGICASYQTQTNSPRRARSVASQSIIAYTMSLGAENSVAYSNNSIAIPTNFTISVTTEILPVSMTKTSVDCTMYICGDSTECSNLLLQYGSFCTQLNRALTGIAVEQDKNTQEVFAQVKQIYKTPPIKDFGGFNFSQILPDPSKPSKRSFIEDLLFNKVTLADAGFIKQYGDCLGDIAARDLICAQKFNGLTVLPPLLTDEMIAQYCSALLAGTITSGWTFGAGAALQIPFAMQMAYRFNGIGVTQNVLYENQKLIANQFNSAIGKIQDSLSSTASALGKLQDVVNQNAQALNTLVKQLSSNFGAISSVLNDILSRLDKVEAEVQIDRLITGRLQSLQTYVTQQLIRAAEIRASANLAATKMSECVLGQSKRVDFCGKGYHLMSFPQCAPHGVVFLHVTYVPAQEKNFTTAPAICHDGKAHFPREGVFVSNGTHWFVTQRNFYEPQIITTDNTFVSGNCDVVIGIVNNTVYDPLQPELDSGGGGSDIIKLLNEQVNKEMQSSNLYMSMSSWCYTHSLDGAGLFLFDHAAEEYEHAKKLIIFLNENNVPVQLTSISAPEHKFEGLTQIFQKAYEHEQHISESINNIVDHAIKSKDHATFNFLQWYVAEQHEEEVLFKDILDKIELIGNENHGLYLADQYVKGIAKSRKS

SEQ ID NO: 9591 - protein, 1315 aa, Artificial Sequence
  SARS-CoV-2/Shenzhen/SZTH-001/2020__EPI_ISL_406592 spike protein (1-1147)(T874C_S1055C) Ferritin construct
MFVFLVLLPLVSSQCVNLTTRTQLPPAYTNSFTRGVYYPDKVFRSSVLHSTQDLFLPFFSNVTWFHAIHVSGTNGTKRFDNPVLPFNDGVYFASTEKSNIIRGWIFGTTLDSKTQSLLIVNNATNVVIKVCEFQFCNDPFLGVYYHKNNKSWMESEFRVYSSANNCTFEYVSQPFLMDLEGKQGNFKNLREFVFKNIDGYFKIYSKHTPINLVRDLPQGFSALEPLVDLPIGINITRFQTLLALHRSYLTPGDSSSGWTAGAAAYYVGYLQPRTFLLKYNENGTITDAVDCALDPLSETKCTLKSFTVEKGIYQTSNFRVQPTESIVRFPNITNLCPFGEVFNATRFASVYAWNRKRISNCVADYSVLYNSASFSTFKCYGVSPTKLNDLCFTNVYADSFVIRGDEVRQIAPGQTGKIADYNYKLPDDFTGCVIAWNSNNLDSKVGGNYNYLYRLFRKSNLKPFERDISTEIYQAGSTPCNGVEGFNCYFPLQSYGFQPTNGVGYQPYRVVVLSFELLHAPATVCGPKKSTNLVKNKCVNFNFNGLTGTGVLTESNKKFLPFQQFGRDIADTTDAVRDPQTLEILDITPCSFGGVSVITPGTNTSNQVAVLYQDVNCTEVPVAIHADQLTPTWRVYSTGSNVFQTRAGCLIGAEHVNNSYECDIPIGAGICASYQTQTNSPRRARSVASQSIIAYTMSLGAENSVAYSNNSIAIPTNFTISVTTEILPVSMTKTSVDCTMYICGDSTECSNLLLQYGSFCTQLNRALTGIAVEQDKNTQEVFAQVKQIYKTPPIKDFGGFNFSQILPDPSKPSKRSFIEDLLFNKVTLADAGFIKQYGDCLGDIAARDLICAQKFNGLTVLPPLLTDEMIAQYCSALLAGTITSGWTFGAGAALQIPFAMQMAYRFNGIGVTQNVLYENQKLIANQFNSAIGKIQDSLSSTASALGKLQDVVNQNAQALNTLVKQLSSNFGAISSVLNDILSRLDKVEAEVQIDRLITGRLQSLQTYVTQQLIRAAEIRASANLAATKMSECVLGQSKRVDFCGKGYHLMSFPQCAPHGVVFLHVTYVPAQEKNFTTAPAICHDGKAHFPREGVFVSNGTHWFVTQRNFYEPQIITTDNTFVSGNCDVLIGIVNNTVYDPLQPELDSGGGGSDIIKLLNEQVNKEMQSSNLYMSMSSWCYTHSLDGAGLFLFDHAAEEYEHAKKLIIFLNENNVPVQLTSISAPEHKFEGLTQIFQKAYEHEQHISESINNIVDHAIKSKDHATFNFLQWYVAEQHEEEVLFKDILDKIELIGNENHGLYLADQYVKGIAKSRKS

SEQ ID NO: 9592 - protein, 1315 aa, Artificial Sequence
  SARS-CoV-2/Shenzhen/SZTH-004/2020__EPI_ISL_406595 spike protein (1-1147)(T874C_S1055C) Ferritin construct
MFVFLVLLPLVSSQCVNLTTRTQLPPAYTNSFTRGVYYPDKVFRSSVLHSTQDLFLPFFSNVTWFHAIHVSGTNGTKRFDNPVLPFNDGVYFASTEKSNIIRGWIFGTTLDSKTQSLLIVNNATNVVIKVCEFQFCNDPFLGVYYHKNNKSWMESEFRVYSSANNCTFEYVSQPFLMDLEGKQGNFKNLREFVFKNIDGYFKIYSKHTPINLVRDLPQGFSALEPLVDLPIGINITRFQTLLALHRSYLTPGDSSSGWTAGAAAYYVGYLQPRTFLLKYNENGTITDAVDCALDPLSETKCTLKSFTVEKGIYQTSNFRVQPTESIVRFPNITNLCPFGEVFNATRFASVYAWDRKRISNCVAYYSVLYNSASFSTFKCYGVSPTKLNDLCFTNVYADSFVIRGDEVRQIAPGQTGKIADYNYKLPDDFTGCVIAWNSNNLDSKVGGNYNYLYRLFRKSNLKPFERDISTEIYQAGSTPCNGVEGFNCYFPLQSYGFQPTNGVGYQPYRVVVLSFELLHAPATVCGPKKSTNLVKNKCVNFNFNGLTGTGVLTESNKKFLPFQQFGRDIADTTDAVRDPQTLEILDITPCSFGGVSVITPGTNTSNQVAVLYQDVNCTEVPVAIHADQLTPTWRVYSTGSNVFQTRAGCLIGAEHVNNSYECDIPIGAGICASYQTQTNSPRRARSVASQSIIAYTMSLGAENSVAYSNNSIAIPTNFTISVTTEILPVSMTKTSVDCTMYICGDSTECSNLLLQYGSFCTQLNRALTGIAVEQDKNTQEVFAQVKQIYKTPPIKDFGGFNFSQILPDPSKPSKRSFIEDLLFNKVTLADAGFIKQYGDCLGDIAARDLICAQKFNGLTVLPPLLTDEMIAQYCSALLAGTITSGWTFGAGAALQIPFAMQMAYRFNGIGVTQNVLYENQKLIANQFNSAIGKIQDSLSSTASALGKLQDVVNQNAQALNTLVKQLSSNFGAISSVLNDILSRLDKVEAEVQIDRLITGRLQSLQTYVTQQLIRAAEIRASANLAATKMSECVLGQSKRVDFCGKGYHLMSFPQCAPHGVVFLHVTYVPAQEKNFTTAPAICHDGKAHFPREGVFVSNGTHWFVTQRNFYEPQIITTDNTFVSGNCDVVIGIVNNTVYDPLQPELDSGGGGSDIIKLLNEQVNKEMQSSNLYMSMSSWCYTHSLDGAGLFLFDHAAEEYEHAKKLIIFLNENNVPVQLTSISAPEHKFEGLTQIFQKAYEHEQHISESINNIVDHAIKSKDHATFNFLQWYVAEQHEEEVLFKDILDKIELIGNENHGLYLADQYVKGIAKSRKS

SEQ ID NO: 9593 - protein, 1315 aa, Artificial Sequence
  SARS-CoV-2/France/IDF0372/2020__EPI_ISL_406596 spike protein (1-1147)(T874C_S1055C) Ferritin construct
MFVFLVLLPLVSSQCVNLTTRTQLPPAYTNSFTRGVYYPDKVFRSSVLHSTQDLFLPFFSNVTWFHAIHVSGTNGTKRFDNPVLPFNDGVYFASTEKSNIIRGWIFGTTLDSKTQSLLIVNNATNVVIKVCEFQFCNDPFLGVYYHKNNKSWMESEFRVYSSANNCTFEYVSQPFLMDLEGKQGNFKNLREFVFKNIDGYFKIYSKHTPINLVRDLPQGFSALEPLVDLPIGINITRFQTLLALHRSYLTPGDSSSGWTAGAAAYYVGYLQPRTFLLKYNENGTITDAVDCALDPLSETKCTLKSFTVEKGIYQTSNFRVQPTESIVRFPNITNLCPFGEVFNATRFASVYAWNRKRISNCVADYSFLYNSASFSTFKCYGVSPTKLNDLCFTNVYADSFVIRGDEVRQIAPGQTGKIADYNYKLPDDFTGCVIAWNSNNLDSKVGGNYNYLYRLFRKSNLKPFERDISTEIYQAGSTPCNGVEGFNCYFPLQSYGFQPTNGVGYQPYRVVVLSFELLHAPATVCGPKKSTNLVKNKCVNFNFNGLTGTGVLTESNKKFLPFQQFGRDIADTTDAVRDPQTLEILDITPCSFGGVSVITPGTNTSNQVAVLYQDVNCTEVPVAIHADQLTPTWRVYSTGSNVFQTRAGCLIGAEHVNNSYECDIPIGAGICASYQTQTNSPRRARSVASQSIIAYTMSLGAENSVAYSNNSIAIPTNFTISVTTEILPVSMTKTSVDCTMYICGDSTECSNLLLQYGSFCTQLNRALTGIAVEQDKNTQEVFAQVKQIYKTPPIKDFGGFNFSQILPDPSKPSKRSFIEDLLFNKVTLADAGFIKQYGDCLGDIAARDLICAQKFNGLTVLPPLLTDEMIAQYCSALLAGTITSGWTFGAGAALQIPFAMQMAYRFNGIGVTQNVLYENQKLIANQFNSAIGKIQDSLSSTASALGKLQDVVNQNAQALNTLVKQLSSNFGAISSVLNDILSRLDKVEAEVQIDRLITGRLQSLQTYVTQQLIRAAEIRASANLAATKMSECVLGQSKRVDFCGKGYHLMSFPQCAPHGVVFLHVTYVPAQEKNFTTAPAICHDGKAHFPREGVFVSNGTHWFVTQRNFYEPQIITTDNTFVSGNCDVVIGIVNNTVYDPLQPELDSGGGGSDIIKLLNEQVNKEMQSSNLYMSMSSWCYTHSLDGAGLFLFDHAAEEYEHAKKLIIFLNENNVPVQLTSISAPEHKFEGLTQIFQKAYEHEQHISESINNIVDHAIKSKDHATFNFLQWYVAEQHEEEVLFKDILDKIELIGNENHGLYLADQYVKGIAKSRKS

SEQ ID NO: 9594 - protein, 1315 aa, Artificial Sequence
  SARS-CoV-2/Australia/VIC01/2020__EPI_ISL_406844 spike protein (1-1147)(T874C_S1055C) Ferritin construct
MFVFLVLLPLVSSQCVNLTTRTQLPPAYTNSFTRGVYYPDKVFRSSVLHSTQDLFLPFFSNVTWFHAIHVSGTNGTKRFDNPVLPFNDGVYFASTEKSNIIRGWIFGTTLDSKTQSLLIVNNATNVVIKVCEFQFCNDPFLGVYYHKNNKSWMESEFRVYSSANNCTFEYVSQPFLMDLEGKQGNFKNLREFVFKNIDGYFKIYSKHTPINLVRDLPQGFSALEPLVDLPIGINITRFQTLLALHRRYLTPGDSSSGWTAGAAAYYVGYLQPRTFLLKYNENGTITDAVDCALDPLSETKCTLKSFTVEKGIYQTSNFRVQPTESIVRFPNITNLCPFGEVFNATRFASVYAWNRKRISNCVADYSVLYNSASFSTFKCYGVSPTKLNDLCFTNVYADSFVIRGDEVRQIAPGQTGKIADYNYKLPDDFTGCVIAWNSNNLDSKVGGNYNYLYRLFRKSNLKPFERDISTEIYQAGSTPCNGVEGFNCYFPLQSYGFQPTNGVGYQPYRVVVLSFELLHAPATVCGPKKSTNLVKNKCVNFNFNGLTGTGVLTESNKKFLPFQQFGRDIADTTDAVRDPQTLEILDITPCSFGGVSVITPGTNTSNQVAVLYQDVNCTEVPVAIHADQLTPTWRVYSTGSNVFQTRAGCLIGAEHVNNSYECDIPIGAGICASYQTQTNSPRRARSVASQSIIAYTMSLGAENSVAYSNNSIAIPTNFTISVTTEILPVSMTKTSVDCTMYICGDSTECSNLLLQYGSFCTQLNRALTGIAVEQDKNTQEVFAQVKQIYKTPPIKDFGGFNFSQILPDPSKPSKRSFIEDLLFNKVTLADAGFIKQYGDCLGDIAARDLICAQKFNGLTVLPPLLTDEMIAQYCSALLAGTITSGWTFGAGAALQIPFAMQMAYRFNGIGVTQNVLYENQKLIANQFNSAIGKIQDSLSSTASALGKLQDVVNQNAQALNTLVKQLSSNFGAISSVLNDILSRLDKVEAEVQIDRLITGRLQSLQTYVTQQLIRAAEIRASANLAATKMSECVLGQSKRVDFCGKGYHLMSFPQCAPHGVVFLHVTYVPAQEKNFTTAPAICHDGKAHFPREGVFVSNGTHWFVTQRNFYEPQIITTDNTFVSGNCDVVIGIVNNTVYDPLQPELDSGGGGSDIIKLLNEQVNKEMQSSNLYMSMSSWCYTHSLDGAGLFLFDHAAEEYEHAKKLIIFLNENNVPVQLTSISAPEHKFEGLTQIFQKAYEHEQHISESINNIVDHAIKSKDHATFNFLQWYVAEQHEEEVLFKDILDKIELIGNENHGLYLADQYVKGIAKSRKS

SEQ ID NO: 9595 - protein, 1315 aa, Artificial Sequence
  SARS-CoV-2/Germany/BavPat1/2020__EPI_ISL_406862 spike protein (1-1147)(T874C_S1055C) Ferritin construct
MFVFLVLLPLVSSQCVNLTTRTQLPPAYTNSFTRGVYYPDKVFRSSVLHSTQDLFLPFFSNVTWFHAIHVSGTNGTKRFDNPVLPFNDGVYFASTEKSNIIRGWIFGTTLDSKTQSLLIVNNATNVVIKVCEFQFCNDPFLGVYYHKNNKSWMESEFRVYSSANNCTFEYVSQPFLMDLEGKQGNFKNLREFVFKNIDGYFKIYSKHTPINLVRDLPQGFSALEPLVDLPIGINITRFQTLLALHRSYLTPGDSSSGWTAGAAAYYVGYLQPRTFLLKYNENGTITDAVDCALDPLSETKCTLKSFTVEKGIYQTSNFRVQPTESIVRFPNITNLCPFGEVFNATRFASVYAWNRKRISNCVADYSVLYNSASFSTFKCYGVSPTKLNDLCFTNVYADSFVIRGDEVRQIAPGQTGKIADYNYKLPDDFTGCVIAWNSNNLDSKVGGNYNYLYRLFRKSNLKPFERDISTEIYQAGSTPCNGVEGFNCYFPLQSYGFQPTNGVGYQPYRVVVLSFELLHAPATVCGPKKSTNLVKNKCVNFNFNGLTGTGVLTESNKKFLPFQQFGRDIADTTDAVRDPQTLEILDITPCSFGGVSVITPGTNTSNQVAVLYQGVNCTEVPVAIHADQLTPTWRVYSTGSNVFQTRAGCLIGAEHVNNSYECDIPIGAGICASYQTQTNSPRRARSVASQSIIAYTMSLGAENSVAYSNNSIAIPTNFTISVTTEILPVSMTKTSVDCTMYICGDSTECSNLLLQYGSFCTQLNRALTGIAVEQDKNTQEVFAQVKQIYKTPPIKDFGGFNFSQILPDPSKPSKRSFIEDLLFNKVTLADAGFIKQYGDCLGDIAARDLICAQKFNGLTVLPPLLTDEMIAQYCSALLAGTITSGWTFGAGAALQIPFAMQMAYRFNGIGVTQNVLYENQKLIANQFNSAIGKIQDSLSSTASALGKLQDVVNQNAQALNTLVKQLSSNFGAISSVLNDILSRLDKVEAEVQIDRLITGRLQSLQTYVTQQLIRAAEIRASANLAATKMSECVLGQSKRVDFCGKGYHLMSFPQCAPHGVVFLHVTYVPAQEKNFTTAPAICHDGKAHFPREGVFVSNGTHWFVTQRNFYEPQIITTDNTFVSGNCDVVIGIVNNTVYDPLQPELDSGGGGSDIIKLLNEQVNKEMQSSNLYMSMSSWCYTHSLDGAGLFLFDHAAEEYEHAKKLIIFLNENNVPVQLTSISAPEHKFEGLTQIFQKAYEHEQHISESINNIVDHAIKSKDHATFNFLQWYVAEQHEEEVLFKDILDKIELIGNENHGLYLADQYVKGIAKSRKS

SEQ ID NO: 9596 - protein, 1315 aa, Artificial Sequence
  SARS-CoV-2/Wuhan/HBCDC-HB-02/2020__EPI_ISL_412978 spike protein (1-1147)(T874C_S1055C) Ferritin construct
MFVFLVLLPLVSSQCVNLTTRTQLPPAYTNSFTRGVYYPDKVFRSSVLHSTQDLFLPFFSNVTWFHAIHVSGTNGTKRFDNPVLPFNDGVYFASTEKSNIIRGWIFGTTLDSKTQSLLIVNNATNVVIKVCEFQFCNDPFLGVYYHKNNKSWMESEFRVYSSANNCTFEYVSQPFLMDLEGKQGNFKNLREFVFKNIDGYFKIYSKHTPINLVRDLPQGFSALEPLVDLPIGINITRFQTLLALHRSYLTPGDSSSGWTAGAAAYYVGYLQPRTFLLKYNENGTITDAVDCALDPLSETKCTLKSFTVEKGIYQTSNFRVQPTESIVRFPNITNLCPFGEVFNATRFASVYAWNRKRISNCVADYSVLYNSASFSTFKCYGVSPTKLNDLCFTNVYADSFVIRGDEVRQIAPGQTGKIADYNYKLPDDFTGCVIAWNSNNLDSKVGGNYNYLYRLFRKSNLKPFERDISTEIYQAGSTPCNGVEGFNCYFPLQSYGFQPTNGVGYQPYRVVVLSFELLHAPATVCGPKKSTNLVKNKCVNFNFNGLTGTGVLTESNKKFLPFQQFGRDIADTTDAVRDPQTLEILDITPCSFGGVSVITPGTNTSNQVAVLYQDVNCTEVPVAIHADQLTPTWRVYSTGSNVFQTRAGCLIGAEHVNNSYECDIPIGAGICASYQTQTNSPRRARSVASQSIIAYTMSLGAENSVAYSNNSIAIPTNFTISVTTEILPVSMTKTSVDCTMYICGDSTECSNFLLQYGSFCTQLNRALTGIAVEQDKNTQEVFAQVKQIYKTPPIKDFGGFNFSQILPDPSKPSKRSFIEDLLFNKVTLADAGFIKQYGDCLGDIAARDLICAQKFNGLTVLPPLLTDEMIAQYCSALLAGTITSGWTFGAGAALQIPFAMQMAYRFNGIGVTQNVLYENQKLIANQFNSAIGKIQDSLSSTASALGKLQDVVNQNAQALNTLVKQLSSNFGAISSVLNDILSRLDKVEAEVQIDRLITGRLQSLQTYVTQQLIRAAEIRASANLAATKMSECVLGQSKRVDFCGKGYHLMSFPQCAPHGVVFLHVTYVPAQEKNFTTAPAICHDGKAHFPREGVFVSNGTHWFVTQRNFYEPQIITTDNTFVSGNCDVVIGIVNNTVYDPLQPELDSGGGGSDIIKLLNEQVNKEMQSSNLYMSMSSWCYTHSLDGAGLFLFDHAAEEYEHAKKLIIFLNENNVPVQLTSISAPEHKFEGLTQIFQKAYEHEQHISESINNIVDHAIKSKDHATFNFLQWYVAEQHEEEVLFKDILDKIELIGNENHGLYLADQYVKGIAKSRKS

SEQ ID NO: 9597 - protein, 1315 aa, Artificial Sequence
  SARS-CoV-2/Australia/QLD02/2020__EPI_ISL_407896 spike protein (1-1147)(T874C_S1055C) Ferritin construct
MFVFLVLLPLVSSQCVNLTTRTQLPPAYTNSFTRGVYYPDKVFRSSVLHSTQDLFLPFFSNVTWFHAIHVSGTNGTKRFDNPVLPFNDGVYFASTEKSNIIRGWIFGTTLDSKTQSLLIVNNATNVVIKVCEFQFCNDPFLGVYYHKNNKSWMESEFRVYSSANNCTFEYVSQPFLMDLEGKQGNFKNLREFVFKNIDGYFKIYSKHTPINLVRDLPQGFSALEPLVDLPIGINITRFQTLLALHRSYLTPGDSSSGWTAGAAAYYVGYLQPRTFLLKYNENGTITDAVDCALDPLSETKCTLKSFTVEKGIYQTSNFRVQPTESIVRFPNITNLCPFGEVFNATRFASVYAWNRKRISNCVADYSVLYNSASFSTFKCYGVSPTKLNDLCFTNVYADSFVIRGDEVRQIAPGQTGKIADYNYKLPDDFTGCVIAWNSNNLDSKVGGNYNYLYRLFRKSNLKPFERDISTEIYQAGSTPCNGVEGFNCYFPLQSYGFQPTNGVGYQPYRVVVLSFELLHAPATVCGPKKSTNLVKNKCVNFNFNGLTGTGVLTESNKKFLPFQQFGRDIADTTDAVRDPQTLEILDITPCSFGGVSVITPGTNTSNQVAVLYQDVNCTEVPVAIHADQLTPTWRVYSTGSNVFQTRAGCLIGAEHVNNSYECDIPIGAGICASYQTQTNSPRRARSVASQSIIAYTMSLGAENSVAYSNNSIAIPTNFTISVTTEILPVSMTKTSVDCTMYICGDSTECSNLLLQYGSFCTQLNRALTGIAVEQDKNTQEVFAQVKQIYKTPPIKDFGGFNFSQILPDPSKPSKRSFIEDLLFNKVTLADAGFIKQYGDCLGDIAARDLICAQKFNGLTVLPPLLTDEMIAQYCSALLAGTITSGWTFGAGAALQIPFAMQMAYRFNGIGVTQNVLYENQKLIANQFNSAIGKIQDSLSSTASALGKLQDVVNQNAQALNTLVKQLSSNFGAISSVLNDILSRLDKVEAEVQIDRLITGRLQSLQTYVTQQLIRAAEIRASANLAATKMSECVLGQSKRVDFCGKGYHLMSFPQCAPHGVVFLHVTYVPAQEKNFTTAPAICHDGKAHFPREGVFVSNGTHWFVTQRNFYEPQIITTDNTFVSGNCDVVIGIVNNTVYDPLQLELDSGGGGSDIIKLLNEQVNKEMQSSNLYMSMSSWCYTHSLDGAGLFLFDHAAEEYEHAKKLIIFLNENNVPVQLTSISAPEHKFEGLTQIFQKAYEHEQHISESINNIVDHAIKSKDHATFNFLQWYVAEQHEEEVLFKDILDKIELIGNENHGLYLADQYVKGIAKSRKS

SEQ ID NO: 9598 - protein, 1315 aa, Artificial Sequence
  SARS-CoV-2/India/1-31/2020__EPI_ISL_413523 spike protein (1-1147)(T874C_S1055C) Ferritin construct
MFVFLVLLPLVSSQCVNLTTRTQLPPAYTNSFTRGVYYPDKVFRSSVLHSTQDLFLPFFSNVTWFHAIHVSGTNGTKRFDNPVLPFNDGVYFASTEKSNIIRGWIFGTTLDSKTQSLLIVNNATNVVIKVCEFQFCNDPFLGVYYHKNNKSWMESEFRVYSSANNCTFEYVSQPFLMDLEGKQGNFKNLREFVFKNIDGYFKIYSKHTPINLVRDLPQGFSALEPLVDLPIGINITRFQTLLALHRSYLTPGDSSSGWTAGAAAYYVGYLQPRTFLLKYNENGTITDAVDCALDPLSETKCTLKSFTVEKGIYQTSNFRVQPTESIVRFPNITNLCPFGEVFNATRFASVYAWNRKRISNCVADYSVLYNSASFSTFKCYGVSPTKLNDLCFTNVYADSFVIRGDEVRQIAPGQTGKIADYNYKLPDDFTGCVIAWNSNNLDSKVGGNYNYLYRLFRKSNLKPFERDISTEIYQAGSTPCNGVEGFNCYFPLQSYGFQPTNGVGYQPYRVVVLSFELLHAPATVCGPKKSTNLVKNKCVNFNFNGLTGTGVLTESNKKFLPFQQFGRDIADTTDAVRDPQTLEILDITPCSFGGVSVITPGTNTSNQVAVLYQDVNCTEVPVAIHADQLTPTWRVYSTGSNVFQTRAGCLIGAEHVNNSYECDIPIGAGICASYQTQTNSPRRARSVASQSIIAYTMSLGAENSVAYSNNSIAIPTNFTISVTTEILPVSMTKTSVDCTMYICGDSTECSNLLLQYGSFCTQLNRALTGIAVEQDKNTQEVFAQVKQIYKTPPIKDFGGFNFSQILPDPSKPSKRSFIEDLLFNKVTLADAGFIKQYGDCLGDIAARDLICAQKFNGLTVLPPLLTDEMIAQYCSALLAGTITSGWTFGAGAALQIPFAMQMAYRFNGIGVTQNVLYENQKLIANQFNSVIGKIQDSLSSTASALGKLQDVVNQNAQALNTLVKQLSSNFGAISSVLNDILSRLDKVEAEVQIDRLITGRLQSLQTYVTQQLIRAAEIRASANLAATKMSECVLGQSKRVDFCGKGYHLMSFPQCAPHGVVFLHVTYVPAQEKNFTTAPAICHDGKAHFPREGVFVSNGTHWFVTQRNFYEPQIITTDNTFVSGNCDVVIGIVNNTVYDPLQPELDSGGGGSDIIKLLNEQVNKEMQSSNLYMSMSSWCYTHSLDGAGLFLFDHAAEEYEHAKKLIIFLNENNVPVQLTSISAPEHKFEGLTQIFQKAYEHEQHISESINNIVDHAIKSKDHATFNFLQWYVAEQHEEEVLFKDILDKIELIGNENHGLYLADQYVKGIAKSRKS

SEQ ID NO: 9599 - protein, 1315 aa, Artificial Sequence
  SARS-CoV-2/Guangdong/GD2020087-P0008/2020__EPI_ISL_413863 spike protein (1-1147)(T874C_S1055C) Ferritin construct
MFVFLVLLPLVSSQCVNLTTRTQLPPAYTNSFTRGVYYPDKVFRSSVLHSTQDLFLPFFSNVTWFHAIHVSGTNGTKRFDNPVLPFNDGVYFASTEKSNIIRGWIFGTTLDSKTQSLLIVNNATNVVIKVCEFQFCNDPFLGVYYHKNNKSWMESEFRVYSSANNCTFEYVSQPFLMDLEGKQGNFKNLREFVFKNIDGYFKIYSKHTPINLVRDLPQGFSALEPLVDLPIGINITRFQTLLALHRSYLTPGDSSSGWTAGAAAYYVGYLQPRTFLLKYNENGTITDAVDCALDPLSETKCTLKSFTVEKGIYQTSNFRVQPTESIVRFPNITNLCPFGEVFNATRFASVYAWNRKRISNCVADYSVLYNSASFSTFKCYGVSPTKLNDLCFTNVYADSFVIRGDEVREIAPGQTGKIADYNYKLPDDFTGCVIAWNSNNLDSKVGGNYNYLYRLFRKSNLKPFERDISTEIYQAGSTPCNGVEGFNCYFPLQSYGFQPTNGVGYQPYRVVVLSFELLHAPATVCGPKKSTNLVKNKCVNFNFNGLTGTGVLTESNKKFLPFQQFGRDIADTTDAVRDPQTLEILDITPCSFGGVSVITPGTNTSNQVAVLYQDVNCTEVPVAIHADQLTPTWRVYSTGSNVFQTRAGCLIGAEHVNNSYECDIPIGAGICASYQTQTNSPRRARSVASQSIIAYTMSLGAENSVAYSNNSIAIPTNFTISVTTEILPVSMTKTSVDCTMYICGDSTECSNLLLQYGSFCTQLNRALTGIAVEQDKNTQEVFAQVKQIYKTPPIKDFGGFNFSQILPDPSKPSKRSFIEDLLFNKVTLADAGFIKQYGDCLGDIAARDLICAQKFNGLTVLPPLLTDEMIAQYCSALLAGTITSGWTFGAGAALQIPFAMQMAYRFNGIGVTQNVLYENQKLIANQFNSAIGKIQDSLSSTASALGKLQDVVNQNAQALNTLVKQLSSNFGAISSVLNDILSRLDKVEAEVQIDRLITGRLQSLQTYVTQQLIRAAEIRASANLAATKMSECVLGQSKRVDFCGKGYHLMSFPQCAPHGVVFLHVTYVPAQEKNFTTAPAICHDGKAHFPREGVFVSNGTHWFVTQRNFYEPQIITTDNTFVSGNCDVVIGIVNNTVYDPLQPELDSGGGGSDIIKLLNEQVNKEMQSSNLYMSMSSWCYTHSLDGAGLFLFDHAAEEYEHAKKLIIFLNENNVPVQLTSISAPEHKFEGLTQIFQKAYEHEQHISESINNIVDHAIKSKDHATFNFLQWYVAEQHEEEVLFKDILDKIELIGNENHGLYLADQYVKGIAKSRKS

SEQ ID NO: 9600 - protein, 1315 aa, Artificial Sequence
  SARS-CoV-2/Sweden/01/2020__EPI_ISL_411951 spike protein (1-1147)(T874C_S1055C) Ferritin construct
MFVFLVLLPLVSSQCVNLTTRTQLPPAYTNSFTRGVYYPDKVFRSSVLHSTQDLFLPFFSNVTWFHAIHVSGTNGTKRFDNPVLPFNDGVYFASTEKSNIIRGWIFGTTLDSKTQSLLIVNNATNVVIKVCEFQFCNDPFLGVYYHKNNKSWMESEFRVYSSANNCTFEYVSQPFLMDLEGKQGNFKNLREFVFKNIDGYFKIYSKHTPINLVRDLPQGFSALEPLVDLPIGINITRFQTLLALHRSYLTPGDSSSGWTAGAAAYYVGYLQPRTFLLKYNENGTITDAVDCALDPLSETKCTLKSFTVEKGIYQTSNFRVQPTESIVRFPNITNLCPFGEVFNATRFASVYAWNRKRISNCVADYSVLYNSASFSTFKCYGVSPTKLNDLCFTNVYADSFVIRGDEVRQIAPGQTGKIADYNYKLPDDFTGCVIAWNSNNLDSKVGGNYNYLYRLFRKSNLKPFERDISTEIYQAGSTPCNGVEGFNCYFPLQSYGFQPTNGVGYQPYRVVVLSFELLHAPATVCGPKKSTNLVKNKCVNFNFNGLTGTGVLTESNKKFLPFQQFGRDIADTTDAVRDPQTLEILDITPCSFGGVSVITPGTNTSNQVAVLYQDVNCTEVPVAIHADQLTPTWRVYSTGSNVFQTRAGCLIGAEHVNNSYECDIPIGAGICASYQTQTNSPRRARSVASQSIIAYTMSLGAENSVAYSNNSIAIPTNFTISVTTEILPVSMTKTSVDCTMYICGDSTECSNLLLQYGSFCTQLNRALTGIAVEQDKNTQEVFAQVKQIYKTPPIKDCGGFNFSQILPDPSKPSKRSFIEDLLFNKVTLADAGFIKQYGDCLGDIAARDLICAQKFNGLTVLPPLLTDEMIAQYCSALLAGTITSGWTFGAGAALQIPFAMQMAYRFNGIGVTQNVLYENQKLIANQFNSAIGKIQDSLSSTASALGKLQDVVNQNAQALNTLVKQLSSNFGAISSVLNDILSRLDKVEAEVQIDRLITGRLQSLQTYVTQQLIRAAEIRASANLAATKMSECVLGQSKRVDFCGKGYHLMSFPQCAPHGVVFLHVTYVPAQEKNFTTAPAICHDGKAHFPREGVFVSNGTHWFVTQRNFYEPQIITTDNTFVSGNCDVVIGIVNNTVYDPLQPELDSGGGGSDIIKLLNEQVNKEMQSSNLYMSMSSWCYTHSLDGAGLFLFDHAAEEYEHAKKLIIFLNENNVPVQLTSISAPEHKFEGLTQIFQKAYEHEQHISESINNIVDHAIKSKDHATFNFLQWYVAEQHEEEVLFKDILDKIELIGNENHGLYLADQYVKGIAKSRKS

SEQ ID NO: 9601 - protein, 1315 aa, Artificial Sequence
  SARS-CoV-2/Tianmen/HBCDC-HB-07/2020__EPI_ISL_412983 spike protein (1-1147)(T874C_S1055C) Ferritin construct
MFVFLVLLPLVSSQCVNLTTRTQLPPAYTNSFTRGVYYPDKVFRSSVLHSTQDLFLPFFSNVTWFHAIHVSGTNGTKRFDNPVLPFNDGVYFASTEKSNIIRGWIFGTTLDSKTQSLLIVNNATNVVIKVCEFQFCNDPFLGVYYHKNNKSWMESEFRVYSSANNCTFEYVSQPFLMDLEGKQGNFKNLREFVFKNIDGYFKIYSKHTPINLVRDLPQGFSALEPLVDLPIGINITRFQTLLALHRSYLTPGDSSSGWTAGAAAYYVGYLQPRTFLLKYNENGTITDAVDCALDPLSETKCTLKSFTVEKGIYQTSNFRVQPTESIVRFPNITNLCPFGEVFNATRFASVYAWNRKRISNCVADYSVLYNSASFSTFKCYGVSPTKLNDLCFTNVYADSFVIRGDEVRQIAPGQTGKIADYNYKLPDDFTGCVIAWNSNNLDSKVGGNYNYLYRLFRKSNLKPFERDISTEIYQAGSTPCNGVEGFNCYFPLQSYGFQPTNGVGYQPYRVVVLSFELLHAPATVCGPKKSTNLVKNKCVNFNFNGLTGTGVLTESNKKFLPFQQFGRDIADTTDAVRDPQTLEILDITPCSFGGVSVITPGTNTSNQVAVLYQDLNCTEVPVAIHADQLTPTWRVYSTGSNVFQTRAGCLIGAEHVNNSYECDIPIGAGICASYQTQTNSPRRARSVASQSIIAYTMSLGAENSVAYSNNSIAIPTNFTISVTTEILPVSMTKTSVDCTMYICGDSTECSNLLLQYGSFCTQLNRALTGIAVEQDKNTQEVFAQVKQIYKTPPIKDFGGFNFSQILPDPSKPSKRSFIEDLLFNKVTLADAGFIKQYGDCLGDIAARDLICAQKFNGLTVLPPLLTDEMIAQYCSALLAGTITSGWTFGAGAALQIPFAMQMAYRFNGIGVTQNVLYENQKLIANQFNSAIGKIQDSLSSTASALGKLQDVVNQNAQALNTLVKQLSSNFGAISSVLNDILSRLDKVEAEVQIDRLITGRLQSLQTYVTQQLIRAAEIRASANLAATKMSECVLGQSKRVDFCGKGYHLMSFPQCAPHGVVFLHVTYVPAQEKNFTTAPAICHDGKAHFPREGVFVSNGTHWFVTQRNFYEPQIITTDNTFVSGNCDVVIGIVNNTVYDPLQPELDSGGGGSDIIKLLNEQVNKEMQSSNLYMSMSSWCYTHSLDGAGLFLFDHAAEEYEHAKKLIIFLNENNVPVQLTSISAPEHKFEGLTQIFQKAYEHEQHISESINNIVDHAIKSKDHATFNFLQWYVAEQHEEEVLFKDILDKIELIGNENHGLYLADQYVKGIAKSRKS

SEQ ID NO: 9602 - protein, 1315 aa, Artificial Sequence
  SARS-CoV-2/Hong Kong/case42_VM20002493/2020__EPI_ISL_414527 spike protein (1-1147)(T874C_S1055C) Ferritin construct
MFVFLVLLPLVSSQCVNLTTRTQLPPAYTNSFTRGVYYPDKVFRSSVLHSTQDLFLPFFSNVTWFHAIHVSGTNGTKRFDNPVLPFNDGVYFASTEKSNIIRGWIFGTTLDSKTQSLLIVNNATNVVIKVCEFQFCNDPFLGVYYHKNNKSWMESEFRVYSSANNCTFEYVSQPFLMDLEGKQGNFKNLREFVFKNIDGYFKIYSKHTPINLVRDLPQGFSALEPLVDLPIGINITRFQTLLALHRSYLTPGDSSSGWTAGAAAYYVGYLQPRTFLLKYNENGTITDAVDCALDPLSETKCTLKSFTVEKGIYQTSNFRVQPTESIVRFPNITNLCPFGEVFNATRFASVYAWNRKRISNCVADYSVLYNSASFSTFKCYGVSPTKLNDLCFTNVYADSFVIRGDEVRQIAPGQTGKIADYNYKLPDDFTGCVIAWNSNNLDSKVGGNYNYLYRLFRKSNLKPFERDISTEIYQAGSTPCNGVEGFNCYFPLQSYGFQPTNGVGYQPYRVVVLSFELLHAPATVCGPKKSTNLVKNKCVNFNFNGLTGTGVLTESNKKFLPFQQFGRDIADTTDAVRDPQTLEILDITPCSFGGVSVITPGTNTSNQVAVLYQDVNCTEVPVAIHADQLTPTWRVYSTGSNVFQTRAGCLIGAEHVNNSYECDIPIGAGICASYQTQTNSPRRARSVASQSIIAYTMSLGAENSVAYSNNSIAIPTNFAISVTTEILPVSMTKTSVDCTMYICGDSTECSNLLLQYGSFCTQLNRALTGIAVEQDKNTQEVFAQVKQIYKTPPIKDFGGFNFSQILPDPSKPSKRSFIEDLLFNKVTLADAGFIKQYGDCLGDIAARDLICAQKFNGLTVLPPLLTDEMIAQYCSALLAGTITSGWTFGAGAALQIPFAMQMAYRFNGIGVTQNVLYENQKLIANQFNSAIGKIQDSLSSTASALGKLQDVVNQNAQALNTLVKQLSSNFGAISSVLNDILSRLDKVEAEVQIDRLITGRLQSLQTYVTQQLIRAAEIRASANLAATKMSECVLGQSKRVDFCGKGYHLMSFPQCAPHGVVFLHVTYVPAQEKNFTTAPAICHDGKAHFPREGVFVSNGTHWFVTQRNFYEPQIITTDNTFVSGNCDVVIGIVNNTVYDPLQPELDSGGGGSDIIKLLNEQVNKEMQSSNLYMSMSSWCYTHSLDGAGLFLFDHAAEEYEHAKKLIIFLNENNVPVQLTSISAPEHKFEGLTQIFQKAYEHEQHISESINNIVDHAIKSKDHATFNFLQWYVAEQHEEEVLFKDILDKIELIGNENHGLYLADQYVKGIAKSRKS

SEQ ID NO: 9603 - protein, 1315 aa, Artificial Sequence
  SARS-CoV-2/USA/CruiseA-23/2020__EPI_ISL_414482 spike protein (1-1147)(T874C_S1055C) Ferritin construct
MFVFLVLLPLVSSQCVNLTTRTQLPPAYTNSFTRGVYYPDKVFRSSVLHSTQDLFLPFFSNVTWFHAIHVSGTNGTKRFDNPVLPFNDGVYFASTEKSNIIRGWIFGTTLDSKTQSLLIVNNATNVVIKVCEFQFCNDPFLGVYYHKNNKSWMESEFRVYSSANNCTFEYVSQPFLMDLEVKQGNFKNLREFVFKNIDGYFKIYSKHTPINLVRDLPQGFSALEPLVDLPIGINITRFQTLLALHRSYLTPGDSSSGWTAGAAAYYVGYLQPRTFLLKYNENGTITDAVDCALDPLSETKCTLKSFTVEKGIYQTSNFRVQPTESIVRFPNITNLCPFGEVFNATRFASVYAWNRKRISNCVADYSVLYNSASFSTFKCYGVSPTKLNDLCFTNVYADSFVIRGDEVRQIAPGQTGKIADYNYKLPDDFTGCVIAWNSNNLDSKVGGNYNYLYRLFRKSNLKPFERDISTEIYQAGSTPCNGVEGFNCYFPLQSYGFQPTNGVGYQPYRVVVLSFELLHAPATVCGPKKSTNLVKNKCVNFNFNGLTGTGVLTESNKKFLPFQQFGRDIADTTDAVRDPQTLEILDITPCSFGGVSVITPGTNTSNQVAVLYQDVNCTEVPVAIHADQLTPTWRVYSTGSNVFQTRAGCLIGAEHVNNSYECDIPIGAGICASYQTQTNSPRRARSVASQSIIAYTMSLGAENSVAYSNNSIAIPTNFTISVTTEILPVSMTKTSVDCTMYICGDSTECSNLLLQYGSFCTQLNRALTGIAVEQDKNTQEVFAQVKQIYKTPPIKDFGGFNFSQILPDPSKPSKRSFIEDLLFNKVTLADAGFIKQYGDCLGDIAARDLICAQKFNGLTVLPPLLTDEMIAQYCSALLAGTITSGWTFGAGAALQIPFAMQMAYRFNGIGVTQNVLYENQKLIANQFNSAIGKIQDSLSSTASALGKLQDVVNQNAQALNTLVKQLSSNFGAISSVLNDILSRLDKVEAEVQIDRLITGRLQSLQTYVTQQLIRAAEIRASANLAATKMSECVLGQSKRVDFCGKGYHLMSFPQCAPHGVVFLHVTYVPAQEKNFTTAPAICHDGKAHFPREGVFVSNGTHWFVTQRNFYEPQIITTDNTFVSGNCDVVIGIVNNTVYDPLQPELDSGGGGSDIIKLLNEQVNKEMQSSNLYMSMSSWCYTHSLDGAGLFLFDHAAEEYEHAKKLIIFLNENNVPVQLTSISAPEHKFEGLTQIFQKAYEHEQHISESINNIVDHAIKSKDHATFNFLQWYVAEQHEEEVLFKDILDKIELIGNENHGLYLADQYVKGIAKSRKS

SEQ ID NO: 9604 - protein, 1315 aa, Artificial Sequence
  SARS-CoV-2/Hong Kong/case85_VM20002868/2020__EPI_ISL_414519 spike protein (1-1147)(T874C_S1055C) Ferritin construct
MFVFLVLVPLVSSQCVNLTTRTQLPPAYTNSFTRGVYYPDKVFRSSVLHSTQDLFLPFFSNVTWFHAIHVSGTNGTKRFDNPVLPFNDGVYFASTEKSNIIRGWIFGTTLDSKTQSLLIVNNATNVVIKVCEFQFCNDPFLGVYYHKNNKSWMESEFRVYSSANNCTFEYVSQPFLMDLEGKQGNFKNLREFVFKNIDGYFKIYSKHTPINLVRDLPQGFSALEPLVDLPIGINITRFQTLLALHRSYLTPGDSSSGWTAGAAAYYVGYLQPRTFLLKYNENGTITDAVDCALDPLSETKCTLKSFTVEKGIYQTSNFRVQPTESIVRFPNITNLCPFGEVFNATRFASVYAWNRKRISNCVADYSVLYNSASFSTFKCYGVSPTKLNDLCFTNVYADSFVIRGDEVRQIAPGQTGKIADYNYKLPDDFTGCVIAWNSNNLDSKVGGNYNYLYRLFRKSNLKPFERDISTEIYQAGSTPCNGVEGFNCYFPLQSYGFQPTNGVGYQPYRVVVLSFELLHAPATVCGPKKSTNLVKNKCVNFNFNGLTGTGVLTESNKKFLPFQQFGRDIADTTDAVRDPQTLEILDITPCSFGGVSVITPGTNTSNQVAVLYQDVNCTEVPVAIHADQLTPTWRVYSTGSNVFQTRAGCLIGAEHVNNSYECDIPIGAGICASYQTQTNSPRRARSVASQSIIAYTMSLGAENSVAYSNNSIAIPTNFTISVTTEILPVSMTKTSVDCTMYICGDSTECSNLLLQYGSFCTQLNRALTGIAVEQDKNTQEVFAQVKQIYKTPPIKDFGGFNFSQILPDPSKPSKRSFIEDLLFNKVTLADAGFIKQYGDCLGDIAARDLICAQKFNGLTVLPPLLTDEMIAQYCSALLAGTITSGWTFGAGAALQIPFAMQMAYRFNGIGVTQNVLYENQKLIANQFNSAIGKIQDSLSSTASALGKLQDVVNQNAQALNTLVKQLSSNFGAISSVLNDILSRLDKVEAEVQIDRLITGRLQSLQTYVTQQLIRAAEIRASANLAATKMSECVLGQSKRVDFCGKGYHLMSFPQCAPHGVVFLHVTYVPAQEKNFTTAPAICHDGKAHFPREGVFVSNGTHWFVTQRNFYEPQIITTDNTFVSGNCDVVIGIVNNTVYDPLQPELDSGGGGSDIIKLLNEQVNKEMQSSNLYMSMSSWCYTHSLDGAGLFLFDHAAEEYEHAKKLIIFLNENNVPVQLTSISAPEHKFEGLTQIFQKAYEHEQHISESINNIVDHAIKSKDHATFNFLQWYVAEQHEEEVLFKDILDKIELIGNENHGLYLADQYVKGIAKSRKS

SEQ ID NO: 9605 - protein, 1315 aa, Artificial Sequence; identical to SEQ ID NO: 9595
  SARS-CoV-2/England/200990660/2020__EPI_ISL_414523 spike protein (1-1147)(T874C_S1055C) Ferritin construct

SEQ ID NO: 9606 - protein, 1315 aa, Artificial Sequence
  SARS-CoV-2/Australia/NSW09/2020__EPI_ISL_413595 spike protein (1-1147)(T874C_S1055C) Ferritin construct
MFVFLVLLPLVSSQCVNLTTRTQLPPAYTNSFTRGVYYPDKVFRSSVLHSTQDLFLPFFSNVTWFHAIHVSGTNGTKRFDNPVLPFNDGVYFASTEKSNIIRGWIFGTTLDSKTQSLLIVNNATNVVIKVCEFQFCNDPFLGVYYHKNNKSWMESEFRVYSSANNCTFEYVSQPFLMDLEGKQGNFKNLREFVFKNIDGYFKIYSKHTPINLVRDLPQGFSALEPLVDLPIGINITRFQTLLALHRSYLTPGDSSSGWTAGAAAYYVGYLQPRTFLLKYNENGTITDAVDCALDPLSETKCTLKSFTVEKGIYQTSNFRVQPTESIVRFPNITNLCPFGEVFNATRFASVYAWNRKRISNCVADYSVLYNSASFSTFKCYGVSPTKLNDLCFTNVYADSFVIRGDEVRQIAPGQTGKIADYNYKLPDDFTGCVIAWNSNNLDSKVGGNYNYLYRLFRKSNLKPFERDISTEIYQAGSTPCNGVEGFNCYFPLQSYGFQPTNGVGYQPYRVVVLSFELLHAPATVCGPKKSTNLVKNKCVNFNFNGLTGTGVLTESNKKFLPFQQFGRDIADTTDAVRDPQTLEILDITPCSFGGVSVITPGTNTSNQVAVLYQDVNCTEVPVAIHADQLTPTWRVYSTGSNVFQTRAGCLIGAEHVNNSYECDIPIGAGICASYQTQTNSPRRARSVASQSIIAYTMSLGAENSVAYSNNSIAIPTNFTISVTTEILPVSMTKTSVDCTMYICGDSTECSNLLLQYGSFCTQLNRALTGIAVEQDKNTQEVFAQVKQIYKTPPIKDFGGFNFSQILPDPSKPSKRSFIEDLLFNKVTLADAGFIKQYGDCLGDIAARDLICAQKFNGLTVLPPLLTDEMIAQYCSALLAGTITSGWTFGAGAALQIPFAMQMAYRFNGIGVTQNVLYENQKLIANQFNSAIGKIQDSLSFTASALGKLQDVVNQNAQALNTLVKQLSSNFGAISSVLNDILSRLDKVEAEVQIDRLITGRLQSLQTYVTQQLIRAAEIRASANLAATKMSECVLGQSKRVDFCGKGYHLMSFPQCAPHGVVFLHVTYVPAQEKNFTTAPAICHDGKAHFPREGVFVSNGTHWFVTQRNFYEPQIITTDNTFVSGNCDVVIGIVNNTVYDPLQPELDSGGGGSDIIKLLNEQVNKEMQSSNLYMSMSSWCYTHSLDGAGLFLFDHAAEEYEHAKKLIIFLNENNVPVQLTSISAPEHKFEGLTQIFQKAYEHEQHISESINNIVDHAIKSKDHATFNFLQWYVAEQHEEEVLFKDILDKIELIGNENHGLYLADQYVKGIAKSRKS

SEQ ID NO: 9607 - protein, 1315 aa, Artificial Sequence; identical to SEQ ID NO: 9587
  SARS-CoV-2/Australia/NSW10/2020__EPI_ISL_413596 spike protein (1-1147)(T874C_S1055C) Ferritin construct

SEQ ID NO: 9608 - protein, 1315 aa, Artificial Sequence
  SARS-CoV-2/Switzerland/1000477797/2020__EPI_ISL_413023 spike protein (1-1147)(T874C_S1055C) Ferritin construct
MFVFLVLLPLVSSQCVNLTTRTQLPPAYTNSFTRGVYYPDKVFRSSVLHSTQDLFLPFFSNVTWFHAIHVSGTNGTKRFDNPVLPFNDGVYFASTEKSNIIRGWIFGTTLDSKTQSLLIVNNATNVVIKVCEFQFCNDPFLGVYYHKNNKSWMESEFRVYSSANNCTFEYVSQPFLMDLEGKQGNFKNLREFVFKNIDGYFNIYSKHTPINLVRDLPQGFSALEPLVDLPIGINITRFQTLLALHRSYLTPGDSSSGWTAGAAAYYVGYLQPRTFLLKYNENGTITDAVDCALDPLSETKCTLKSFTVEKGIYQTSNFRVQPTESIVRFPNITNLCPFGEVFNATRFASVYAWNRKRISNCVADYSVLYNSASFSTFKCYGVSPTKLNDLCFTNVYADSFVIRGDEVRQIAPGQTGKIADYNYKLPDDFTGCVIAWNSNNLDSKVGGNYNYLYRLFRKSNLKPFERDISTEIYQAGSTPCNGVEGFNCYFPLQSYGFQPTNGVGYQPYRVVVLSFELLHAPATVCGPKKSTNLVKNKCVNFNFNGLTGTGVLTESNKKFLPFQQFGRDIADTTDAVRDPQTLEILDITPCSFGGVSVITPGTNTSNQVAVLYQGVNCTEVPVAIHADQLTPTWRVYSTGSNVFQTRAGCLIGAEHVNNSYECDIPIGAGICASYQTQTNSPRRARSVASQSIIAYTMSLGAENSVAYSNNSIAIPTNFTISVTTEILPVSMTKTSVDCTMYICGDSTECSNLLLQYGSFCTQLNRALTGIAVEQDKNTQEVFAQVKQIYKTPPIKDFGGFNFSQILPDPSKPSKRSFIEDLLFNKVTLADAGFIKQYGDCLGDIAARDLICAQKFNGLTVLPPLLTDEMIAQYCSALLAGTITSGWTFGAGAALQIPFAMQMAYRFNGIGVTQNVLYENQKLIANQFNSAIGKIQDSLSSTASALGKLQDVVNQNAQALNTLVKQLSSNFGAISSVLNDILSRLDKVEAEVQIDRLITGRLQSLQTYVTQQLIRAAEIRASANLAATKMSECVLGQSKRVDFCGKGYHLMSFPQCAPHGVVFLHVTYVPAQEKNFTTAPAICHDGKAHFPREGVFVSNGTHWFVTQRNFYEPQIITTDNTFVSGNCDVVIGIVNNTVYDPLQPELDSGGGGSDIIKLLNEQVNKEMQSSNLYMSMSSWCYTHSLDGAGLFLFDHAAEEYEHAKKLIIFLNENNVPVQLTSISAPEHKFEGLTQIFQKAYEHEQHISESINNIVDHAIKSKDHATFNFLQWYVAEQHEEEVLFKDILDKIELIGNENHGLYLADQYVKGIAKSRKS

SEQ ID NO: 9609 - protein, 1315 aa, Artificial Sequence
  SARS-CoV-2/Belgium/BA-02291/2020__EPI_ISL_415159 spike protein (1-1147)(T874C_S1055C) Ferritin construct
MFVFLVLLPLVSSQCVNLTTRTQLPPAYTNSFTRGVYYPDKVFRSSVLHSTQDLFLPFFSNVTWFHAIHVSGTNGTKRFDNPVLPFNDGVYFASTEKSNIIRGWIFGTTLDSKTQSLLIVNNATNVVIKVCEFQFCNDPFLGVYYHKNNKSWMESEFRVYSSANNCTFEYVSQPFLMDLEGKQGNFKNLREFVFKNIDGYFKIYSKHTPINLVRDLPQGFSALEPLVDLPIGINITRFQTLLALHRSYLTPGDSSSGWTAGAAAYYVGYLQPRTFLLKYNENGTITDAVDCALDPLSETKCTLKSFTVEKGIYQTSNFRVQPTESIVRFPNITNLCPFGEVFNATRFASVYAWNRKRISNCVADYSVLYNSASFSTFKCYGVSPTKLNDLCFTNVYADSFVIRGDEVRQIAPGQTGKIADYNYKLPDDFTGCVIAWNSNNLDSKVGGNYNYLYRLFRRSNLKPFERDISTEIYQAGSTPCNGVEGFNCYFPLQSYGFQPTNGVGYQPYRVVVLSFELLPAPATVCGPKKSTNLVKNKCVNFNFNGLTGTGVLTESNKKFLPFQQFGRDIADTTDAVRDPQTLEILDITPCSFGGVSVITPGTNTSNQVAVLYQGVNCTEVPVAIHADQLTPTWRVYSTGSNVFQTRAGCLIGAEHVNNSYECDIPIGAGICASYQTQTNSPRRARSVASQSIIAYTMSLGAENSVAYSNNSIAIPTNFTISVTTEILPVSMTKTSVDCTMYICGDSTECSNLLLQYGSFCTQLNRALTGIAVEQDKNTQEVFAQVKQIYKTPPIKDFGGFNFSQILPDPSKPSKRSFIEDLLFNKVTLADAGFIKQYGDCLGDIAARDLICAQKFNGLTVLPPLLTDEMIAQYCSALLAGTITSGWTFGAGAALQIPFAMQMAYRFNGIGVTQNVLYENQKLIANQFNSAIGKIQDSLSSAAPALGKLQDVVNQNAQALNTLVKQLSSNFGAISSVLNDILSRLDKVEAEVQIDRLITGRLQSLQTYVTQQLIRAAEIRASANLAATKMSECVLGQSKRVDFCGKGYHLMSFPQCAPHGVVFLHVTYVPAQEKNFTTAPAICHDGKAHFPREGVFVSNGTHWFVTQRNFYEPQIITTDNTFVSGNCDVVIGIVNNTVYDPLQPELDSGGGGSDIIKLLNEQVNKEMQSSNLYMSMSSWCYTHSLDGAGLFLFDHAAEEYEHAKKLIIFLNENNVPVQLTSISAPEHKFEGLTQIFQKAYEHEQHISESINNIVDHAIKSKDHATFNFLQWYVAEQHEEEVLFKDILDKIELIGNENHGLYLADQYVKGIAKSRKS

SEQ ID NO: 9610 - protein, 1315 aa, Artificial Sequence
  SARS-CoV-2/USA/WA8-UW5/2020__EPI_ISL_413486 spike protein (1-1147)(T874C_S1055C) Ferritin construct
MFVFLVLLPLVSSQCVNLTTRTQLPPAYTNSFTRGVYYPDKVFRSSVLHSTQDLFLPFFSNVTWFHAIHVSGTNGTKRFDNPVLPFNDGVYFASTEKSNIIRGWIFGTTLDSKTQSLLIVNNATNVVIKVCEFQFCNDPFLGVYYHKNNKSWMESEFRVYSSANNCTFEYVSQPFLMDLEGKQGNFKNLREFVFKNIDGYFKIYSKHTPINLVRDLPQGFSALEPLVDLPIGINITRFQTLLALHRSYLTPGDSSSGWTAGAAAYYVGYLQPRTFLLKYNENGTITDAVDCALDPLSETKCTLKSFTVEKGIYQTSNFRVQPTESIVRFPNITNLCPFGEVFNATRFASVYAWNRKRISNCVADYSVLYNSASFSTFKCYGVSPTKLNDLCFTNVYADSFVIRGDEVRQIAPGQTGKIADYNYKLPDDFTGCVIAWNSNNLDSKVGGNYNYLYRLFRKSNLKPFERDISTEIYQAGSTPCNGVEGFNCYFPLQSYGFQPTNGVGYQPYRVVVLSFELLHAPATVCGPKKSTNLVKNKCVNFNFNGLTGTGVLTESNKKFLPFQQFGRDIADTTDAVRDPQTLEILDITPCSFGGVSVITPGTNTSNQVAVLYQDVNCTEVPVAIHADQLTPTWRVYSTGSNVFQTRAGCLIGAEYVNNSYECDIPIGAGICASYQTQTNSPRRARSVASQSIIAYTMSLGAENSVAYSNNSIAIPTNFTISVTTEILPVSMTKTSVDCTMYICGDSTECSNLLLQYGSFCTQLNRALTGIAVEQDKNTQEVFAQVKQIYKTPPIKDFGGFNFSQILPDPSKPSKRSFIEDLLFNKVTLADAGFIKQYGDCLGDIAARDLICAQKFNGLTVLPPLLTDEMIAQYCSALLAGTITSGWTFGAGAALQIPFAMQMAYRFNGIGVTQNVLYENQKLIANQFNSAIGKIQDSLSSTASALGKLQDVVNQNAQALNTLVKQLSSNFGAISSVLNDILSRLDKVEAEVQIDRLITGRLQSLQTYVTQQLIRAAEIRASANLAATKMSECVLGQSKRVDFCGKGYHLMSFPQCAPHGVVFLHVTYVPAQEKNFTTAPAICHDGKAHFPREGVFVSNGTHWFVTQRNFYEPQIITTDNTFVSGNCDVVIGIVNNTVYDPLQPELDSGGGGSDIIKLLNEQVNKEMQSSNLYMSMSSWCYTHSLDGAGLFLFDHAAEEYEHAKKLIIFLNENNVPVQLTSISAPEHKFEGLTQIFQKAYEHEQHISESINNIVDHAIKSKDHATFNFLQWYVAEQHEEEVLFKDILDKIELIGNENHGLYLADQYVKGIAKSRKS

SEQ ID NO: 9611 - protein, 1315 aa, Artificial Sequence
  SARS-CoV-2/England/20102000506/2020__EPI_ISL_415147 spike protein (1-1147)(T874C_S1055C) Ferritin construct
MFVFLVLLPLVSSQCVNLTTRTQLPPAYTNSFTRGVYYPDKVFRSSVLHSTQDLFLPFFSNVTWFHAIHVSGTNGTKRFDNPVLPFNDGVYFASTEKSNIIRGWIFGTTLDSKTQSLLIVNNATNVVIKVCEFQFCNDPFLGVYYHKNNKSWMESEFRVYSSANNCTFEYVSQPFLMDLEGKQGNFKNLREFVFKNIDGYFKIYSKHTPINLVRDLPQGFSALEPLVDLPIGINITRFQTLLALHRSYLTPGDSSSGWTAGAAAYYVGYLQPRTFLLKYNENGTITDAVDCALDPLSETKCTLKSFTVEKGIYQTSNFRVQPTESIVRFPNITNLCPFGEVFNATRFASVYAWNRKRISNCVADYSVLYNSASFSTFKCYGVSPTKLNDLCFTNVYADSFVIRGDEVRQIAPGQTGKIADYNYKLPDDFTGCVIAWNSNNLDSKVGGNYNYLYRLFRKSNLKPFERDISTEIYQAGSTPCNGVEGFNCYFPLQSYGFQPTNGVGYQPYRVVVLSFELLHAPATVCGPKKSTNLVKNKCVNFNFNGLTGTGVLTESNKKFLPFQQFGRDIADTTDAVRDPQTLEILDITPCSFGGVSVITPGTNTSNQVAVLYQGVNCTEVPVAIHADQLTPTWRVYSTGSNVFQTRAGCLIGAEHVNNSYECDIPIGAGICASYQTQTNSPRRARSVASQSIIAYTMSLGAENSVAYSNNSIAIPTNFTISVTTEILPVSMTKTSVDCTMYICGDSTECSNLLLQYGSFCTQLNRALTGIAVEQDKNTQEVFAQVKQIYKTPPIKDFGGFNFSQILPDPSKPSKRSFIEDLLFNKVTLADAGFIKQYGYCLGDIAARDLICAQKFNGLTVLPPLLTDEMIAQYCSALLAGTITSGWTFGAGAALQIPFAMQMAYRFNGIGVTQNVLYENQKLIANQFNSAIGKIQDSLSSTASALGKLQDVVNQNAQALNTLVKQLSSNFGAISSVLNDILSRLDKVEAEVQIDRLITGRLQSLQTYVTQQLIRAAEIRASANLAATKMSECVLGQSKRVDFCGKGYHLMSFPQCAPHGVVFLHVTYVPAQEKNFTTAPAICHDGKAHFPREGVFVSNGTHWFVTQRNFYEPQIITTDNTFVSGNCDVVIGIVNNTVYDPLQPELDSGGGGSDIIKLLNEQVNKEMQSSNLYMSMSSWCYTHSLDGAGLFLFDHAAEEYEHAKKLIIFLNENNVPVQLTSISAPEHKFEGLTQIFQKAYEHEQHISESINNIVDHAIKSKDHATFNFLQWYVAEQHEEEVLFKDILDKIELIGNENHGLYLADQYVKGIAKSRKS

SEQ ID NO: 9612 - protein, 1315 aa, Artificial Sequence
  SARS-CoV-2/Belgium/VAG-03013/2020__EPI_ISL_415155 spike protein (1-1147)(T874C_S1055C) Ferritin construct
MFVFLVLLPLVSSQCVNLTTRTQLPPAYTNSFTRGVYYPDKVFRSSVLHSTQDLFLPFFSNVTWFHAIHVSGTNGTKRFDNPVLPFNDGVYFASTEKSNIIRGWIFGTTLDSKTQSLLIVNNATNVVIKVCEFQFCNDPFLGVYYHKNNKSWMESEFRVYSSANNCTFEYVSQPFLMDLEGKQGNFKNLREFVFKNIDGYFKIYSKHTPINLVRDLPQGFSALEPLVDLPIGINITRFQTLLALHRSYLTPGDSSSGWTAGAAAYYVGYLQPRTFLLKYNENGTITDAVDCALDPLSETKCTLKSFTVEKGIYQTSNFRVQPTESIVRFPNITNLCPFGEVFNATRFASVYAWNRKRISNCVADYSVLYNSASFSTFKCYGVSPTKLNDLCFTNVYADSFVIRGDEVRQIAPGQTGKIADYNYKLPDDFTGCVIAWNSNNLDSKVGGNYNYLYRLFRKSNLKPFERDISTEIYQAGSTPCNGVEGFNCYFPLQSYGFQPTNGVGYQPYRVVVLSFELLHAPATVCGPKKSTNLVKNKCVNFNFNGLTGTGVLTESNKKFLPFQQFGRDIADTTDAVRDPQTLEILDITPCSFGGVSVITPGTNTSNQVAVLYQGVNCTEVPVAIHADQLTPTWRVYSTGSNVFQTRAGCLIGAEHVNNSYECDIPIGAGICASYQTQTNSPRRARSVASQSIIAYTMSLGAENSVAYSNNSIAIPTNFTISVTTEILPVSMTKTSVDCTMYICGDSTECSNLLLQYGSFCTQLNRALTGIAVEQDKNTQEVFAQVKQIYKTPPIKDFGGFNFSQILPDPSKPSKRSFIEDLLFNKVTLADAGFIKQYGDCLGDIAARDLICAQKFNGLTVLPPLLTDEMIAQYCSALLAGTITSGWTFGAGAALQIPFAMQMAYRFNGIGVTQNVLYENQKLIANQFNSAIGKIQDSLSSTATALGKLQDVVNQNAQALNTLVKQLSSNFGAISSVLNDILSRLDKVEAEVQIDRLITGRLQSLQTYVTQQLIRAAEIRASANLAATKMSECVLGQSKRVDFCGKGYHLMSFPQCAPHGVVFLHVTYVPAQEKNFTTAPAICHDGKAHFPREGVFVSNGTHWFVTQRNFYEPQIITTDNTFVSGNCDVVIGIVNNTVYDPLQPELDSGGGGSDIIKLLNEQVNKEMQSSNLYMSMSSWCYTHSLDGAGLFLFDHAAEEYEHAKKLIIFLNENNVPVQLTSISAPEHKFEGLTQIFQKAYEHEQHISESINNIVDHAIKSKDHATFNFLQWYVAEQHEEEVLFKDILDKIELIGNENHGLYLADQYVKGIAKSRKS

SEQ ID NO: 9613 - protein, 1315 aa, Artificial Sequence
  SARS-CoV-2/Belgium/BC-03016/2020__EPI_ISL_415157 spike protein (1-1147)(T874C_S1055C) Ferritin construct
MFVFLVLLPLVSSQCVNLTTRTQLPPAYTNSFTRGVYYPDKVFRSSVLHSTQDLFLPFFSNVTWFHAIHVSGTNGTKRFDNPVLPFNDGVYFASTEKSNIIRGWIFGTTLDSKTQSLLIVNNATNVVIKVCEFQFCNDPFLGVYYHKNNKSWMESEFRVYSSANNCTFEYVSQPFLMDLEGKQGNFKNLREFVFKNIDGYFKIYSKHTPINLVRDLPQGFSALEPLVDLPIGINITRFQTLLALHRSYLTPGDSSSGWTAGAAAYYVGYLQPRTFLLKYNENGTITDAVDCALDPLSETKCTLKSFTVEKGIYQTSNFRVQPTESIVRFPNITNLCPFGEVFNATRFASVYAWNRKRISNCVADYSVLYNSASFSTFKCYGVSPTKLNDLCFTNVYADSFVIRGDEVRQIAPGQTGKIADYNYKLPDDFTGCVIAWNSNNLDSKVGGNYNYLYRLFRKSNLKPFERDISTEIYQAGSTPCNGVEGFNCYFPLQSYGFQPTNGVGYQPYRVVVLSFELLHAPATVCGPKKSTNLVKNKCVNFNFNGLTGTGVLTESNKKFLPFQQFGRDIADTTDAVRDPQTLEILDITPCSFGGVSVITPGTNTSNQVAVLYQGVNCTEVPVAIHADQLTPTWRVYSTGSNVFQTRAGCLIGAEHVNNSYECDIPIGAGICASYQTQTNSPRRARSVASQSIIAYTMSLGAENSVAYSNNSIAIPTNFTISVTTEILPVSMTKTSVDCTMYICGDSTECSNLLLQYGSFCTQLNRALTGIAVEQDKNTQEVFAQVKQIYKTPPIKDFGGFNFSQILPDPSKPSKRSFIEDLLFNKVTLADAGFIKQYGDCLGDIAARDLICAQKFNGLTVLPPLLTDEMIAQYCSALLAGTITSGWTFGAGAALQIPFAMQMAYRFNGIGVTQNVLYENQKLIANQFNSAIGKIQDSLSSTAPALGKLQDVVNQNAQALNTLVKQLSSNFGAISSVLNDILSRLDKVEAEVQIDRLITGRLQSLQTYVTQQLIRAAEIRASANLAATKMSECVLGQSKRVDFCGKGYHLMSFPQCAPHGVVFLHVTYVPAQEKNFTTAPAICHDGKAHFPREGVFVSNGTHWFVTQRNFYEPQIITTDNTFVSGNCDVVIGIVNNTVYDPLQPELDSGGGGSDIIKLLNEQVNKEMQSSNLYMSMSSWCYTHSLDGAGLFLFDHAAEEYEHAKKLIIFLNENNVPVQLTSISAPEHKFEGLTQIFQKAYEHEQHISESINNIVDHAIKSKDHATFNFLQWYVAEQHEEEVLFKDILDKIELIGNENHGLYLADQYVKGIAKSRKS

SEQ ID NO: 9614 - protein, 1315 aa, Artificial Sequence
  SARS-CoV-2/Germany/BavPat3/2020__EPI_ISL_414521 spike protein (1-1147)(T874C_S1055C) Ferritin construct
MFVFLVLLPLVSSQCVNLTTRTQLPPAYTNSFTRGVYYPDKVFRSSVLHSTQDLFLPFFSNVTWFHAIHVSGTNGTKRFDNPVLPFNDGVYFASTEKSNIIRGWIFGTTLDSKTQSLLIVNNATNVVIKVCEFQFCNDPFLGVYYHKNNKSWMESEFRVYSSANNCTFEYVSQPFLMDLEGKQGNFKNLREFVFKNIDGYFKIYSKHTPINLVRDLPQGFSALEPLVDLPIGINITRFQTLLALHRSYLTPGDSSSGWTAGAAAYYVGYLQPRTFLLKYNENGTITDAVDCALDPLSETKCTLKSFTVEKGIYQTSNFRVQPTESIVRFPNITNLCPFGEVFNATRFASVYAWNRKRISNCVADYSVLYNSASFSTFKCYGVSPTKLNDLCFTNVYADSFVIRGDEVRQIAPGQTGKIADYNYKLPDDFTGCVIAWNSNNLDSKVGGNYNYLYRLFRKSNLKPFERDISTEIYQAGSTPCNGVEGFNCYFPLQSYGFQPTNGVGYQPYRVVVLSFELLHAPATVCGPKKSTNLVKNKCVNFNFNGLTGTGVLTESNKKFLPFQQFGRDIADTTDAVRDPQTLEILDITPCSFGGVSVITPGTNTSNQVAVLYQDVNCTEVPVAIHADQLTPTWRVYSTGSNVFQTRAGCLIGAEHVNNSYECDIPIGAGICASYQTQTNSPRRARSVASQSIIAYTMSLGAENSVAYSNNSIAIPTNFTISVTTEILPVSMTKTSVDCTMYICGDSTECSNLLLQYGSFCTQLNRALTGIAVEQDKNTQQVFAQVKQIYKTPPIKDFGGFNFSQILPDPSKPSKRSFIEDLLFNKVTLADAGFIKQYGDCLGDIAARDLICAQKFNGLTVLPPLLTDEMIAQYCSALLAGTITSGWTFGAGAALQIPFAMQMAYRFNGIGVTQNVLYENQKLIANQFNSAIGKIQDSLSSTASALGKLQDVVNQNAQALNTLVKQLSSNFGAISSVLNDILSRLDKVEAEVQIDRLITGRLQSLQTYVTQQLIRAAEIRASANLAATKMSECVLGQSKRVDFCGKGYHLMSFPQCAPHGVVFLHVTYVPAQEKNFTTAPAICHDGKAHFPREGVFVSNGTHWFVTQRNFYEPQIITTDNTFVSGNCDVVIGIVNNTVYDPLQPELDSGGGGSDIIKLLNEQVNKEMQSSNLYMSMSSWCYTHSLDGAGLFLFDHAAEEYEHAKKLIIFLNENNVPVQLTSISAPEHKFEGLTQIFQKAYEHEQHISESINNIVDHAIKSKDHATFNFLQWYVAEQHEEEVLFKDILDKIELIGNENHGLYLADQYVKGIAKSRKS

SEQ ID NO: 9615 - protein, 1315 aa, Artificial Sequence
  SARS-CoV-2/France/HF1805/2020__EPI_ISL_414628 spike protein (1-1147)(T874C_S1055C) Ferritin construct
MFVFLVLLPLVSSQCVNLTTRTQLPPAYTNSFTRGVYYPDKVFRSSVLHSTQDLFLPFFSNVTWFHAIHVSGTNGTKRFDNPVLPFNDGVYFASTEKSNIIRGWIFGTTLDSKTQSLLIVNNATNVVIKVCEFQFCNDPFLGVYYHKNNKSWMESEFRVYSSANNCTFEYVSQPFLMDLEGKQGNFKNLREFVFKNIDGYFKIYSKHTPINLVRDLPQGFSALEPLVDLPIGINITRFQTLLALHRSYLTPGDSSSGWTAGAAAYYVGYLQPRTFLLKYNENGTITDAVDCALDPLSETKCTLKSFTVEKGIYQTSNFRVQPTESIVRFPNITNLCPFGEVFNATRFASVYAWNRKRISNCVADYSVLYNSASFSTFKCYGVSPTKLNDLCFTNVYADSFVIRGDEVRQIAPGQTGKIADYNYKLPDDFTGCVIAWNSNNLDSKVGGNYNYLYRLFRKSNLKPFERDISTEIYQAGSTPCNGVEGFNCYFPLQSYGFQPTNGVGYQPYRVVVLSFELLHAPATVCGPKKSTNLVKNKCVNFNFNGLTGTGVLTESNKKFLPFQQFGRDIADTTDAVRDPQTLEILDITPCSFGGVSVITPGTNTSNQVAVLYQGVNCTEVPVAIHADQLTPTWRVYSTGSNVFQTRAGCLIGAEHVNNSYECDIPIGAGICASYQTQTNSPRRARSVASQSIIAYTMSLGAENSVAYSNNSIAIPTNFTISVTTEILPVSMTKTSVDCTMYICGDSTECSNLLLQYGSFCTQLNRALTGIAVEQDKNTQEVFAQVKQIYKTPPIKDFGGFNFSQILPDPSKPSKRSFIEDLLFNKVTLADAGFIKQYGDCLGDIAARDLICAQKFNGLTVLPPLLTDEMIAQYCSALLAGTITSGWTFGAGAALQIPFAMQMAYRFNGIGVTQNVLYENQKLIANQFNSAIGKIQDSLSSTASALGKLQDVVNQNAQALNTLVKQLSSNFGAISSVLNDILSRLDKVEAEVQIDRLITGRLQSLQTYVTQQLIRAAEIRASANLAATKMSECVLGQSKRVDFCGKGYHLMSFPQCAPHGVVFLHVTYVPAQEKNFTTAPAICHDGKAHFPREGVFVSNGTHWFVTQRNFYEPQIITTDNTFVSGNCDVVIGVVNNTVYDPLQPELDSGGGGSDIIKLLNEQVNKEMQSSNLYMSMSSWCYTHSLDGAGLFLFDHAAEEYEHAKKLIIFLNENNVPVQLTSISAPEHKFEGLTQIFQKAYEHEQHISESINNIVDHAIKSKDHATFNFLQWYVAEQHEEEVLFKDILDKIELIGNENHGLYLADQYVKGIAKSRKS

SEQ ID NO: 9616 - protein, 1315 aa, Artificial Sequence
  SARS-CoV-2/Netherlands/ZuidHolland_9/2020__EPI_ISL_414445 spike protein (1-1147)(T874C_S1055C) Ferritin construct
MFVFLVLLPLVSSQCVNLTTRTQLPPAYTNSFTRGVYYPDKVFRSSVLHSTQDLFLPFFSNVTWFHAIHVSGTNGTKRFDNPVLPFNDGVYFASTEKSNIIRGWIFGTTLDSKTQSLLIVNNATNVVIKVCEFQFCNDPFLGVYYHKNNKSWMESEFRVYSSANNCTFEYVSQPFLMDLEGKQGNFKNLREFVFKNIDGYFKIYSKHTPINLVRDLPQGFSALEPLVDLPIGINITRFQTLLALHRSYLTPGDSSSGWTAGAAAYYVGYLQPRTFLLKYNENGTITDAVDCALDPLSETKCTLKSFTVEKGIYQTSNFRVQPTESIVRFPNITNLCPFGEVFNATRFASVYAWNRKRISNCVADYSVLYNSASFSTFKCYGVSPTKLNDLCFTNVYADSFVIRGDEVRQIAPGQTGKIADYNYKLPDDFTGCVIAWNSNNLDSKVGGNYNYLYRLFRKSNLKPFERDISTEIYQAGSTPCNGVEGFNCYFPLQSYGFQPTNGVGYQPYRVVVLSFELLHAPATVCGPKKSTNLVKNKCVNFNFNGLTGTGVLTESNKKFLPFQQFGRDIADTTDAVRDPQTLEILDITPCSFGGVSVITPGTNTSNQVAVLYQGVNCTEVPVAIHADQLTPTWRVYSTGSNVFQTRAGCLIGAEHVNNSYECDIPIGAGICASYQTQTNSPRRARSVASQSIIAYTMSLGAENSVAYSNNSIAIPTNFTISVTTEILPVSMTKTSVDCTMYICGDSTECSNLLLQYGSFCTQLNRALTGIAVEQDKNTQEVFAQVKQIYKTPPIKDFGGFNFSQILPDPSKPSKRSFIEDLLFNKVTLADAGFIKQYGDCLGDIAARDLICVQKFNGLTVLPPLLTDEMIAQYCSALLAGTITSGWTFGAGAALQIPFAMQMAYRFNGIGVTQNVLYENQKLIANQFNSAIGKIQDSLSSTASALGKLQDVVNQNAQALNTLVKQLSSNFGAISSVLNDILSRLDKVEAEVQIDRLITGRLQSLQTYVTQQLIRAAEIRASANLAATKMSECVLGQSKRVDFCGKGYHLMSFPQCAPHGVVFLHVTYVPAQEKNFTTAPAICHDGKAHFPREGVFVSNGTHWFVTQRNFYEPQIITTDNTFVSGNCDVVIGIVNNTVYDPLQPELDSGGGGSDIIKLLNEQVNKEMQSSNLYMSMSSWCYTHSLDGAGLFLFDHAAEEYEHAKKLIIFLNENNVPVQLTSISAPEHKFEGLTQIFQKAYEHEQHISESINNIVDHAIKSKDHATFNFLQWYVAEQHEEEVLFKDILDKIELIGNENHGLYLADQYVKGIAKSRKS

SEQ ID NO: 9617 - protein, 1315 aa, Artificial Sequence
  SARS-CoV-2/Finland/FIN03032020A/2020__EPI_ISL_413602 spike protein (1-1147)(T874C_S1055C) Ferritin construct
MFVFLVLLPLVSSQCVNLTTRTQLPPAYTNSFTRGVYYPDKVFRSSVLHSTQDLFLPFFSNVTWFHAIHVSGTNGTKRFDNPVLPFNDGVYFASTEKSNIIRGWIFGTTLDSKTQSLLIVNNATNVVIKVCEFQFCNDPFLGVYYHKNNKSWMESEFRVYSSANNCTFEYVSQPFLMDLEGKQGNFKNLREFVFKNIDGYFKIYSKHTPINLVRDLPQGFSALEPLVDLPIGINITRFQTLLALHRSYLTPGDSSSGWTAGAAAYYVGYLQPRTFLLKYNENGTITDAVDCALDPLSETKCTLKSFTVEKGIYQTSNFRVQPTESIVRFPNITNLCPFGEVFNATRFASVYAWNRKRISNCVADYSVLYNSASFSTFKCYGVSPTKLNDLCFTNVYADSFVIRGDEVRQIAPGQTGKIADYNYKLPDDFTGCVISWNSNNLDSKVGGNYNYLYRLFRKSNLKPFERDISTEIYQAGSTPCNGVEGFNCYFPLQSYGFQPTNGVGYQPYRVVVLSFELLHAPATVCGPKKSTNLVKNKCVNFNFNGLTGTGVLTESNKKFLPFQQFGRDIADTTDAVRDPQTLEILDITPCSFGGVSVITPGTNTSNQVAVLYQGVNCTEVPVAIHADQLTPTWRVYSTGSNVFQTRAGCLIGAEHVNNSYECDIPIGAGICASYQTQTNSPRRARSVASQSIIAYTMSLGAENSVAYSNNSIAIPTNFTISVTTEILPVSMTKTSVDCTMYICGDSTECSNLLLQYGSFCTQLNRALTGIAVEQDKNTQEVFAQVKQIYKTPPIKDFGGFNFSQILPDPSKPSKRSFIEDLLFNKVTLADAGFIKQYGDCLGDIAARDLICAQKFNGLTVLPPLLTDEMIAQYCSALLAGTITSGWTFGAGAALQIPFAMQMAYRFNGIGVTQNVLYENQKLIANQFNSAIGKIQDSLSSTASALGKLQDVVNQNAQALNTLVKQLSSNFGAISSVLNDILSRLDKVEAEVQIDRLITGRLQSLQTYVTQQLIRAAEIRASANLAATKMSECVLGQSKRVDFCGKGYHLMSFPQCAPHGVVFLHVTYVPAQEKNFTTAPAICHDGKAHFPREGVFVSNGTHWFVTQRNFYEPQIITTDNTFVSGNCDVVIGIVNNTVYDPLQPELDSGGGGSDIIKLLNEQVNKEMQSSNLYMSMSSWCYTHSLDGAGLFLFDHAAEEYEHAKKLIIFLNENNVPVQLTSISAPEHKFEGLTQIFQKAYEHEQHISESINNIVDHAIKSKDHATFNFLQWYVAEQHEEEVLFKDILDKIELIGNENHGLYLADQYVKGIAKSRKS

SEQ ID NO: 9618 - protein, 1315 aa, Artificial Sequence
  SARS-CoV-2/France/GE1977/2020__EPI_ISL_414632 spike protein (1-1147)(T874C_S1055C) Ferritin construct
MFVFLVLLPLVSSQCVNLTTRTQLPPAYTNSFTRGVYYPDKVFRSSVLHSTQDLFLPFFSNVTWFHAIHVSGTNGTKRFDNPVLPFNDGVYFASTEKSNIIRGWIFGTTLDSKTQSLLIVNNATNVVIKVCEFQFCNDPFLGVYYHKNNKSWMESEFRVYSSANNCTFEYVSQPFLMDLEGKQGNFKNLREFVFKNIDGYFKIYSKHTPINLVRDLPQGFSALEPLVDLPIGINITRFQTLLALHRSYLTPGDSSSGWTAGAAAYYVGYLQPRTFLLKYNENGTITDAVDCALDPLSETKCTLKSFTVEKGIYQTSNFRVQPTESIVRFPNITNLCPFGEVFNATRFASVYAWNRKRISNCVADYSVLYNSASFSTFKCYGVSPTKLNDLCFTNVYADSFVIRGDEVRQIAPGQTGKIADYNYKLPDDFTGCVIAWNSNNLDSKVGGNYNYLYRLFRKSNLKPFERDISTEIYQAGSTPCNGVEGFNCYFPLQSYGFQPTNGVGYQPYRVVVLSFELLHAPATVCGPKKSTNLVKNKCVNFNFNGLTGTGVLTESNKKFLPFQQFGRDIADTTDAVRDPQTLEILDITPCSFGGVSVITPGTNTSNQVAVLYQGVNCTEVPVAIHADQLTPTWRVYSTGSNVFQTRAGCLIGAEHVNNSYECDIPIGAGICASYQTQTNSPRRARSVASQSIIAYTMSLGAENSVAYSNNSIAIPTNFTISVTTEILPVSMTKTSVDCTMYICGDSTECSNLLLQYGSFCTQLNRALTGIAVEQDKNTQEVFAQVKQIYKTPPIKDFGGFNFSQILPDPSKPSKRSFIEDLLFNKVTLADAGFIKQYGDCLGDIAARDLICAQKFNGLTVLPPLLTDEMIAQYCSALLAGTITSGWTFGAGAALQIPFAMQMAYRFNGIGVTQNVLYENQKLIANQFNSAIGKIQDSLFSTASALGKLQDVVNQNAQALNTLVKQLSSNFGAISSVLNDILSRLDKVEAEVQIDRLITGRLQSLQTYVTQQLIRAAEIRASANLAATKMSECVLGQSKRVDFCGKGYHLMSFPQCAPHGVVFLHVTYVPAQEKNFTTAPAICHDGKAHFPREGVFVSNGTHWFVTQRNFYEPQIITTDNTFVSGNCDVVIGIVNNTVYDPLQPELDSGGGGSDIIKLLNEQVNKEMQSSNLYMSMSSWCYTHSLDGAGLFLFDHAAEEYEHAKKLIIFLNENNVPVQLTSISAPEHKFEGLTQIFQKAYEHEQHISESINNIVDHAIKSKDHATFNFLQWYVAEQHEEEVLFKDILDKIELIGNENHGLYLADQYVKGIAKSRKS

SEQ ID NO: 9619 - protein, 1315 aa, Artificial Sequence
  SARS-CoV-2/Finland/FIN-313/2020__EPI_ISL_414641 spike protein (1-1147)(T874C_S1055C) Ferritin construct
MFVFLVLLPLVSSQCVNLTTRTQLPPAYTNSFTRGVYYPDKVFRSSVLHSTQDLFLPFFSNVTWFHAIHVSGTNGTKRFDNPVLPFNDGVYFASTEKSNIIRGWIFGTTLDSKTQSLLIVNNATNVVIKVCEFQFCNDPFLGVYYHKNNKSWMESEFRVYSSANNCTFEYVSQPFLMDLEGKQGNFKNLREFVFKNIDGYFKIYSKHTPINLVRDLPQGFSALEPLVDLPIGINITRFKTLLALHRSYLTPGDSSSGWTAGAAAYYVGYLQPRTFLLKYNENGTITDAVDCALDPLSETKCTLKSFTVEKGIYQTSNFRVQPTESIVRFPNITNLCPFGEVFNATRFASVYAWNRKRISNCVADYSVLYNSASFSTFKCYGVSPTKLNDLCFTNVYADSFVIRGDEVRQIAPGQTGKIADYNYKLPDDFTGCVIAWNSNNLDSKVGGNYNYLYRLFRKSNLKPFERDISTEIYQAGSTPCNGVEGFNCYFPLQSYGFQPTNGVGYQPYRVVVLSFELLHAPATVCGPKKSTNLVKNKCVNFNFNGLTGTGVLTESNKKFLPFQQFGRDIADTTDAVRDPQTLEILDITPCSFGGVSVITPGTNTSNQVAVLYQGVNCTEVPVAIHADQLTPTWRVYSTGSNVFQTRAGCLIGAEHVNNSYECDIPIGAGICASYQTQTNSPRRARSVASQSIIAYTMSLGAENSVAYSNNSIAIPTNFTISVTTEILPVSMTKTSVDCTMYICGDSTECSNLLLQYGSFCTQLNRALTGIAVEQDKNTQEVFAQVKQIYKTPPIKDFGGFNFSQILPDPSKPSKRSFIEDLLFNKVTLADAGFIKQYGDCLGDIAARDLICAQKFNGLTVLPPLLTDEMIAQYCSALLAGTITSGWTFGAGAALQIPFAMQMAYRFNGIGVTQNVLYENQKLIANQFNSAIGKIQDSLSSTASALGKLQDVVNQNAQALNTLVKQLSSNFGAISSVLNDILSRLDKVEAEVQIDRLITGRLQSLQTYVTQQLIRAAEIRASANLAATKMSECVLGQSKRVDFCGKGYHLMSFPQCAPHGVVFLHVTYVPAQEKNFTTAPAICHDGKAHFPREGVFVSNGTHWFVTQRNFYEPQIITTDNTFVSGNCDVVIGIVNNTVYDPLQPELDSGGGGSDIIKLLNEQVNKEMQSSNLYMSMSSWCYTHSLDGAGLFLFDHAAEEYEHAKKLIIFLNENNVPVQLTSISAPEHKFEGLTQIFQKAYEHEQHISESINNIVDHAIKSKDHATFNFLQWYVAEQHEEEVLFKDILDKIELIGNENHGLYLADQYVKGIAKSRKS

SEQ ID NO: 9620 - protein, 1315 aa, Artificial Sequence
  SARS-CoV-2/Netherlands/ZuidHolland_2/2020__EPI_ISL_414556 spike protein (1-1147)(T874C_S1055C) Ferritin construct
MFVFLVLLPLVSSQCVNLTTRTQLPPAYTNSFTRGVYYPDKVFRSSVLHSTQDLFLPFFSNVTWFHAIHVSGTNGTKRFDNPVLPFNDGVYFASTEKSNIIRGWIFGTTLDSKTQSLLIVNNATNVVIKVCEFQFCNDPFLGVYYHKNNKSWMESEFRVYSSANNCTFEYVSQPFLMDLEGKQGNFKNLREFVFKNIDGYFKIYSKHTPINLVRDLPQGFSALEPLVDLPIGINITRFQTLLALHRSYLTPGDSSSGWTAGAAAYYVGYLQPRTFLLKYNENGTITDAVDCALDPLSETKCTLKSFTVEKGIYQTSNFRVQPTESIVRFPNITNLCPFGEVFNATRFASVYAWNRKRISNCVADYSVLYNSASFSTFKCYGVSPTKLNDLCFTNVYADSFVIRGDEVRQIAPGQTGKIADYNYKLPDDFTGCVIAWNSNNLDSKVGGNYNYLYRLFRKSNLKPFERDISTEIYQAGSTPCNGVEGFNCYFPLQSYGFQPTNGVGYQPYRVVVLSFELLHAPATVCGPKKSTNLVKNKCVNFNFNGLTGTGVLTESNKKFLPFQQFGRDIADTTDAVRDPQTLEILDITPCSFGGVSVITPGTNTSNQVAVLYQGVNCTEVPVAIHADQLTPTWRVYSTGSNVFQTRAGCLIGAEHVNNSYECDIPIGAGICASYQTQTNSPRRARSVASQSIIAYTMSLGAENSVAYSNNSIAIPTNFTISVTTEILPVSMTKTSVDCTMYICGDSTECSNLLLQYGSFCTQLNRALTGIALEQDKNTQEVFAQVKQIYKTPPIKDFGGFNFSQILPDPSKPSKRSFIEDLLFNKVTLADAGFIKQYGDCLGDIAARDLICAQKFNGLTVLPPLLTDEMIAQYCSALLAGTITSGWTFGAGAALQIPFAMQMAYRFNGIGVTQNVLYENQKLIANQFNSAIGKIQDSLSSTASALGKLQDVVNQNAQALNTLVKQLSSNFGAISSVLNDILSRLDKVEAEVQIDRLITGRLQSLQTYVTQQLIRAAEIRASANLAATKMSECVLGQSKRVDFCGKGYHLMSFPQCAPHGVVFLHVTYVPAQEKNFTTAPAICHDGKAHFPREGVFVSNGTHWFVTQRNFYEPQIITTDNTFVSGNCDVVIGIVNNTVYDPLQPELDSGGGGSDIIKLLNEQVNKEMQSSNLYMSMSSWCYTHSLDGAGLFLFDHAAEEYEHAKKLIIFLNENNVPVQLTSISAPEHKFEGLTQIFQKAYEHEQHISESINNIVDHAIKSKDHATFNFLQWYVAEQHEEEVLFKDILDKIELIGNENHGLYLADQYVKGIAKSRKS

SEQ ID NO: 9621 - protein, 1315 aa, Artificial Sequence
  SARS-CoV-2/USA/WA-UW31/2020__EPI_ISL_414618 spike protein (1-1147)(T874C_S1055C) Ferritin construct
MFVFLVLLPLVSSQCVNLTTRTQLPPAYTNSFTRGVYYPDKVFRSSVLHSTQDLFLPFFSNVTWFHAIHVSGTNGTKRFDNPVLPFNDGVYFASTEKSNIIRGWIFGTTLDSKTQSLLIVNNATNVVIKVCEFQFCNDPFLGVYYHKNNKSWMESEFRVYSSANNCTFEYVSQPFLMDLEGKQGNFKNLREFVFKNIDGYFKIYSKHTPINLVRDLPQGFSALEPLVDLPIGINITRFQTLLALHRSYLTPGDSSSGWTAGAAAYYVGYLQPRTFLLKYNENGTITDAVDCALDPLSETKCTLKSFTVEKGIYQTSNFRVQPTESIVRFPNITNLCPFGEVFNATRFASVYAWNRKRISNCVADYSVLYNSASFSTFKCYGVSPTKLNDLCFTNVYADSFVIRGDEVRQIAPGQTGKIADYNYKLPDDFTGCVIAWNSNNLDSKVGGNYNYLYRLFRKSNLKPFERDISTEIYQAGSTPCNGAEGFNCYFPLQSYGFQPTNGVGYQPYRVVVLSFELLHAPATVCGPKKSTNLVKNKCVNFNFNGLTGTGVLTESNKKFLPFQQFGRDIADTTDAVRDPQTLEILDITPCSFGGVSVITPGTNTSNQVAVLYQDVNCTEVPVAIHADQLTPTWRVYSTGSNVFQTRAGCLIGAEHVNNSYECDIPIGAGICASYQTQTNSPRRARSVASQSIIAYTMSLGAENSVAYSNNSIAIPTNFTISVTTEILPVSMTKTSVDCTMYICGDSTECSNLLLQYGSFCTQLNRALTGIAVEQDKNTQEVFAQVKQIYKTPPIKDFGGFNFSQILPDPSKPSKRSFIEDLLFNKVTLADAGFIKQYGDCLGDIAARDLICAQKFNGLTVLPPLLTDEMIAQYCSALLAGTITSGWTFGAGAALQIPFAMQMAYRFNGIGVTQNVLYENQKLIANQFNSAIGKIQDSLSSTASALGKLQDVVNQNAQALNTLVKQLSSNFGAISSVLNDILSRLDKVEAEVQIDRLITGRLQSLQTYVTQQLIRAAEIRASANLAATKMSECVLGQSKRVDFCGKGYHLMSFPQCAPHGVVFLHVTYVPAQEKNFTTAPAICHDGKAHFPREGVFVSNGTHWFVTQRNFYEPQIITTDNTFVSGNCDVVIGIVNNTVYDPLQPELDSGGGGSDIIKLLNEQVNKEMQSSNLYMSMSSWCYTHSLDGAGLFLFDHAAEEYEHAKKLIIFLNENNVPVQLTSISAPEHKFEGLTQIFQKAYEHEQHISESINNIVDHAIKSKDHATFNFLQWYVAEQHEEEVLFKDILDKIELIGNENHGLYLADQYVKGIAKSRKS

SEQ ID NO: 9622 - protein, 1315 aa, Artificial Sequence
  SARS-CoV-2/South Korea/SNU01/2020__EPI_ISL_411929 spike protein (1-1147)(T874C_S1055C) Ferritin construct
MFVFLVLLPLVSSQCVNLTTRTQLPPAYTNSFTRGVYYPDKVFRSSVLHSTQDLFLPFFSNVTWFHAIHVSGTNGTKRFDNPVLPFNDGVYFASTEKSNIIRGWIFGTTLDSKTQSLLIVNNATNVVIKVCEFQFCNDPFLGVYYHKNNKSWMESEFRVYSSANNCTFEYVSQPFLMDLEGKQGNFKNLREFVFKNIDGYFKIYSKHTPINLVRDLPQGFWALEPLVDLPIGINITRFQTLLALHRSYLTPGDSSSGWTAGAAAYYVGYLQPRTFLLKYNENGTITDAVDCALDPLSETKCTLKSFTVEKGIYQTSNFRVQPTESIVRFPNITNLCPFGEVFNATRFASVYAWNRKRISNCVADYSVLYNSASFSTFKCYGVSPTKLNDLCFTNVYADSFVIRGDEVRQIAPGQTGKIADYNYKLPDDFTGCVIAWNSNNLDSKVGGNYNYLYRLFRKSNLKPFERDISTEIYQAGSTPCNGVEGFNCYFPLQSYGFQPTNGVGYQPYRVVVLSFELLHAPATVCGPKKSTNLVKNKCVNFNFNGLTGTGVLTESNKKFLPFQQFGRDIADTTDAVRDPQTLEILDITPCSFGGVSVITPGTNTSNQVAVLYQDVNCTEVPVAIHADQLTPTWRVYSTGSNVFQTRAGCLIGAEHVNNSYECDIPIGAGICASYQTQTNSPRRARSVASQSIIAYTMSLGAENSVAYSNNSIAIPTNFTISVTTEILPVSMTKTSVDCTMYICGDSTECSNLLLQYGSFCTQLNRALTGIAVEQDKNTQEVFAQVKQIYKTPPIKDFGGFNFSQILPDPSKPSKRSFIEDLLFNKVTLADAGFIKQYGDCLGDIAARDLICAQKFNGLTVLPPLLTDEMIAQYCSALLAGTITSGWTFGAGAALQIPFAMQMAYRFNGIGVTQNVLYENQKLIANQFNSAIGKIQDSLSSTASALGKLQDVVNQNAQALNTLVKQLSSNFGAISSVLNDILSRLDKVEAEVQIDRLITGRLQSLQTYVTQQLIRAAEIRASANLAATKMSECVLGQSKRVDFCGKGYHLMSFPQCAPHGVVFLHVTYVPAQEKNFTTAPAICHDGKAHFPREGVFVSNGTHWFVTQRNFYEPQIITTDNTFVSGNCDVVIGIVNNTVYDPLQPELDSGGGGSDIIKLLNEQVNKEMQSSNLYMSMSSWCYTHSLDGAGLFLFDHAAEEYEHAKKLIIFLNENNVPVQLTSISAPEHKFEGLTQIFQKAYEHEQHISESINNIVDHAIKSKDHATFNFLQWYVAEQHEEEVLFKDILDKIELIGNENHGLYLADQYVKGIAKSRKS

SEQ ID NO: 9623 - protein, 1315 aa, Artificial Sequence
  SARS-CoV-2/China/WF0004/2020__EPI_ISL_413694 spike protein (1-1147)(T874C_S1055C) Ferritin construct
MFVFLVLLPLVSSQCVNLTTRTQLPPAYTNSFTRGVYYPDKVFRSSVLHSTQDLFLPFFSNVTWFHAIHVSGTNGTKRFDNPVLPFNDGVYFASTEKSNIIRGWIFGTTLDSKTQSLLIVNNATNVVIKVCEFQFCNDPFLGVYYHKNNKSWTESEFRVYSSANNCTFEYVSQPFLMDLEGKQGNFKNLREFVFKNIDGYFKIYSKHTPINLVRDLPQGFSALEPLVDLPIGINITRFQTLLALHRSYLTPGDSSSGWTAGAAAYYVGYLQPRTFLLKYNENGTITDAVDCALDPLSETKCTLKSFTVEKGIYQTSNFRVQPTESIVRFPNITNLCPFGEVFNATRFASVYAWNRKRISNCVADYSVLYNSASFSTFKCYGVSPTKLNDLCFTNVYADSFVIRGDEVRQIAPGQTGKIADYNYKLPDDFTGCVIAWNSNNLDSKVGGNYNYLYRLFRKSNLKPFERDISTEIYQAGSTPCNGVEGFNCYFPLQSYGFQPTNGVGYQPYRVVVLSFELLHAPATVCGPKKSTNLVKNKCVNFNFNGLTGTGVLTESNKKFLPFQQFGRDIADTTDAVRDPQTLEILDITPCSFGGVSVITPGTNTSNQVAVLYQDVNCTEVPVAIHADQLTPTWRVYSTGSNVFQTRAGCLIGAEHVNNSYECDIPIGAGICASYQTQTNSPRRARSVASQSIIAYTMSLGAENSVAYSNNSIAIPTNFTISVTTEILPVSMTKTSVDCTMYICGDSTECSNLLLQYGSFCTQLNRALTGIAVEQDKNTQEVFAQVKQIYKTPPIKDFGGFNFSQILPDPSKPSKRSFIEDLLFNKVTLADAGFIKQYGDCLGDIAARDLICAQKFNGLTVLPPLLTDEMIAQYCSALLAGTITSGWTFGAGAALQIPFAMQMAYRFNGIGVTQNVLYENQKLIANQFNSAIGKIQDSLSSTASALGKLQDVVNQNAQALNTLVKQLSSNFGAISSVLNDILSRLDKVEAEVQIDRLITGRLQSLQTYVTQQLIRAAEIRASANLAATKMSECVLGQSKRFDFCGKGYHLMSFPQCAPHGVVFLHVTYVPAQEKNFTTAPAICHDGKAHFPREGVFVSNGTHWFVTQRNFYEPQIITTDNTFVSGNCDVVIGIVNNTVYDPLQPELDSGGGGSDIIKLLNEQVNKEMQSSNLYMSMSSWCYTHSLDGAGLFLFDHAAEEYEHAKKLIIFLNENNVPVQLTSISAPEHKFEGLTQIFQKAYEHEQHISESINNIVDHAIKSKDHATFNFLQWYVAEQHEEEVLFKDILDKIELIGNENHGLYLADQYVKGIAKSRKS

SEQ ID NO: 9624 - protein, 1315 aa, Artificial Sequence
  SARS-CoV-2/China/WF0028/2020__EPI_ISL_413791 spike protein (1-1147)(T874C_S1055C) Ferritin construct
MFVFLVLLPLVSSQCVNLTTRTQLPPAYTNSFTRGVYYPDKVFRSSVLHSTQDLFLPFFSNVTWFHAIHVSGTNGTKRFDNPVLPFNDGVYFASTEKSNIIRGWIFGTTLDSKTQSLLIVNNATNVVIKVCEFQFCNDPFLGVYYHKNNKSWMESEFRVYSSANNCTFEYVSQPFLMDLEGKQGNFKNLREFVFKNIDGYFKIYSKHTPINLVRDLPQGFSALEPLVDLPIGINITRFQTLLALHRSYLTPGDSSSGWTAGAAAYYVGYLQPRTFLLKYNENGTITDAVDCALDPLSETKCTLKSFTVEKGIYQTSNFRVQPTESIVRFPNITNLCPFGEVFNATRFASVYAWNRKRISNCVADYSVLYNSASFSTFKCYGVSPTKLNDLCFTNVYADSFVIRGDEVRQIAPGQTGKIADYNYKLPDDFTGCVIAWNSNNLDSKVGGNYNYLYRLFRKSNLKPFERDISTEIYQAGSTPCNGVEGFNCYFPLQSYGFQPTNGVGYQPYRVVVLSFELLHAPATVCGPKKSTNLVKNKCVNFNFNGLTGTGVLTESNKKFLPFQQFGRDIADTTDAVRDPQTLEILDITPCSFGGVSVITPGTNTSNQVAVLYQDVNCTEVPVAIHADQLTPTWRVYSTGSNVFQTRAGCLIGAEHVNNSYECDIPIGAGICASYQTQTNSPRRARSVASQSIIAYTMSLGAENSVAYSNNSIAIPTNFTISVTTEILPVSMTKTSVDCTMYICGDSTECSNLLLQYGSFCTQLNRALTGIAVEQDKNTQEVFAQVKQIYKTPPIKDFGGFNFSQILPDPSKPSKRSFIEDLLFNKVTLADAGFIKQYGDCLGDIAARDLICAQKFNGLTVLPPLLTDEMIAQYCSALLAGTITSGWTFGAGAALQIPFAMQMAYRFNGIGVTQNVLYENQKLIANQFNSAIGKIQDSLSSTASALGKLQDVVNQNAQALNTLVKQLSSNFGAISSVLNDILSRLDKVEAEVQIDRLITGRLQSLQTYVTQQLIRAAEIRASANLAATKMSECVLGQSKRVDFCGKGYHLMSFPQCAPHGVVFLHVTYVPAQEKNFTTAPAICHDGKAHFPREGVFVSNGTHWFVTQRNFYEPQIITTDNTFVSGNCDVVIGIVNNTVYDPLQPELESGGGGSDIIKLLNEQVNKEMQSSNLYMSMSSWCYTHSLDGAGLFLFDHAAEEYEHAKKLIIFLNENNVPVQLTSISAPEHKFEGLTQIFQKAYEHEQHISESINNIVDHAIKSKDHATFNFLQWYVAEQHEEEVLFKDILDKIELIGNENHGLYLADQYVKGIAKSRKS

SEQ ID NO: 9625 - protein, 1315 aa, Artificial Sequence
  SARS-CoV-2/2019-nCoV/USA-CruiseA-18/2020__MT159716.1 spike protein (1-1147)(T874C_S1055C) Ferritin construct
MFVFLVLLPLVSSQCVNLTTRTQLPPAYTNSFTRGVYYPDKVFRSSVLHSTQDLFLPFFSNVTWFHAIHVSGTNGTKRFDNPVLPFNDGVYFASTEKSNIIRGWIFGTTLDSKTQSLLIVNNATNVVIKVCEFQFCNDPFLGVYYHKNNKSWMESELRVYSSANNCTFEYVSQPFLMDLEGKQGNFKNLREFVFKNIDGYFKIYSKHTPINLVRDLPQGFSALEPLVDLPIGINITRFQTLLALHRSYLTPGDSSSGWTAGAAAYYVGYLQPRTFLLKYNENGTITDAVDCALDPLSETKCTLKSFTVEKGIYQTSNFRVQPTESIVRFPNITNLCPFGEVFNATRFASVYAWNRKRISNCVADYSVLYNSASFSTFKCYGVSPTKLNDLCFTNVYADSFVIRGDEVRQIAPGQTGKIADYNYKLPDDFTGCVIAWNSNNLDSKVGGNYNYLYRLFRKSNLKPFERDISTEIYQAGSTPCNGVEGFNCYFPLQSYGFQPTNGVGYQPYRVVVLSFELLHAPATVCGPKKSTNLVKNKCVNFNFNGLTGTGVLTESNKKFLPFQQFGRDIADTTDAVRDPQTLEILDITPCSFGGVSVITPGTNTSNQVAVLYQDVNCTEVPVAIHADQLTPTWRVYSTGSNVFQTRAGCLIGAEHVNNSYECDIPIGAGICASYQTQTNSPRRARSVASQSIIAYTMSLGAENSVAYSNNSIAIPTNFTISVTTEILPVSMTKTSVDCTMYICGDSTECSNLLLQYGSFCTQLNRALTGIAVEQDKNTQEVFAQVKQIYKTPPIKDFGGFNFSQILPDPSKPSKRSFIEDLLFNKVTLADAGFIKQYGDCLGDIAARDLICAQKFNGLTVLPPLLTDEMIAQYCSALLAGTITSGWTFGAGAALQIPFAMQMAYRFNGIGVTQNVLYENQKLIANQFNSAIGKIQDSLSSTASALGKLQDVVNQNAQALNTLVKQLSSNFGAISSVLNDILSRLDKVEAEVQIDRLITGRLQSLQTYVTQQLIRAAEIRASANLAATKMSECVLGQSKRVDFCGKGYHLMSFPQCAPHGVVFLHVTYVPAQEKNFTTAPAICHDGKAHFPREGVFVSNGTHWFVTQRNFYEPQIITTDNTFVSGNCDVVIGIVNNTVYDPLQPELDSGGGGSDIIKLLNEQVNKEMQSSNLYMSMSSWCYTHSLDGAGLFLFDHAAEEYEHAKKLIIFLNENNVPVQLTSISAPEHKFEGLTQIFQKAYEHEQHISESINNIVDHAIKSKDHATFNFLQWYVAEQHEEEVLFKDILDKIELIGNENHGLYLADQYVKGIAKSRKS

SEQ ID NO: 9626 - protein, 1315 aa, Artificial Sequence
  SARS-CoV-2/SARS-CoV-2/Yunnan-01/human/2020/CHN__MT049951.1 spike protein (1-1147)(T874C_S1055C) Ferritin construct
MFVFLVLLPLVSSQCVNLTTRTQLPPANTNSFTRGVYYPDKVFRSSVLHSTQDLFLPFFSNVTWFHAIHVSGTNGTKRFDNPVLPFNDGVYFASTEKSNIIRGWIFGTTLDSKTQSLLIVNNATNVVIKVCEFQFCNDPFLGVYYHKNNKSWMESEFRVYSSANNCTFEYVSQPFLMDLEGKQGNFKNLREFVFKNIDGYFKIYSKHTPINLVRDLPQGFSALEPLVDLPIGINITRFQTLLALHRSYLTPGDSSSGWTAGAAAYYVGYLQPRTFLLKYNENGTITDAVDCALDPLSETKCTLKSFTVEKGIYQTSNFRVQPTESIVRFPNITNLCPFGEVFNATRFASVYAWNRKRISNCVADYSVLYNSASFSTFKCYGVSPTKLNDLCFTNVYADSFVIRGDEVRQIAPGQTGKIADYNYKLPDDFTGCVIAWNSNNLDSKVGGNYNYLYRLFRKSNLKPFERDISTEIYQAGSTPCNGVEGFNCYFPLQSYGFQPTNGVGYQPYRVVVLSFELLHAPATVCGPKKSTNLVKNKCVNFNFNGLTGTGVLTESNKKFLPFQQFGRDIADTTDAVRDPQTLEILDITPCSFGGVSVITPGTNTSNQVAVLYQDVNCTEVPVAIHADQLTPTWRVYSTGSNVFQTRAGCLIGAEHVNNSYECDIPIGAGICASYQTQTNSPRRARSVASQSIIAYTMSLGAENSVAYSNNSIAIPTNFTISVTTEILPVSMTKTSVDCTMYICGDSTECSNLLLQYGSFCTQLNRALTGIAVEQDKNTQEVFAQVKQIYKTPPIKDFGGFNFSQILPDPSKPSKRSFIEDLLFNKVTLADAGFIKQYGDCLGDIAARDLICAQKFNGLTVLPPLLTDEMIAQYCSALLAGTITSGWTFGAGAALQIPFAMQMAYRFNGIGVTQNVLYENQKLIANQFNSAIGKIQDSLSSTASALGKLQDVVNQNAQALNTLVKQLSSNFGAISSVLNDILSRLDKVEAEVQIDRLITGRLQSLQTYVTQQLIRAAEIRASANLAATKMSECVLGQSKRVDFCGKGYHLMSFPQCAPHGVVFLHVTYVPAQEKNFTTAPAICHDGKAHFPREGVFVSNGTHWFVTQRNFYEPQIITTDNTFVSGNCDVVIGIVNNTVYDPLQPELDSGGGGSDIIKLLNEQVNKEMQSSNLYMSMSSWCYTHSLDGAGLFLFDHAAEEYEHAKKLIIFLNENNVPVQLTSISAPEHKFEGLTQIFQKAYEHEQHISESINNIVDHAIKSKDHATFNFLQWYVAEQHEEEVLFKDILDKIELIGNENHGLYLADQYVKGIAKSRKS

SEQ ID NO: 9627 - protein, 1315 aa, Artificial Sequence
  SARS-CoV-2/USA/WA-UW292/2020__EPI_ISL_418077 spike protein (1-1147)(T874C_S1055C) Ferritin construct
MFVFLVLLPLVSSQCVNLTTRTQLPPAYTNSFTRGVYYPDKVFRSSVLHSTQDLFLPFFSNVTWFHAIHVSGTNGTKRFDNPVLPFNDGVYFASTEKSNIIRGWIFGTTLDSKTQSLLIVNNATNVVIKVCEFQFCNDPFLGVYYHKNNKSWMESEFRVYSSANNCTFEYVSQPFLMDLEGKQGNFKNLREFVFKNIDGYFKIYSKHTPINLVRDLPQGFSALEPLVDLPIGINITRFQTLLALHRSYLTPGDSSSGWTAGAAAYYVGYLQPRTFLLKYNENGTITDAVDCALDPLSETKCTLKSFTVEKGIYQTSNFRVQPTESIVRFPNITNLCPFGEVFNATRFASVYAWNRKRISNCVADYSVLYNSASFSTFKCYGVSPTKLNDLCFTNVYADSFVIRGDEVRQIAPGQTGKIADYNYKLPDDFTGCVIAWNSNNLDSKVGGNYNYLYRLFRKSNLKPFERDISTEIYQASSTPCNGVEGFNCYFPLQSYGFQPTNGVGYQPYRVVVLSFELLHAPATVCGPKKSTNLVKNKCVNFNFNGLTGTGVLTESNKKFLPFQQFGRDIADTTDAVRDPQTLEILDITPCSFGGVSVITPGTNTSNQVAVLYQDVNCTEVPVAIHADQLTPTWRVYSTGSNVFQTRAGCLIGAEHVNNSYECDIPIGAGICASYQTQTNSPRRARSVASQSIIAYTMSLGAENSVAYSNNSIAIPTNFTISVTTEILPVSMTKTSVDCTMYICGDSTECSNLLLQYGSFCTQLNRALTGIAVEQDKNTQEVFAQVKQIYKTPPIKDFGGFNFSQILPDPSKPSKRSFIEDLLFNKVTLADAGFIKQYGDCLGDIAARDLICAQKFNGLTVLPPLLTDEMIAQYCSALLAGTITSGWTFGAGAALQIPFAMQMAYRFNGIGVTQNVLYENQKLIANQFNSAIGKIQDSLSSTASALGKLQDVVNQNAQALNTLVKQLSSNFGAISSVLNDILSRLDKVEAEVQIDRLITGRLQSLQTYVTQQLIRAAEIRASANLAATKMSECVLGQSKRVDFCGKGYHLMSFPQCAPHGVVFLHVTYVPAQEKNFTTAPAICHDGKAHFPREGVFVSNGTHWFVTQRNFYEPQIITTDNTFVSGNCDVVIGIVNNTVYDPLQPELDSGGGGSDIIKLLNEQVNKEMQSSNLYMSMSSWCYTHSLDGAGLFLFDHAAEEYEHAKKLIIFLNENNVPVQLTSISAPEHKFEGLTQIFQKAYEHEQHISESINNIVDHAIKSKDHATFNFLQWYVAEQHEEEVLFKDILDKIELIGNENHGLYLADQYVKGIAKSRKS

SEQ ID NO: 9628 - protein, 1315 aa, Artificial Sequence
  SARS-CoV-2/Iceland/192/2020__EPI_ISL_417819 spike protein (1-1147)(T874C_S1055C) Ferritin construct
MFVFFVLLPLVSSQCVNLTTRTQLPPAYTNSFTRGVYYPDKVFRSSVLHSTQDLFLPFFSNVTWFHAIHVSGTNGTKRFDNPVLPFNDGVYFASTEKSNIIRGWIFGTTLDSKTQSLLIVNNATNVVIKVCEFQFCNDPFLGVYYHKNNKSWMESEFRVYSSANNCTFEYVSQPFLMDLEGKQGNFKNLREFVFKNIDGYFKIYSKHTPINLVRDLPQGFSALEPLVDLPIGINITRFQTLLALHRSYLTPGDSSSGWTAGAAAYYVGYLQPRTFLLKYNENGTITDAVDCALDPLSETKCTLKSFTVEKGIYQTSNFRVQPTESIVRFPNITNLCPFGEVFNATRFASVYAWNRKRISNCVADYSVLYNSASFSTFKCYGVSPTKLNDLCFTNVYADSFVIRGDEVRQIAPGQTGKIADYNYKLPDDFTGCVIAWNSNNLDSKVGGNYNYLYRLFRKSNLKPFERDISTEIYQAGSTPCNGVEGFNCYFPLQSYGFQPTNGVGYQPYRVVVLSFELLHAPATVCGPKKSTNLVKNKCVNFNFNGLTGTGVLTESNKKFLPFQQFGRDIADTTDAVRDPQTLEILDITPCSFGGVSVITPGTNTSNQVAVLYQGVNCTEVPVAIHADQLTPTWRVYSTGSNVFQTRAGCLIGAEHVNNSYECDIPIGAGICASYQTQTNSPRRARSVASQSIIAYTMSLGAENSVAYSNNSIAIPTNFTISVTTEILPVSMTKTSVDCTMYICGDSTECSNLLLQYGSFCTQLNRALTGIAVEQDKNTQEVFAQVKQIYKTPPIKDFGGFNFSQILPDPSKPSKRSFIEDLLFNKVTLADAGFIKQYGDCLGDIAARDLICAQKFNGLTVLPPLLTDEMIAQYCSALLAGTITSGWTFGAGAALQIPFAMQMAYRFNGIGVTQNVLYENQKLIANQFNSAIGKIQDSLSSTASALGKLQDVVNQNAQALNTLVKQLSSNFGAISSVLNDILSRLDKVEAEVQIDRLITGRLQSLQTYVTQQLIRAAEIRASANLAATKMSECVLGQSKRVDFCGKGYHLMSFPQCAPHGVVFLHVTYVPAQEKNFTTAPAICHDGKAHFPREGVFVSNGTHWFVTQRNFYEPQIITTDNTFVSGNCDVVIGIVNNTVYDPLQPELDSGGGGSDIIKLLNEQVNKEMQSSNLYMSMSSWCYTHSLDGAGLFLFDHAAEEYEHAKKLIIFLNENNVPVQLTSISAPEHKFEGLTQIFQKAYEHEQHISESINNIVDHAIKSKDHATFNFLQWYVAEQHEEEVLFKDILDKIELIGNENHGLYLADQYVKGIAKSRKS

SEQ ID NO: 9629 - protein, 1315 aa, Artificial Sequence
  SARS-CoV-2/Belgium/ULG-6939/2020__EPI_ISL_417020 spike protein (1-1147)(T874C_S1055C) Ferritin construct
MFVFLVLLPLVSSQCVNLTTRTQLPPAYTNSFTRGVYYPDKVFRSSVLHSTQDLFLPFFSNVTWFHAIHVSGTNGTKRFDNPVLPFNDGVYFASTEKSNIIRGWIFGTTLDSKTQSLLIVNNATNVVIKVCEFQFCNDPFLGVYYHKNNKSWMESEFRVYSSANNCTFEYVSQPFLMDLEGKQGNFKNLREFVFKNIDGYFKIYSKHTPINLVRDLPQGFSALEPLVDLPIGINITRFQTLLALHRSYLTPGDSSSGWTAGAAAYYVGYLQPRTFLLKYNENGTITDAVDCALDPLSETKCTLKSFTVEKGIYQTSNFRVQPTESIVRFPNITNLCPFGEVFNATRFASVYAWNRKRISNCVADYSVLYNSASFSTFKCYGVSPTKLNDLCFTNVYADSFVIRGDEVRQIAPGQTGKIADYNYKLPDDFTGCVIAWNSNNLDSKVGGNYNYLYRLFRKSNLKPFERDISTEIYQAGSTPCNGVEGFNCYFPLQSYGFQPTNGVGYQPYRVVVLSFELLHAPATVCGPKKSTNLVKNKCVNFNFNGLTGTGVLTESNKKFLPFQQFGRDIADTTDAVRDPQTLEILDITPCSFGGVSVITPGTNTSNQVAVLYQGVNCTEVPVAIHADQLTPTWRVYSTGSNVFQTRAGCLIGAEHVNNSYECDIPIGAGICASYQTQTNSPRRARSVASQSIIAYTMSLGAENSVVYSNNSIAIPTNFTISVTTEILPVSMTKTSVDCTMYICGDSTECSNLLLQYGSFCTQLNRALTGIAVEQDKNTQEVFAQVKQIYKTPPIKDFGGFNFSQILPDPSKPSKRSFIEDLLFNKVTLADAGFIKQYGDCLGDIAARDLICAQKFNGLTVLPPLLTDEMIAQYCSALLAGTITSGWTFGAGAALQIPFAMQMAYRFNGIGVTQNVLYENQKLIANQFNSAIGKIQDSLSSTASALGKLQDVVNQNAQALNTLVKQLSSNFGAISSVLNDILSRLDKVEAEVQIDRLITGRLQSLQTYVTQQLIRAAEIRASANLAATKMSECVLGQSKRVDFCGKGYHLMSFPQCAPHGVVFLHVTYVPAQEKNFTTAPAICHDGKAHFPREGVFVSNGTHWFVTQRNFYEPQIITTDNTFVSGNCDVVIGIVNNTVYDPLQPELDSGGGGSDIIKLLNEQVNKEMQSSNLYMSMSSWCYTHSLDGAGLFLFDHAAEEYEHAKKLIIFLNENNVPVQLTSISAPEHKFEGLTQIFQKAYEHEQHISESINNIVDHAIKSKDHATFNFLQWYVAEQHEEEVLFKDILDKIELIGNENHGLYLADQYVKGIAKSRKS

SEQ ID NO: 9630 - protein, 1315 aa, Artificial Sequence
  SARS-CoV-2/France/HF2496/2020__EPI_ISL_418231 spike protein (1-1147)(T874C_S1055C) Ferritin construct
MFVFLVLLPLVSSQCVNLTTRTQLPPAYTNSFTRGVYYPDKVFRSSVLHSTQDLFLPFFSNVTWFHAIHVSGTNGTKRFDNPVLPFNDGVYFASTEKSNIIRGWIFGTTLDSKTQSLLIVNNATNVVIKVCEFQFCNDPFLGVYYHKNNKSWMESEFRVYSSANNCTFEYVSQPFLMDLEGKQGNFKNLREFVFKNIDGYFKIYSKHTPINLVRDLPQGFSALEPLVDLPIGINITRFQTLLALHRSYLTPGDSSSGWTAGAAAYYVGYLQPRTFLLKYNENGTITDAVDCALDPLSETKCTLKSFTVEKGIYQTSNFRVQPTESIVRFPNITNLCPFGEVFNATRFASVYAWNRKRISNCVADYSVLYNSASFSTFKCYGVSPTKLNDLCFTNVYADSFVIRGDEVRQIAPGQTGKIADYNYKLPDDFTGCVIAWNSNNLDSKVGGNYNYLYRLFRKSNLKPFERDISTEIYQAGSTPCNGVEGFNCYFPLQSYGFQPTNGVGYQPYRVVVLSFELLHAPATVCGPKKSTNLVKNKCVNFNFNGLTGTGVLTESNKKFLPFQQFGRDIADTTDAVRDPQTLEILDITPCSFGGVSVITPGTNTSNQVAVLYQGVNCTEVPVAIHADQLTPTWRVYSTGSNVFQTRAGCLIGAEHVNNSYECDIPIGAGICASYQTQTNSPRRARSVASQSIIAYTMSLGAENSVAYSNNSIAIPTNFTISVTTEILPVSMTKTSVDCTMYICGDSTECSNLLLQYGSFCTQLNRALTGIAVEQDKNTQEVFAQVKQIYKTPPIKDFGGFNFSQILPDPSKPSKRSFIEDLLFNKVTLADAGFIKQYGDCLGDIVARDLICAQKFNGLTVLPPLLTDEMIAQYCSALLAGTITSGWTFGAGAALQIPFAMQMAYRFNGIGVTQNVLYENQKLIANQFNSAIGKIQDSLSSTASALGKLQDVVNQNAQALNTLVKQLSSNFGAISSVLNDILSRLDKVEAEVQIDRLITGRLQSLQTYVTQQLIRAAEIRASANLAATKMSECVLGQSKRVDFCGKGYHLMSFPQCAPHGVVFLHVTYVPAQEKNFTTAPAICHDGKAHFPREGVFVSNGTHWFVTQRNFYEPQIITTDNTFVSGNCDVVIGIVNNTVYDPLQPELDSGGGGSDIIKLLNEQVNKEMQSSNLYMSMSSWCYTHSLDGAGLFLFDHAAEEYEHAKKLIIFLNENNVPVQLTSISAPEHKFEGLTQIFQKAYEHEQHISESINNIVDHAIKSKDHATFNFLQWYVAEQHEEEVLFKDILDKIELIGNENHGLYLADQYVKGIAKSRKS

SEQ ID NO: 9631 - protein, 1315 aa, Artificial Sequence
  SARS-CoV-2/USA/WA-UW291/2020__EPI_ISL_418076 spike protein (1-1147)(T874C_S1055C) Ferritin construct
MFVFLVLLPLVSSQCVNLTTRTQLPPAYTNSFTRGVYYPDKVFRSSVLHSTQDLFLPFFSNVTWFHAIHVSGTNGTKRFDNPVLPFNDGVYFASTEKSNIIRGWIFGTTLDSKTQSLLIVNNATNVVIKVCEFQFCNDPFLGVYYHKNNKSWMESEFRVYSSANNCTFEYVSQPFLMDLEGKQGNFKNLREFVFKNIDGYFKIYSKHTPINLVRDLPQGFSALEPLVDLPIGINITRFQTLLALHRSYLTPGDSSSGWTAGAAAYYVGYLQPRTFLLKYNENGTITDAVDCALDPLSETKCTLKSFTVEKGIYQTSNFRVQPTESIVRFPNITNLCPFGEVFNATRFASVYAWNRKRISNCVADYSVLYNSASFSTFKCYGVSPTKLNDLCFTNVYADSFVIRGDEVRQIAPGQTGKIADYNYKLPDDFTGCVIAWNSNNLDSKVGGNYNYLYRLFRKSNLKPFERDISTEIYQAGSTPCNGVEGFNCYFPLQSYGFQPTNGVGYQPYRVVVLSFELLHAPATVCGPKKSTNLVKNKCVNFNFNGLTGTGVLTESNKKFLPFQQFGRDIADTTDAVRDPQTLEILDITPCSFGGVSVITPGTNTSNQVAVLYQGVNCTEVPVAIHADQLTPTWRVYSTGSNVFQTRAGCLIGAEHVNNSYECDIPIGAGICASYQTQTNSPRRARSVASQSIIAYTMSLGAENSVAYSNNSIAIPTNFTISVTTEILPVSMTKTSVDCTMYICGDSTECSNLLLQYGSFCTQLNRALTGIAVEQDKNTQEVFAQVKQIYKTPPIKDFGGFNFSQILPDPSKPSKRSFIEDLLFNKVTLADAGFIKQYGDCLGDIAARDLICAQKFNGLTVLPPLLTDEMIAQYCSALLAGTITSGWTFGAGAALQIPFAMQMAYRFNGIGVTQNVLYENQKLIANQFNSAIGKIQYSLSSTASALGKLQDVVNQNAQALNTLVKQLSSNFGAISSVLNDILSRLDKVEAEVQIDRLITGRLQSLQTYVTQQLIRAAEIRASANLAATKMSECVLGQSKRVDFCGKGYHLMSFPQCAPHGVVFLHVTYVPAQEKNFTTAPAICHDGKAHFPREGVFVSNGTHWFVTQRNFYEPQIITTDNTFVSGNCDVVIGIVNNTVYDPLQPELDSGGGGSDIIKLLNEQVNKEMQSSNLYMSMSSWCYTHSLDGAGLFLFDHAAEEYEHAKKLIIFLNENNVPVQLTSISAPEHKFEGLTQIFQKAYEHEQHISESINNIVDHAIKSKDHATFNFLQWYVAEQHEEEVLFKDILDKIELIGNENHGLYLADQYVKGIAKSRKS

SEQ ID NO: 9632 - protein, 1315 aa, Artificial Sequence; identical to SEQ ID NO: 9595
  SARS-CoV-2/Portugal/PT0034/2020__EPI_ISL_418019 spike protein (1-1147)(T874C_S1055C) Ferritin construct

SEQ ID NO: 9633 - protein, 1315 aa, Artificial Sequence; identical to SEQ ID NO: 9587
  SARS-CoV-2/Iceland/202/2020__EPI_ISL_417750 spike protein (1-1147)(T874C_S1055C) Ferritin construct

SEQ ID NO: 9634 - protein, 1315 aa, Artificial Sequence
  SARS-CoV-2/USA/WA-UW261/2020__EPI_ISL_418046 spike protein (1-1147)(T874C_S1055C) Ferritin construct
MFVFLVLLPLVSSQCVNLTTRTQLPPAYTNSFTRGVYYPDKVFRSSVLHSTQDLFLPFFSNVTWFHAIHVSGTNGTKRFDNPVLPFNDGVYFASTEKSNIIRGWIFGTTLDSKTQSLLIVNNATNVVIKVCEFQFCNDPFLGVYYHKNNKSWMESEFRVYSSANNCTFEYVSQPFLMDLEGKQGNFKNLREFVFKNIDGYFKIYSKHTPINLVRDLPQGFSALEPLVDLPIGINITRFQTLLALHRSYLTPGDSSSGWTAGAAAYYVGYLQPRTFLLKYNENGTITDAVDCALDPLSETKCTLKSFTVEKGIYQTSNFRVQPTESIVRFPNITNLCPFGEVFNATRFTSVYAWNRKRISNCVADYSVLYNSASFSTFKCYGVSPTKLNDLCFTNVYADSFVIRGDEVRQIAPGQTGKIADYNYKLPDDFTGCVIAWNSNNLDSKVGGNYNYLYRLFRKSNLKPFERDISTEIYQAGSTPCNGVEGFNCYFPLQSYGFQPTNGVGYQPYRVVVLSFELLHAPATVCGPKKSTNLVKNKCVNFNFNGLTGTGVLTESNKKFLPFQQFGRDIADTTDAVRDPQTLEILDITPCSFGGVSVITPGTNTSNQVAVLYQDVNCTEVPVAIHADQLTPTWRVYSTGSNVFQTRAGCLIGAEHVNNSYECDIPIGAGICASYQTQTNSPRRARSVASQSIIAYTMSLGAENSVAYSNNSIAIPTNFTISVTTEILPVSMTKTSVDCTMYICGDSTECSNLLLQYGSFCTQLNRALTGIAVEQDKNTQEVFAQVKQIYKTPPIKDFGGFNFSQILPDPSKPSKRSFIEDLLFNKVTLADAGFIKQYGDCLGDIAARDLICAQKFNGLTVLPPLLTDEMIAQYCSALLAGTITSGWTFGAGAALQIPFAMQMAYRFNGIGVTQNVLYENQKLIANQFNSAIGKIQDSLSSTASALGKLQDVVNQNAQALNTLVKQLSSNFGAISSVLNDILSRLDKVEAEVQIDRLITGRLQSLQTYVTQQLIRAAEIRASANLAATKMSECVLGQSKRVDFCGKGYHLMSFPQCAPHGVVFLHVTYVPAQEKNFTTAPAICHDGKAHFPREGVFVSNGTHWFVTQRNFYEPQIITTDNTFVSGNCDVVIGIVNNTVYDPLQPELDSGGGGSDIIKLLNEQVNKEMQSSNLYMSMSSWCYTHSLDGAGLFLFDHAAEEYEHAKKLIIFLNENNVPVQLTSISAPEHKFEGLTQIFQKAYEHEQHISESINNIVDHAIKSKDHATFNFLQWYVAEQHEEEVLFKDILDKIELIGNENHGLYLADQYVKGIAKSRKS

SEQ ID NO: 9635 - protein, 1315 aa, Artificial Sequence
  SARS-CoV-2/Portugal/PT0035/2020__EPI_ISL_418020 spike protein (1-1147)(T874C_S1055C) Ferritin construct
MFVFLVLLPLVSSQCVNLTTRTQLPPAYTNSFTRGVYYPDKVFRSSVLHSTQDLFLPFFSNVTWFHAIHVSGTNGTKRFDNPVLPFNDGVYFASTEKSNIIRGWIFGTTLDSKTQSLLIVNNATNVVIKVCEFQFCNDPFLGVYYHKNNKSWMESEFRVYSSANNCTFEYVSQPFLMDLEGKQGNFKNLREFVFKNIDGYFKIYSKHTPINLVRDLPQGFSALEPLVDLPIGINITRFQTLLALHRSYLTPGDSSSGWTAGAAAYYVGYLQPRTFLLKYNENGTITDAVDCALDPLSETKCTLKSFTVEKGIYQTSNFRVQPTESIVRFPNITNLCPFGEVFNATRFASVYAWNRKRISNCVADYSVLYNSASFSTFKCYGVSPTKLNDLCFTNVYADSFVIRGDEVRQIAPGQTGKIADYNYKLPDDFTGCVIAWNSNNLDSKVGGNYNYLYRLFRKSNLKPFERDISTEIYQAGSTPCNGVEGFNCYFPLQSYGFQPTNGVGYQPYRVVVLSFELLHAPATVCGPKKSTNLVKNKCVNFNFNGLTGTGVLTESNKKFLPFQQFGRDIADTTDAVRDPQTLEILDITPCSFGGVSVITPGTNTSNQVAVLYQDVNCTEVPVAIHADQLTPTWRVYSTGSNVFQTRAGCLIGAEHVNNSYECDIPIGAGICASYQTQTNSPRRARSVASQSIIAYTMSLGAENSVAYSNNSIAIPTNFTISVTTEILPVSMTKTSVDCTMYICGDSTECSNLLLQYGSFCTQLNRALTGIAVEQDKNTQEVFAQVKQIYKTPPIKDFGGFNFSQILPDPSKPSKRSFIEDLLFNKVTLADAGFIKQYGDCLGDISARDLICAQKFNGLTVLPPLLTDEMIAQYCSALLAGTITSGWTFGAGAALQIPFAMQMAYRFNGIGVTQNVLYENQKLIANQFNSAIGKIQDSLSSTASALGKLQDVVNQNAQALNTLVKQLSSNFGAISSVLNDILSRLDKVEAEVQIDRLITGRLQSLQTYVTQQLIRAAEIRASANLAATKMSECVLGQSKRVDFCGKGYHLMSFPQCAPHGVVFLHVTYVPAQEKNFTTAPAICHDGKAHFPREGVFVSNGTHWFVTQRNFYEPQIITTDNTFVSGNCDVVIGIVNNTVYDPLQPELDSGGGGSDIIKLLNEQVNKEMQSSNLYMSMSSWCYTHSLDGAGLFLFDHAAEEYEHAKKLIIFLNENNVPVQLTSISAPEHKFEGLTQIFQKAYEHEQHISESINNIVDHAIKSKDHATFNFLQWYVAEQHEEEVLFKDILDKIELIGNENHGLYLADQYVKGIAKSRKS

SEQ ID NO: 9636 - protein, 1315 aa, Artificial Sequence
  SARS-CoV-2/USA/NY-NYUMC7/2020__EPI_ISL_418192 spike protein (1-1147)(T874C_S1055C) Ferritin construct
MFVFLVLLPLVSSQCVNLTTRTQLPPAYTNSFTRGVYYPDKVFRSSVLHSTQDLFLPFFSNVTWFHAIHVSGTNGTKRFDNPVLPFNDGVYFASTEKSNIIRGWIFGTTLDSKTQSLLIVNNATNVVIKVCEFQFCNDPFLGVYHHKNNKSWMESEFRVYSSANNCTFEYVSQPFLMDLEGKQGNFKNLREFVFKNIDGYFKIYSKHTPINLVRDLPQGFSALEPLVDLPIGINITRFQTLLALHRSYLTPGDSSSGWTAGAAAYYVGYLQPRTFLLKYNENGTITDAVDCALDPLSETKCTLKSFTVEKGIYQTSNFRVQPTESIVRFPNITNLCPFGEVFNATRFASVYAWNRKRISNCVADYSVLYNSASFSTFKCYGVSPTKLNDLCFTNVYADSFVIRGDEVRQIAPGQTGKIADYNYKLPDDFTGCVIAWNSNNLDSKVGGNYNYLYRLFRKSNLKPFERDISTEIYQAGSTPCNGVEGFNCYFPLQSYGFQPTNGVGYQPYRVVVLSFELLHAPATVCGPKKSTNLVKNKCVNFNFNGLTGTGVLTESNKKFLPFQQFGRDIADTTDAVRDPQTLEILDITPCSFGGVSVITPGTNTSNQVAVLYQGVNCTEVPVAIHADQLTPTWRVYSTGSNVFQTRAGCLIGAEHVNNSYECDIPIGAGICASYQTQTNSPRRARSVASQSIIAYTMSLGAENSVAYSNNSIAIPTNFTISVTTEILPVSMTKTSVDCTMYICGDSTECSNLLLQYGSFCTQLNRALTGIAVEQDKNTQEVFAQVKQIYKTPPIKDFGGFNFSQILPDPSKPSKRSFIEDLLFNKVTLADAGFIKQYGDCLGDIAARDLICAQKFNGLTVLPPLLTDEMIAQYCSALLAGTITSGWTFGAGAALQIPFAMQMAYRFNGIGVTQNVLYENQKLIANQFNSAIGKIQDSLSSTASALGKLQDVVNQNAQALNTLVKQLSSNFGAISSVLNDILSRLDKVEAEVQIDRLITGRLQSLQTYVTQQLIRAAEIRASANLAATKMSECVLGQSKRVDFCGKGYHLMSFPQCAPHGVVFLHVTYVPAQEKNFTTAPAICHDGKAHFPREGVFVSNGTHWFVTQRNFYEPQIITTDNTFVSGNCDVVIGIVNNTVYDPLQPELDSGGGGSDIIKLLNEQVNKEMQSSNLYMSMSSWCYTHSLDGAGLFLFDHAAEEYEHAKKLIIFLNENNVPVQLTSISAPEHKFEGLTQIFQKAYEHEQHISESINNIVDHAIKSKDHATFNFLQWYVAEQHEEEVLFKDILDKIELIGNENHGLYLADQYVKGIAKSRKS

SEQ ID NO: 9637 - protein, 1315 aa, Artificial Sequence
  SARS-CoV-2/Iceland/189/2020__EPI_ISL_417709 spike protein (1-1147)(T874C_S1055C) Ferritin construct
MFVFLVLLPLVSSQCVNLTTRTQLPPAYTNSFTRGVYYPDKVFRSSVLHSTQDLFLPFFSNVTWFHAIHVSGTNGTKRFDNPVLPFNDGVYFASTEKSNIIRGWIFGTTLDSKTQSLLIVNNATNVVIKVCEFQFCNDPFLGVYYHKNNKSWMESEFRVYSSANNCTFEYVSQPFLMDLEGKQGNFKNLREFVFKNIDGYFKIYSKHTPINLVRDLPQGFSALEPLVDLPIGINITRFQTLLALHRSYLTPGDSSSGWTAGAAAYYVGYLQPRTFLLKYNENGTITDAVDCALDPLSETKCTLKSFTVEKGIYQTSNFRVQPTESIVRFPNITNLCPFGEVFNATRFASVYAWNRKRISNCVADYSVLYNSASFSTFKCYGVSPTKLNDLCFTNVYADSFVIRGDEVRQIAPGQTGKIADYNYKLPDDFTGCVIAWNSNNLDSKVGGNYNYLYRLFRKSNLKPFERDISTEIYQAGSTPCNGVEGFNCYFPLQSYGFQPTNGVGYQPYRVVVLSFELLHAPATVCGPKKSTNLVKNKCVNFNFNGLTGTGVLTESNKKFLPFQQFGRDIADTTDAVRDPQTLEILDITPCSFGGVSVITPGTNTSNQVAVLYQGVNCTEVPVAIHADQLTPTWRVYSTGSNVFQTRAGCLIGAEHVNNSYECDIPIGAGICASYQTQTNSPRRARSVASQSIIAYTMSLGAENSVAYSNNSIAIPTNFTISVTTEILPVSMTKTSVDCTMYICGDSTECSNLLLQYGSFCTQLNRALTGIAVEQDKNTQEVFAQVKQIYKTPPIKDFGGFNFSQILPDPSKPSKRSFIEDLLFNKVTLADAGFTKQYGDCLGDIAARDLICAQKFNGLTVLPPLLTDEMIAQYCSALLAGTITSGWTFGAGAALQIPFAMQMAYRFNGIGVTQNVLYENQKLIANQFNSAIGKIQDSLSSTASALGKLQDVVNQNAQALNTLVKQLSSNFGAISSVLNDILSRLDKVEAEVQIDRLITGRLQSLQTYVTQQLIRAAEIRASANLAATKMSECVLGQSKRVDFCGKGYHLMSFPQCAPHGVVFLHVTYVPAQEKNFTTAPAICHDGKAHFPREGVFVSNGTHWFVTQRNFYEPQIITTDNTFVSGNCDVVIGIVNNTVYDPLQPELDSGGGGSDIIKLLNEQVNKEMQSSNLYMSMSSWCYTHSLDGAGLFLFDHAAEEYEHAKKLIIFLNENNVPVQLTSISAPEHKFEGLTQIFQKAYEHEQHISESINNIVDHAIKSKDHATFNFLQWYVAEQHEEEVLFKDILDKIELIGNENHGLYLADQYVKGIAKSRKS

SEQ ID NO: 9638 - protein, 1315 aa, Artificial Sequence
  SARS-CoV-2/Australia/NSW56/2020__EPI_ISL_417408 spike protein (1-1147)(T874C_S1055C) Ferritin construct
MFVFLVLLPLVSSQCVNLTTRTQLPPAYTNSFTRGVYYPDKVFRSSVLHSTQDLFLPFFSNVTWFHAIHVSGTNGTKRFDNPVLPFNDGVYFASTEKSNIIRGWIFGTTLDSKTQSLLIVNNATNVVIKVCEFQFCNDPFLGVYYHKNNKSWMESEFRVYSSANNCTFEYVSQPFLMDLEGKQGNFKNLREFVFKNIDGYFKIYSKHTPINLVRDLPQGFSALEPLVDLPIGINITRFQTLLALHRSYLTPGDSSSGWTAGAAAYYVGYLQPRTFLLKYNENGTITDAVDCALDPLSETKCTLKSFTVEKGIYQTSNFRVQPTESIVRFPNITNLCPFGEVFNATRFASVYAWNRKRISNCVADYSVLYNSASFSTFKCYGVSPTKLNDLCFTNVYADSFVIRGDEVRQIAPGQTGKIADYNYKLPDDFTGCVIAWNSNNLDSKVGGNYNYLYRLFRKSNLKPFERDISTEIYQAGSTPCNGVEGFNCYFPLQSYGFQPTNGVGYQPYRVVVLSFELLHAPATVCGPKKSTNLVKNKCVNFNFNGLTGTGVLTESNKKFLPFQQFGRDIADTTDAVRDPQTLEILDITPCSFGGVSVITPGTNTSNQVAVLYQDVNCTEVPVAIHADQLTPTWRVYSTGSNVFQTRAGCLIGAEHVNNSYECDIPIGAGICASYQTQTNSPRRARSVASQSIIAYTMSLGAENSVAYSNNSIAIPTNFTISVTTEILPVSMTKTSVDCTMYICGDSTECSNLLLQYGSFCTQLNRALTGIAVEQDKNTQEVFAQVKQIYKTPPIKDFGGFNFSQILPDSSKPSKRSFIEDLLFNKVTLADAGFIKQYGDCLGDIAARDLICAQKFNGLTVLPPLLTDEMIAQYCSALLAGTITSGWTFGAGAALQIPFAMQMAYRFNGIGVTQNVLYENQKLIANQFNSAIGKIQDSLSSTASALGKLQDVVNQNAQALNTLVKQLSSNFGAISSVLNDILSRLDKVEAEVQIDRLITGRLQSLQTYVTQQLIRAAEIRASANLAATKMSECVLGQSKRVDFCGKGYHLMSFPQCAPHGVVFLHVTYVPAQEKNFTTAPAICHDGKAHFPREGVFVSNGTHWFVTQRNFYEPQIITTDNTFVSGNCDVVIGIVNNTVYDPLQPELDSGGGGSDIIKLLNEQVNKEMQSSNLYMSMSSWCYTHSLDGAGLFLFDHAAEEYEHAKKLIIFLNENNVPVQLTSISAPEHKFEGLTQIFQKAYEHEQHISESINNIVDHAIKSKDHATFNFLQWYVAEQHEEEVLFKDILDKIELIGNENHGLYLADQYVKGIAKSRKS

SEQ ID NO: 9639 - protein, 1315 aa, Artificial Sequence
  SARS-CoV-2/Iceland/280/2020__EPI_ISL_417608 spike protein (1-1147)(T874C_S1055C) Ferritin construct
MFVFLVLLPLVSSQCVNLTTRTQLPPAYTNSFTRGVYYPDKVFRSSVLHSTQDLFLPFFSNVTWFHAIHVSGTNGTKRFDNPVLPFNDGVYFASTEKSNIIRGWIFGTTLDSKTQSLLIVNNATNVVIKVCEFQFCNDPFLGVYYHKNNKSWMESEFRVYSSANNCTFEYVSQPFLMDLEGKQGNFKNLREFVFKNIDGYFKIYSKHTPINLVRDLPQGFSALEPLVDLPIGINITRFQTLLALHRSYLTPGDSSSGWTAGAAAYYVGYLQPRTFLLKYNENGTITDAVDCALDPLSETKCTLKSFTVEKGIYQTSNFRVQPTESIVRFPNITNLCPFGEVFNATRFASVYAWNRKRISNCVADYSVLYNSASFSTFKCYGVSPTKLNDLCFTNVYADSFVIRGDEVRQIAPGQTGKIADYNYKLPDDFTGCVIAWNSNNLDSKVGGNYNYLYRLFRKSNLKPFERDISTEIYQAGSTPCNGVEGFNCYFPLQSYGFQPTNGVGYQPYRVVVLSFELLHAPATVCGPKKSTNLVKNKCVNFNFNGLTGTGVLTESNKKFLPFQQFGRDIADTTDAVRDPQTLEILDITPCSFGGVSVITPGTNTSNQVAVLYQGVNCTEVPVAIHADQLTPTWRVYSTGSNVFQTRAGCLIGAEHVNNSYECDIPIGAGICASYHTQTNSPRRARSVASQSIIAYTMSLGAENSVAYSNNSIAIPTNFTISVTTEILPVSMTKTSVDCTMYICGDSTECSNLLLQYGSFCTQLNRALTGIAVEQDKNTQEVFAQVKQIYKTPPIKDFGGFNFSQILPDPSKPSKRSFIEDLLFNKVTLADAGFIKQYGDCLGDIAARDLICAQKFNGLTVLPPLLTDEMIAQYCSALLAGTITSGWTFGAGAALQIPFAMQMAYRFNGIGVTQNVLYENQKLIANQFNSAIGKIQDSLSSTASALGKLQDVVNQNAQALNTLVKQLSSNFGAISSVLNDILSRLDKVEAEVQIDRLITGRLQSLQTYVTQQLIRAAEIRASANLAATKMSECVLGQSKRVDFCGKGYHLMSFPQCAPHGVVFLHVTYVPAQEKNFTTAPAICHDGKAHFPREGVFVSNGTHWFVTQRNFYEPQIITTDNTFVSGNCDVVIGIVNNTVYDPLQPELDSGGGGSDIIKLLNEQVNKEMQSSNLYMSMSSWCYTHSLDGAGLFLFDHAAEEYEHAKKLIIFLNENNVPVQLTSISAPEHKFEGLTQIFQKAYEHEQHISESINNIVDHAIKSKDHATFNFLQWYVAEQHEEEVLFKDILDKIELIGNENHGLYLADQYVKGIAKSRKS

SEQ ID NO: 9640 - protein, 1315 aa, Artificial Sequence; identical to SEQ ID NO: 9595
  SARS-CoV-2/Iceland/247/2020__EPI_ISL_417575 spike protein (1-1147)(T874C_S1055C) Ferritin construct

SEQ ID NO: 9641 - protein, 1315 aa, Artificial Sequence
  SARS-CoV-2/Iceland/238/2020__EPI_ISL_417566 spike protein (1-1147)(T874C_S1055C) Ferritin construct
MFVFLVLLPLVSSQCVNLTTRTQLPPAYTNSFTRGVYYPDKVFRSSVLHSTQDLFLPFFSNVTWFHAIHVSGTNGTKRFDNPVLPFNDGVYFASTEKSNIIRGWIFGTTLDSKTQSLLIVNNATNVVIKVCEFQFCNDPFLGVYYHKNNKSWMESEFRVYSSANNCTFEYVSQPFLMDLEGKQGNFKNLREFVFKNIDGYFKIYSKHTPINLVRDLPQGFSALEPLVDLPIGINITRFQTLLALHRSYLTPGDSSSGWTAGAAAYYVGYLQPRTFLLKYNENGTITDAVDCALDPLSETKCTLKSFTVEKGIYQTSNFRVQPTESIVRFPNITNLCPFGEVFNATRFASVYAWNRKRISNCVADYSVLYNSASFSTFKCYGVSPTKLNDLCFTNVYADSFVIRGDEVRQIAPGQTGKIADYNYKLPDDFTGCVIAWNSNNLDSKVGGNYNYLYRLFRKSNLKPFERDISTEIYQAGSTPCNGVEGFNCYFPLQSYGFQPTNGVGYQPYRVVVLSFELLHAPATVCGPKKSTNLVKNKCVNFNFNGLTGTGVLTESNKKFLPFQQFGRDIADTTDAVRDPQTLEILDITPCSFGGVSVITPGTNTSNQVAVLYQGVNCTEVPVAIHADQLTPTWRVYSTGSNVFQTRAGCLIGAEHVNNSYECDIPIGAGICASYQTQTNSPRRARSVASQSIIAYTMSLGAENSVAYSNNSIAIPTNFTISVTTEILPVSMTKTSVDCTMYICGDSTECSNLLLQYGSFCTQLNRALTGIAVEQDKNTQEVFAQVKQIYKTPPIKDFGGFNFSQILPDPSKPSKRSFIEDLLFNKVTLADVGFIKQYGDCLGDIAARDLICAQKFNGLTVLPPLLTDEMIAQYCSALLAGTITSGWTFGAGAALQIPFAMQMAYRFNGIGVTQNVLYENQKLIANQFNSAIGKIQDSLSSTASALGKLQDVVNQNAQALNTLVKQLSSNFGAISSVLNDILSRLDKVEAEVQIDRLITGRLQSLQTYVTQQLIRAAEIRASANLAATKMSECVLGQSKRVDFCGKGYHLMSFPQCAPHGVVFLHVTYVPAQEKNFTTAPAICHDGKAHFPREGVFVSNGTHWFVTQRNFYEPQIITTDNTFVSGNCDVVIGIVNNTVYDPLQPELDSGGGGSDIIKLLNEQVNKEMQSSNLYMSMSSWCYTHSLDGAGLFLFDHAAEEYEHAKKLIIFLNENNVPVQLTSISAPEHKFEGLTQIFQKAYEHEQHISESINNIVDHAIKSKDHATFNFLQWYVAEQHEEEVLFKDILDKIELIGNENHGLYLADQYVKGIAKSRKS

SEQ ID NO: 9642 - protein, 1315 aa, Artificial Sequence
  SARS-CoV-2/Greece/16/2020__EPI_ISL_418265 spike protein (1-1147)(T874C_S1055C) Ferritin construct
MFVFLVLLPLVSSQCVNLTTRTQLPPAYTNSFTRGVYYPDKVFRSSVLHSTQDLFLPFFSNVTWFHAIHVSGTNGTKRFDNPVLPFNDGVYFASTEKSNIIRGWIFGTTLDSKTQSLLIVNNATNVVIKVCEFQFCNDPFLGVYYHKNNKSWMESEFRVYSSANNCTFEYVSQPFLMDLEGKQGNFKNLREFVFKNVDGYFKIYSKHTPINLVRDLPQGFSALEPLVDLPIGINITRFQTLLALHRSYLTPGDSSSGWTAGAAAYYVGYLQPRTFLLKYNENGTITDAVDCALDPLSETKCTLKSFTVEKGIYQTSNFRVQPTESIVRFPNITNLCPFGEVFNATRFASVYAWNRKRISNCVADYSVLYNSASFSTFKCYGVSPTKLNDLCFTNVYADSFVIRGDEVRQIAPGQTGKIADYNYKLPDDFTGCVIAWNSNNLDSKVGGNYNYLYRLFRKSNLKPFERDISTEIYQAGSTPCNGVEGFNCYFPLQSYGFQPTNGVGYQPYRVVVLSFELLHAPATVCGPKKSTNLVKNKCVNFNFNGLTGTGVLTESNKKFLPFQQFGRDIADTTDAVRDPQTLEILDITPCSFGGVSVITPGTNTSNQVAVLYQDVNCTEVPVAIHADQLTPTWRVYSTGSNVFQTRAGCLIGAEHVNNSYECDIPIGAGICASYQTQTNSPRRARSVASQSIIAYTMSLGAENSVAYSNNSIAIPTNFTISVTTEILPVSMTKTSVDCTMYICGDSTECSNLLLQYGSFCTQLNRALTGIAVEQDKNTQEVFAQVKQIYKTPPIKDFGGFNFSQILPDPSKPSKRSFIEDLLFNKVTLADAGFIKQYGDCLGDIAARDLICAQKFNGLTVLPPLLTDEMIAQYCSALLAGTITSGWTFGAGAALQIPFAMQMAYRFNGIGVTQNVLYENQKLIANQFNSAIGKIQDSLSSTASALGKLQDVVNQNAQALNTLVKQLSSNFGAISSVLNDILSRLDKVEAEVQIDRLITGRLQSLQTYVTQQLIRAAEIRASANLAATKMSECVLGQSKRVDFCGKGYHLMSFPQCAPHGVVFLHVTYVPAQEKNFTTAPAICHDGKAHFPREGVFVSNGTHWFVTQRNFYEPQIITTDNTFVSGNCDVVIGIVNNTVYDPLQPELDSGGGGSDIIKLLNEQVNKEMQSSNLYMSMSSWCYTHSLDGAGLFLFDHAAEEYEHAKKLIIFLNENNVPVQLTSISAPEHKFEGLTQIFQKAYEHEQHISESINNIVDHAIKSKDHATFNFLQWYVAEQHEEEVLFKDILDKIELIGNENHGLYLADQYVKGIAKSRKS

SEQ ID NO: 9643 - protein, 1315 aa, Artificial Sequence
  SARS-CoV-2/Iceland/319/2020__EPI_ISL_417648 spike protein (1-1147)(T874C_S1055C) Ferritin construct
MFVFLVLLPLVSSQCVNLTTRTQLPPAYTNSFTRGVYYPDKVFRSSVLHSTQDLFLPFFSNVTWFHAIHVSGTNGTKRFDNPVLPFNDGVYFASTEKSNIIRGWIFGTTLDSKTQSLLIVNNATNVVIKVCEFQFCNDPFLGVYYHKNNKSWMESEFRVYSSANNCTFEYVSQPFLIDLEGKQGNFKNLREFVFKNIDGYFKIYSKHTPINLVRDLPQGFSALEPLVDLPIGINITRFQTLLALHRSYLTPGDSSSGWTAGAAAYYVGYLQPRTFLLKYNENGTITDAVDCALDPLSETKCTLKSFTVEKGIYQTSNFRVQPTESIVRFPNITNLCPFGEVFNATRFASVYAWNRKRISNCVADYSVLYNSASFSTFKCYGVSPTKLNDLCFTNVYADSFVIRGDEVRQIAPGQTGKIADYNYKLPDDFTGCVIAWNSNNLDSKVGGNYNYLYRLFRKSNLKPFERDISTEIYQAGSTPCNGVEGFNCYFPLQSYGFQPTNGVGYQPYRVVVLSFELLHAPATVCGPKKSTNLVKNKCVNFNFNGLTGTGVLTESNKKFLPFQQFGRDIADTTDAVRDPQTLEILDITPCSFGGVSVITPGTNTSNQVAVLYQGVNCTEVPVAIHADQLTPTWRVYSTGSNVFQTRAGCLIGAEHVNNSYECDIPIGAGICASYQTQTNSPRRARSVASQSIIAYTMSLGAENSVAYSNNSIAIPTNFTISVTTEILPVSMTKTSVDCTMYICGDSTECSNLLLQYGSFCTQLNRALTGIAVEQDKNTQEVFAQVKQIYKTPPIKDFGGFNFSQILPDPSKPSKRSFIEDLLFNKVTLADAGFIKQYGDCLGDIAARDLICAQKFNGLTVLPPLLTDEMIAQYCSALLAGTITSGWTFGAGAALQIPFAMQMAYRFNGIGVTQNVLYENQKLIANQFNSAIGKIQDSLSSTASALGKLQDVVNQNAQALNTLVKQLSSNFGAISSVLNDILSRLDKVEAEVQIDRLITGRLQSLQTYVTQQLIRAAEIRASANLAATKMSECVLGQSKRVDFCGKGYHLMSFPQCAPHGVVFLHVTYVPAQEKNFTTAPAICHDGKAHFPREGVFVSNGTHWFVTQRNFYEPQIITTDNTFVSGNCDVVIGIVNNTVYDPLQPELDSGGGGSDIIKLLNEQVNKEMQSSNLYMSMSSWCYTHSLDGAGLFLFDHAAEEYEHAKKLIIFLNENNVPVQLTSISAPEHKFEGLTQIFQKAYEHEQHISESINNIVDHAIKSKDHATFNFLQWYVAEQHEEEVLFKDILDKIELIGNENHGLYLADQYVKGIAKSRKS

SEQ ID NO: 9644 - protein, 1315 aa, Artificial Sequence
  SARS-CoV-2/Congo/94/2020__EPI_ISL_417947 spike protein (1-1147)(T874C_S1055C) Ferritin construct
MFVFLVLLPLVSSQCVNLTTRTQLPPAYTNSFTRGVYYPDKVFRSSVLHSTQDLFLPFFSNVTWFHAIHVSGTNGTKRFDNPVLPFNDGVYFASTEKSNIIRGWIFGTTLDSKTQSLLIVNNATNVVIKVCEFQFCNDPFLGVYYHKNNKSWMESEFRVYSSANNCTFEYVSQPFLMDLEGKQGNFKNLREFVFKNIDGYFKIYSKHTPINLVRDLPQGFSALEPLVDLPIGINITRFQTLLALHRSYLTPGDSSSGWTAGAAAYYVGYLQPRTFLLKYNENGTITDAVDCALDPLSETKCTLKSFTVEKGIYQTSNFRVQPTESIVRFPNITNLCPFGEVFNATRFASVYAWNRKRISNCVADYSVLYNSASFSTFKCYGVSPTKLNDLCFTNVYADSFVIRGDEVRQIAPGQTGKIADYNYKLPDDFTGCVIAWNSNNLDSKVGGNYNYLYRLFRKSNLKPFERDISTEIYQAGSTPCNGVEGFNCYFPLQSYGFQPTNGVGYQPYRVVVLSFELLHAPATVCGPKKSTNLVKNKCVNFNFNGLTGTGVLTESNKKFLPFQQFGRDIADTTDAVRDPQTLEILDITPCSFGGVSVITPGTNTSNQVAVLYQGVNCTEVPVAIHADQLTPTWRVYSTGSNVFQTRAGCLIGAEHVNNSYECDIPIGAGICASYQTQTNSPRRARSVASQSIIAYTMSLGAENSVAYSNNSIAIPTNFTISVTTEILPVSMTKTSVDCTMYICGDSTECSNLLLQYGSFCTQLNRALTGIAVEQDKNTQEVFAQVKQIYKTPPIKDFGGFNFSQILPDPSKPSKRSFIEDILFNKVTLADAGFIKQYGDCLGDIAARDLICAQKFNGLTVLPPLLTDEMIAQYCSALLAGTITSGWTFGAGAALQIPFAMQMAYRFNGIGVTQNVLYENQKLIANQFNSAIGKIQDSLSSTASALGKLQDVVNQNAQALNTLVKQLSSNFGAISSVLNDILSRLDKVEAEVQIDRLITGRLQSLQTYVTQQLIRAAEIRASANLAATKMSECVLGQSKRVDFCGKGYHLMSFPQCAPHGVVFLHVTYVPAQEKNFTTAPAICHDGKAHFPREGVFVSNGTHWFVTQRNFYEPQIITTDNTFVSGNCDVVIGIVNNTVYDPLQPELDSGGGGSDIIKLLNEQVNKEMQSSNLYMSMSSWCYTHSLDGAGLFLFDHAAEEYEHAKKLIIFLNENNVPVQLTSISAPEHKFEGLTQIFQKAYEHEQHISESINNIVDHAIKSKDHATFNFLQWYVAEQHEEEVLFKDILDKIELIGNENHGLYLADQYVKGIAKSRKS

SEQ ID NO: 9645 - protein, 1315 aa, Artificial Sequence
  SARS-CoV-2/Congo/158/2020__EPI_ISL_417950 spike protein (1-1147)(T874C_S1055C) Ferritin construct
MFVFLVLLPLVSSQCVNLTTRTQLPPAYTNSFTRGVYYPDKVFRSSVLHSTQDLFLPFFSNVTWFHAIHVSGTNGTKRFDNPVLPFNDGVYFASTEKSNIIRGWIFGTTLDSKTQSLLIVNNATNVVIKVCEFQFCNDPFLGVYYHKNNKSWMESEFRVYSSANNCTFEYVSQPFLMDLEGKQGNFKNLREFVFKNIDGYFKIYSKHTPINLVRDLPQGFSALEPLVDLPIGINITRFQTLLALHRSYLTPGDSSSGWTAGAAAYYVGYLQPRTFLLKYNENGTITDAVDCALDPLSETKCTLKSFTVEKGIYQTSNFRVQPTESIVRFPNITNLCPFGEVFNATRFASVYAWNRKRISNCVADYSVLYNSASFSTFKCYGVSPTKLNDLCFTNVYADSFVIRGDEVRQIAPGQTGKIADYNYKLPDDFTGCVIAWNSNNLDSKVGGNYNYLYRLFRKSNLKPFERDISTEIYQAGSTPCNGVEGFNCYFPLQSYGFQPTNGVGYQPYRVVVLSFELLHAPATVCGPKKSTNLVKNKCVNFNFNGLTGTGVLTESNKKFLPFQQFGRDIADTTDAVRDPQTLEILDITPCSFGGVSVITPGTNTSNQVAVLYQDVNCTEVPVAIHADQLTPTWRVYSTGSNVFQTRAGCLIGAEHVNNSYECDIPIGAGICASYQTQTNSPRRARSVASQSIIAYTMSLGAENSVAYSNNSIAIPTNFTISVTTEILPVSMTKTSVDCTMYICGDSTECSNLLLQYGSFCTQLNRALTGIAVEQDKNTQEVFAQVKQIYKTPPIKDFGGFNFSQILPDPSKPSKRSFIEDLLFNKVTLADAGFIKQYGDCLGDIAARDLICAQKFNGLTVLPPLLTDEMIAQYCSALLAGTITSGWTFGAGAALQIPFAMQMAYRFNGIGVTQNVLYENQKLIANQFNSAIGKIQDSLSSTASALGKLQDVVNQNAQALNTLVKQLSSNFGAISSVLNDILSRLDKVEAEVQIDRLITGRLQSLQTYVTQQLIRAAEIRASANLAATKMSECVLGQSKRVDFCGKGYHLMSFPQCAPHGVVFLHVTYVPAQEKNFTTAPAICHDGKAHFPREGVFVSNGTHWFVTQRNFYEPQIITTDNTFLSGNCDVVIGIVNNTVYDPLQPELDSGGGGSDIIKLLNEQVNKEMQSSNLYMSMSSWCYTHSLDGAGLFLFDHAAEEYEHAKKLIIFLNENNVPVQLTSISAPEHKFEGLTQIFQKAYEHEQHISESINNIVDHAIKSKDHATFNFLQWYVAEQHEEEVLFKDILDKIELIGNENHGLYLADQYVKGIAKSRKS

SEQ ID NO: 9646 - protein, 1315 aa, Artificial Sequence
  SARS-CoV-2/USA/UT-00034/2020__EPI_ISL_417977 spike protein (1-1147)(T874C_S1055C) Ferritin construct
MFVFLVLLPLVSSQCVNLTTRTQLPPAYTNSFTRGVYYPDKVFRSSVLHSTQDLFLPFFSNVTWFHAIHVSGTNGTKRFDNPVLPFNDGVYFASTEKSNIIRGWIFGTTLDSKTQSLLIVNNATNVVIKVCEFQFCNDPFLGVYYYKNNKSWMESEFRVYSSANNCTFEYVSQPFLMDLEGKQGNFKNLREFVFKNIDGYFKIYSKHTPINLVRDLPQGFSALEPLVDLPIGINITRFQTLLALHRSYLTPGDSSSGWTAGAAAYYVGYLQPRTFLLKYNENGTITDAVDCALDPLSETKCTLKSFTVEKGIYQTSNFRVQPTESIVRFPNITNLCPFGEVFNATRFASVYAWNRKRISNCVADYSVLYNSASFSTFKCYGVSPTKLNDLCFTNVYADSFVIRGDEVRQIAPGQTGKIADYNYKLPDDFTGCVIAWNSNNLDSKVGGNYNYLYRLFRKSNLKPFERDISTEIYQAGSTPCNGVEGFNCYFPLQSYGFQPTNGVGYQPYRVVVLSFELLHAPATVCGPKKSTNLVKNKCVNFNFNGLTGTGVLTESNKKFLPFQQFGRDIADTTDAVRDPQTLEILDITPCSFGGVSVITPGTNTSNQVAVLYQGVNCTEVPVAIHADQLTPTWRVYSTGSNVFQTRAGCLIGAEHVNNSYECDIPIGAGICASYQTQTNSPRRARSVASQSIIAYTMSLGAENSVAYSNNSIAIPTNFTISVTTEILPVSMTKTSVDCTMYICGDSTECSNLLLQYGSFCTQLNRALTGIAVEQDKNTQEVFAQVKQIYKTPPIKDFGGFNFSQILPDPSKPSKRSFIEDLLFNKVTLADAGFIKQYGDCLGDIAARDLICAQKFNGLTVLPPLLTDEMIAQYCSALLAGTITSGWTFGAGAALQIPFAMQMAYRFNGIGVTQNVLYENQKLIANQFNSAIGKIQDSLSSTASALGKLQDVVNQNAQALNTLVKQLSSNFGAISSVLNDILSRLDKVEAEVQIDRLITGRLQSLQTYVTQQLIRAAEIRASANLAATKMSECVLGQSKRVDFCGKGYHLMSFPQCAPHGVVFLHVTYVPAQEKNFTTAPAICHDGKAHFPREGVFVSNGTHWFVTQRNFYEPQIITTDNTFVSGNCDVVIGIVNNTVYDPLQPELDSGGGGSDIIKLLNEQVNKEMQSSNLYMSMSSWCYTHSLDGAGLFLFDHAAEEYEHAKKLIIFLNENNVPVQLTSISAPEHKFEGLTQIFQKAYEHEQHISESINNIVDHAIKSKDHATFNFLQWYVAEQHEEEVLFKDILDKIELIGNENHGLYLADQYVKGIAKSRKS

SEQ ID NO: 9647 - protein, 1315 aa, Artificial Sequence
  SARS-CoV-2/USA/UT-00033/2020__EPI_ISL_417976 spike protein (1-1147)(T874C_S1055C) Ferritin construct
MFVFLVLLPLVSSQCVNLTTRTQLPPAYTNSFTRGVYYPDKVFRSSVLHSTQDLFLPFFSNVTWFHAIHVSGTNGTKRFDNPVLPFNDGVYFASTEKSNIIRGWIFGTTLDSKTQSLLIVNNATNVVIKVCEFQFCNDPFLGVYYHKNNKSWMESEFRVYSSANNCTFEYVSQPFLMDLEGKQGNFKNLREFVFKNIDGYFKIYSKHTPINLVRDLPQGFSALEPLVDLPIGINITRFQTLLALHRSYLTPGDSSSGLTAGAAAYYVGYLQPRTFLLKYNENGTITDAVDCALDPLSETKCTLKSFTVEKGIYQTSNFRVQPTESIVRFPNITNLCPFGEVFNATRFASVYAWNRKRISNCVADYSVLYNSASFSTFKCYGVSPTKLNDLCFTNVYADSFVIRGDEVRQIAPGQTGKIADYNYKLPDDFTGCVIAWNSNNLDSKVGGNYNYLYRLFRKSNLKPFERDISTEIYQAGSTPCNGVEGFNCYFPLQSYGFQPTNGVGYQPYRVVVLSFELLHAPATVCGPKKSTNLVKNKCVNFNFNGLTGTGVLTESNKKFLPFQQFGRDIADTTDAVRDPQTLEILDITPCSFGGVSVITPGTNTSNQVAVLYQGVNCTEVPVAIHADQLTPTWRVYSTGSNVFQTRAGCLIGAEHVNNSYECDIPIGAGICASYQTQTNSPRRARSVASQSIIAYTMSLGAENSVAYSNNSIAIPTNFTISVTTEILPVSMTKTSVDCTMYICGDSTECSNLLLQYGSFCTQLNRALTGIAVEQDKNTQEVFAQVKQIYKTPPIKDFGGFNFSQILPDPSKPSKRSFIEDLLFNKVTLADAGFIKQYGDCLGDIAARDLICAQKFNGLTVLPPLLTDEMIAQYCSALLAGTITSGWTFGAGAALQIPFAMQMAYRFNGIGVTQNVLYENQKLIANQFNSAIGKIQDSLSSTASALGKLQDVVNQNAQALNTLVKQLSSNFGAISSVLNDILSRLDKVEAEVQIDRLITGRLQSLQTYVTQQLIRAAEIRASANLAATKMSECVLGQSKRVDFCGKGYHLMSFPQCAPHGVVFLHVTYVPAQEKNFTTAPAICHDGKAHFPREGVFVSNGTHWFVTQRNFYEPQIITTDNTFVSGNCDVVIGIVNNTVYDPLQPELDSGGGGSDIIKLLNEQVNKEMQSSNLYMSMSSWCYTHSLDGAGLFLFDHAAEEYEHAKKLIIFLNENNVPVQLTSISAPEHKFEGLTQIFQKAYEHEQHISESINNIVDHAIKSKDHATFNFLQWYVAEQHEEEVLFKDILDKIELIGNENHGLYLADQYVKGIAKSRKS

SEQ ID NO: 9648 - protein, 1315 aa, Artificial Sequence
  SARS-CoV-2/USA/WI-13/2020__EPI_ISL_417516 spike protein (1-1147)(T874C_S1055C) Ferritin construct
MFVFLVLLPLVSSQCVNLTTRTQLPPAYTNSFTRGVYYPDKVFRSSVLHSTQDLFLPFFSNVTWFHAIHVSGTNGTKRFDNPVLPFNDGVYFASTEKSNIIRGWIFGTTLDSKTQSLLIVNNATNVVIKVCEFQFCNDPFLGVYYHKNNKSWMESEFRVYSSANNCTFEYVSQPFLMDLEGKQGNFKNLREFVFKNIDGYFKIYSKHTPINLVRDLPQGFSALEPLVDLPIGINITRFQTLLALHRSYLTPGDSSSGWTAGAAAYYVGYLQPRTFLLKYNENGTITDAVDCALDPLSETKCTLKSFTVEKGIYQTSNFRVLPTESIVRFPNITNLCPFGEVFNATRFASVYAWNRKRISNCVADYSVLYNSASFSTFKCYGVSPTKLNDLCFTNVYADSFVIRGDEVRQIAPGQTGKIADYNYKLPDDFTGCVIAWNSNNLDSKVGGNYNYLYRLFRKSNLKPFERDISTEIYQAGSTPCNGVEGFNCYFPLQSYGFQPTNGVGYQPYRVVVLSFELLHAPATVCGPKKSTNLVKNKCVNFNFNGLTGTGVLTESNKKFLPFQQFGRDIADTTDAVRDPQTLEILDITPCSFGGVSVITPGTNTSNQVAVLYQGVNCTEVPVAIHADQLTPTWRVYSTGSNVFQTRAGCLIGAEHVNNSYECDIPIGAGICASYQTQTNSPRRARSVASQSIIAYTMSLGAENSVAYSNNSIAIPTNFTISVTTEILPVSMTKTSVDCTMYICGDSTECSNLLLQYGSFCTQLNRALTGIAVEQDKNTQEVFAQVKQIYKTPPIKDFGGFNFSQILPDPSKPSKRSFIEDLLFNKVTLADAGFIKQYGDCLGDIAARDLICAQKFNGLTVLPPLLTDEMIAQYCSALLAGTITSGWTFGAGAALQIPFAMQMAYRFNGIGVTQNVLYENQKLIANQFNSAIGKIQDSLSSTASALGKLQDVVNQNAQALNTLVKQLSSNFGAISSVLNDILSRLDKVEAEVQIDRLITGRLQSLQTYVTQQLIRAAEIRASANLAATKMSECVLGQSKRVDFCGKGYHLMSFPQCAPHGVVFLHVTYVPAQEKNFTTAPAICHDGKAHFPREGVFVSNGTHWFVTQRNFYEPQIITTDNTFVSGNCDVVIGIVNNTVYDPLQPELDSGGGGSDIIKLLNEQVNKEMQSSNLYMSMSSWCYTHSLDGAGLFLFDHAAEEYEHAKKLIIFLNENNVPVQLTSISAPEHKFEGLTQIFQKAYEHEQHISESINNIVDHAIKSKDHATFNFLQWYVAEQHEEEVLFKDILDKIELIGNENHGLYLADQYVKGIAKSRKS

SEQ ID NO: 9649 - protein, 1314 aa, Artificial Sequence
  SARS-CoV-2/India/1-27/2020__EPI_ISL_413522 spike protein (1-1146)(T873C_S1054C) Ferritin construct
MFVFLVLLPLVSSQCVNLTTRTQLPPAYTNSFTRGVYYPDKVFRSSVLHSTQDLFLPFFSNVTWFHAIHVSGTNGTKRFDNPVLPFNDGVYFASTEKSNIIRGWIFGTTLDSKTQSLLIVNNATNVVIKVCEFQFCNDPFLGVYHKNNKSWMESEFRVYSSANNCTFEYVSQPFLMDLEGKQGNFKNLREFVFKNIDGYFKIYSKHTPINLVRDLPQGFSALEPLVDLPIGINITRFQTLLALHRSYLTPGDSSSGWTAGAAAYYVGYLQPRTFLLKYNENGTITDAVDCALDPLSETKCTLKSFTVEKGIYQTSNFRVQPTESIVRFPNITNLCPFGEVFNATRFASVYAWNRKRISNCVADYSVLYNSASFSTFKCYGVSPTKLNDLCFTNVYADSFVIRGDEVIQIAPGQTGKIADYNYKLPDDFTGCVIAWNSNNLDSKVGGNYNYLYRLFRKSNLKPFERDISTEIYQAGSTPCNGVEGFNCYFPLQSYGFQPTNGVGYQPYRVVVLSFELLHAPATVCGPKKSTNLVKNKCVNFNFNGLTGTGVLTESNKKFLPFQQFGRDIADTTDAVRDPQTLEILDITPCSFGGVSVITPGTNTSNQVAVLYQDVNCTEVPVAIHADQLTPTWRVYSTGSNVFQTRAGCLIGAEHVNNSYECDIPIGAGICASYQTQTNSPRRARSVASQSIIAYTMSLGAENSVAYSNNSIAIPTNFTISVTTEILPVSMTKTSVDCTMYICGDSTECSNLLLQYGSFCTQLNRALTGIAVEQDKNTQEVFAQVKQIYKTPPIKDFGGFNFSQILPDPSKPSKRSFIEDLLFNKVTLADAGFIKQYGDCLGDIAARDLICAQKFNGLTVLPPLLTDEMIAQYCSALLAGTITSGWTFGAGAALQIPFAMQMAYRFNGIGVTQNVLYENQKLIANQFNSAIGKIQDSLSSTASALGKLQDVVNQNAQALNTLVKQLSSNFGAISSVLNDILSRLDKVEAEVQIDRLITGRLQSLQTYVTQQLIRAAEIRASANLAATKMSECVLGQSKRVDFCGKGYHLMSFPQCAPHGVVFLHVTYVPAQEKNFTTAPAICHDGKAHFPREGVFVSNGTHWFVTQRNFYEPQIITTDNTFVSGNCDVVIGIVNNTVYDPLQPELDSGGGGSDIIKLLNEQVNKEMQSSNLYMSMSSWCYTHSLDGAGLFLFDHAAEEYEHAKKLIIFLNENNVPVQLTSISAPEHKFEGLTQIFQKAYEHEQHISESINNIVDHAIKSKDHATFNFLQWYVAEQHEEEVLFKDILDKIELIGNENHGLYLADQYVKGIAKSRKS

SEQ ID NO: 9650 - protein, 1309 aa, Artificial Sequence
  SARS-CoV-2/pangolin/Guangxi/P4L/2017__EPI_ISL_410538 spike protein (1-1141)(T868C_S1049C) Ferritin construct
MFVFLFVLPLVSSQCVNLTTRTGIPPGYTNSSTRGVYYPDKVFRSSILHLTQDLFLPFFSNVTWFNTINYQGGFKKFDNPVLPFNDGVYFASTEKSNIIRGWIFGTTLDARTQSLLIVNNATNVVIKVCEFQFCTDPFLGVYYHNNNKTWVENEFRVYSSANNCTFEYISQPFLMDLEGKQGNFKNLREFVFKNVDGYFKIYSKHTPIDLVRDLPRGFAALEPLVDLPIGINITRFQTLLALHRSYLTPGNLESGWTTGAAAYYVGYLQQRTFLLSYNQNGTITDAVDCSLDPLSETKCTLKSLTVEKGIYQTSNFRVQPTISIVRFPNITNLCPFGEVFNASKFASVYAWNRKRISNCVADYSVLYNSTSFSTFKCYGVSPTKLNDLCFTNVYADSFVVKGDEVRQIAPGQTGVIADYNYKLPDDFTGCVIAWNSVKQDALTGGNYGYLYRLFRKSKLKPFERDISTEIYQAGSTPCNGQVGLNCYYPLERYGFHPTTGVNYQPFRVVVLSFELLNGPATVCGPKLSTTLVKDKCVNFNFNGLTGTGVLTTSKKQFLPFQQFGRDISDTTDAVRDPQTLEILDITPCSFGGVSVITPGTNTSNQVAVLYQDVNCTEVPMAIHAEQLTPAWRVYSAGANVFQTRAGCLVGAEHVNNSYECDIPVGAGICASYHSMSSLRSVNQRSIIAYTMSLGAENSVAYSNNSIAIPTNFTISVTTEILPVSMTKTSVDCTMYICGDSIECSNLLLQYGSFCTQLNRALTGIAVEQDKNTQEVFAQVKQIYKTPPIKDFGGFNFSQILPDPSKPSKRSFIEDLLFNKVTLADAGFIKQYGDCLGDIAARDLICAQKFNGLTVLPPLLTDEMIAQYCSALLAGTITSGWTFGAGAALQIPFAMQMAYRFNGIGVTQNVLYENQKLIANQFNSAIGKIQDSLSSTASALGKLQDVVNQNAQALNTLVKQLSSNFGAISSVLNDILSRLDKVEAEVQIDRLITGRLQSLQTYVTQQLIRAAEIRASANLAATKMSECVLGQSKRVDFCGKGYHLMSFPQCAPHGVVFLHVTYVPAQEKNFTTAPAICHEGKAHFPREGVFVSNGTHWFITQRNFYEPQIITTDNTFVSGSCDVVIGIVNNTVYDPLQPELDSGGGGSDIIKLLNEQVNKEMQSSNLYMSMSSWCYTHSLDGAGLFLFDHAAEEYEHAKKLIIFLNENNVPVQLTSISAPEHKFEGLTQIFQKAYEHEQHISESINNIVDHAIKSKDHATFNFLQWYVAEQHEEEVLFKDILDKIELIGNENHGLYLADQYVKGIAKSRKS

SEQ ID NO: 9651 - protein, 1309 aa, Artificial Sequence
  SARS-CoV-2/pangolin/Guangxi/P5L/2017__EPI_ISL_410540 spike protein (1-1141)(T868C_S1049C) Ferritin construct
MFVFLFVLPLVSSQCVNLTTRTGIPPGYTNSSTRGVYYPDKVFRSSILHLTQDLFLPFFSNVTWFNTINYQGGFKKFDNPVLPFNDGVYFASTEKSNIIRGWIFGTTLDARTQSLLIVNNATNVVIKVCEFQFCTDPFLGVYYHNNNKTWVENEFRVYSSANNCTFEYISQPFLMDLEGKQGNFKNLREFVFKNVDGYFKIYSKHTPIDLVRDLPRGFAALEPLVDLPIGINITRFQTLLALHRSYLTPGKLESGWTTGAAAYYVGYLQQRTFLLSYNQNGTITDAVDCSLDPLSETKCTLKSLTVEKGIYQTSNFRVQPTISIVRFPNITNLCPFGEVFNASKFASVYAWNRKRISNCVADYSVLYNSTSFSTFKCYGVSPTKLNDLCFTNVYADSFVVKGDEVRQIAPGQTGVIADYNYKLPDDFTGCVIAWNSVKQDALTGGNYGYLYRLFRKSKLKPFERDISTEIYQAGSTPCNGQVGLNCYYPLERYGFHPTTGVNYQPFRVVVLSFELLNGPATVCGPKLSTTLVKDKCVNFNFNGLTGTGVLTTSKKQFLPFQQFGRDISDTTDAVRDPQTLEILDITPCSFGGVSVITPGTNTSNQVAVLYQDVNCTEVPMAIHAEQLTPAWRVYSAGANVFQTRAGCLVGAEHVNNSYECDIPVGAGICASYHSMSSFRSVNQRSIIAYTMSLGAENSVAYSNNSIAIPTNFTISVTTEILPVSMTKTSVDCTMYICGDSIECSNLLLQYGSFCTQLNRALTGIAVEQDKNTQEVFAQVKQIYKTPPIKDFGGFNFSQILPDPSKPSKRSFIEDLLFNKVTLADAGFIKQYGDCLGDIAARDLICAQKFNGLTVLPPLLTDEMIAQYCSALLAGTITSGWTFGAGAALQIPFAMQMAYRFNGIGVTQNVLYENQKLIANQFNSAIGKIQDSLSSTASALGKLQDVVNQNAQALNTLVKQLSSNFGAISSVLNDILSRLDKVEAEVQIDRLITGRLQSLQTYVTQQLIRAAEIRASANLAATKMSECVLGQSKRVDFCGKGYHLMSFPQCAPHGVVFLHVTYVPAQEKNFTTAPAICHEGKAHFPREGVFVSNGTHWFITQRNFYEPQIITTDNTFVSGSCDVVIGIVNNTVYDPLQPELDSGGGGSDIIKLLNEQVNKEMQSSNLYMSMSSWCYTHSLDGAGLFLFDHAAEEYEHAKKLIIFLNENNVPVQLTSISAPEHKFEGLTQIFQKAYEHEQHISESINNIVDHAIKSKDHATFNFLQWYVAEQHEEEVLFKDILDKIELIGNENHGLYLADQYVKGIAKSRKS

SEQ ID NO: 9652 - protein, 1309 aa, Artificial Sequence
  SARS-CoV-2/pangolin/Guangxi/P5E/2017__EPI_ISL_410541 spike protein (1-1141)(T868C_S1049C) Ferritin construct
MFVFLFVLPLVSSQCVNLTTRTGIPPGYTNSSTRGVYYPDKVFRSSILHLTQDLFLPFFSNVTWFNTITYQGGSKKFDNPVLPFNDGVYFASTEKSNIIRGWIFGTTLDARTQSLLIVNNATNVVIKVCEFQFCTDPFLGVYYHNNNKTWVENEFRVYSSANNCTFEYISQPFLMDLEGKQGNFKNLREFVFKNVDGYFKIYSKHTPIDLVRDLPRGFAALEPLVDLPIGINITRFQTLLALHRSYLTPGKLESGWTTGAAAYYVGYLQQRTFLLSYNQNGTITDAVDCSLDPLSETKCTLKSLTVEKGIYQTSNFRVQPTISIVRFPNITNLCPFGEVFNASKFASVYAWNRKRISNCVADYSVLYNSTSFSTFKCYGVSPTKLNDLCFTNVYADSFVVKGDEVRQIAPGQTGVIADYNYKLPDDFTGCVIAWNSVKQDALTGDNYGYLYRLFRKSKLKPFERDISTEIYQAGSTPCNGQVGLNCYYPLERYGFHPTTGVNYQPFRVVVLSFELLNGPATVCGPKLSTTLVKDKCVNFNFNGLTGTGVLTTSKKQFLPFQQFGRDISDTTDAVRDPQTLEILDITPCSFGGVSVITPGTNTSNQVAVLYQDVNCTEVPMAIHAEQLTPAWRVYSAGANVFQTRAGCLVGAEHVNNSYECDIPVGAGICASYHSMSSFRSVNQRSIIAYTMSLGAENSVAYSNNSIAIPTNFTISVTTEILPVSMTKTSVDCTMYICGDSIECSNLLLQYGSFCTQLNRALTGIAVEQDKNTQEVFAQVKQIYKTPPIKDFGGFNFSQILPDPSKPSKRSFIEDLLFNKVTLADAGFIKQYGDCLGDIAARDLICAQKFNGLTVLPPLLTDEMIAQYCSALLAGTITSGWTFGAGAALQIPFAMQMAYRFNGIGVTQNVLYENQKLIANQFNSAIGKIQDSLSSTASALGKLQDVVNQNAQALNTLVKQLSSNFGAISSVLNDILSRLDKVEAEVQIDRLITGRLQSLQTYVTQQLIRAAEIRASANLAATKMSECVLGQSKRVDFCGKGYHLMSFPQCAPHGVVFLHVTYVPAQEKNFTTAPAICHEGKAHFPREGVFVSNGTHWFITQRNFYEPQIITTDNTFVSGSCDVVIGIVNNTVYDPLQPELDSGGGGSDIIKLLNEQVNKEMQSSNLYMSMSSWCYTHSLDGAGLFLFDHAAEEYEHAKKLIIFLNENNVPVQLTSISAPEHKFEGLTQIFQKAYEHEQHISESINNIVDHAIKSKDHATFNFLQWYVAEQHEEEVLFKDILDKIELIGNENHGLYLADQYVKGIAKSRKS

SEQ ID NO: 9653 - protein, 1307 aa, Artificial Sequence
  SARS-CoV-2/pangolin/Guangxi/P1E/2017__EPI_ISL_410539 spike protein (1-1139)(T866C_S1047C) Ferritin construct
MFVFLFVLPLVSSQCVNLTTRTGIQPGYTNSSTRGVYYPDKVFRSSILHLTQDLFLPFFSNVTWFNTINYQGGFKKFDNPVLPFNDGVYFASTEKSNIIRGWIFGTTLDARTQSLLIVNNATNVVIKVCEFQFCTDPFLGVYYHNNNKTWVENEFRVYSSANNCTFEYISQPFLMDLEGKQGNFKNLREFVFKNVDGYFKIYSKHTPIDLVRDLPRGFAALEPLVDLPIGINITRFQTLLALHRSYLTPGKLESGWTTGAAAYYVGYLQQRTFLLSYNQNGTITDAVDCSLDPLSETKCTLKSLTVEKGIYQTSNFRVQPTISIVRFPNITNLCPFGEVFNASKFASVYAWNRKRISNCVADYSVLYNSTSFSTFKCYGVSPTKLNDLCFTNVYADSFVVKGDEVRQIAPGQTGVIADYNYKLPDDFTGCVIAWNSVKQDALTGGNYLYRLFRKSKLKPFERDISTEIYQAGSTPCNGQVGLNCYYPLERYGFHPTTGVNYQPFRVVVLSFELLNGPATVCGPKLSTTLVKDKCVNFNFNGLTGTGVLTTSKKQFLPFQQFGRDISDTTDAVRDPQTLEILDITPCSFGGVSVITPGTNTSNQVAVLYQDVNCTEVPMAIHAEQLTPAWRVYSAGANVFQTRAGCLVGAEHVNNSYECDIPVGAGICASYHSMSSLRSVNQRSIIAYTMSLGAENSVAYSNNSIAIPTNFTISVTTEILPVSMTKTSVDCTMYICGDSIECSNLLLQYGSFCTQLNRALTGIAVEQDKNTQEVFAQVKQIYKTPPIKDFGGFNFSQILPDPSKPSKRSFIEDLLFNKVTLADAGFIKQYGDCLGDIAARDLICAQKFNGLTVLPPLLTDEMIAQYCSALLAGTITSGWTFGAGAALQIPFAMQMAYRFNGIGVTQNVLYENQKLIANQFNSAIGKIQDSLSSTASALGKLQDVVNQNAQALNTLVKQLSSNFGAISSVLNDILSRLDKVEAEVQIDRLITGRLQSLQTYVTQQLIRAAEIRASANLAATKMSECVLGQSKRVDFCGKGYHLMSFPQCAPHGVVFLHVTYVPAQEKNFTTAPAICHEGKAHFPREGVFVSNGTHWFITQRNFYEPQIITTDNTFVSGSCDVVIGIVNNTVYDPLQPELDSGGGGSDIIKLLNEQVNKEMQSSNLYMSMSSWCYTHSLDGAGLFLFDHAAEEYEHAKKLIIFLNENNVPVQLTSISAPEHKFEGLTQIFQKAYEHEQHISESINNIVDHAIKSKDHATFNFLQWYVAEQHEEEVLFKDILDKIELIGNENHGLYLADQYVKGIAKSRKS

SEQ ID NO: 9654 - protein, 1177 aa, Artificial Sequence
  SARS-CoV-2/Wuhan/WIV05/2019__EPI_ISL_402128 spike protein (1-1147) Foldon construct
MFVFLVLLPLVSSQCVNLTTRTQLPPAYTNSFTRGVYYPDKVFRSSVLHSTQDLFLPFFSNVTWFHAIHVSGTNGTKRFDNPVLPFNDGVYFASTEKSNIIRGWIFGTTLDSKTQSLLIVNNATNVVIKVCEFQFCNDPFLGVYYHKNNKSWMESEFRVYSSANNCTFEYVSQPFLMDLEGKQGNFKNLREFVFKNIDGYFKIYSKHTPINLVRDLPQGFSALEPLVDLPIGINITRFQTLLALHRSYLTPGDSSSGWTAGAAAYYVGYLQPRTFLLKYNENGTITDAVDCALDPLSETKCTLKSFTVEKGIYQTSNFRVQPTESIVRFPNITNLCPFGEVFNATRFASVYAWNRKRISNCVADYSVLYNSASFSTFKCYGVSPTKLNDLCFTNVYADSFVIRGDEVRQIAPGQTGKIADYNYKLPDDFTGCVIAWNSNNLDSKVGGNYNYLYRLFRKSNLKPFERDISTEIYQAGSTPCNGVEGFNCYFPLQSYGFQPTNGVGYQPYRVVVLSFELLHAPATVCGPKKSTNLVKNKCVNFNFNGLTGTGVLTESNKKFLPFQQFGRDIADTTDAVRDPQTLEILDITPCSFGGVSVITPGTNTSNQVAVLYQDVNCTEVPVAIHADQLTPTWRVYSTGSNVFQTRAGCLIGAEHVNNSYECDIPIGAGICASYQTQTNSPRRARSVASQSIIAYTMSLGAENSVAYSNNSIAIPTNFTISVTTEILPVSMTKTSVDCTMYICGDSTECSNLLLQYGSFCTQLNRALTGIAVEQDKNTQEVFAQVKQIYKTPPIKDFGGFNFSQILPDPSKPSKRSFIEDLLFNKVTLADAGFIKQYGDCLGDIAARDLICAQKFNGLTVLPPLLTDEMIAQYTSALLAGTITSGWTFGAGAALQIPFAMQMAYRFNGIGVTQNVLYENQKLIANQFNSAIGKIQDSLSSTASALGKLQDVVNQNAQALNTLVKQLSSNFGAISSVLNDILSRLDKVEAEVQIDRLITGRLQSLQTYVTQQLIRAAEIRASANLAATKMSECVLGQSKRVDFCGKGYHLMSFPQSAPHGVVFLHVTYVPAQEKNFTTAPAICHDGKAHFPREGVFVSNGTHWFVTQRNFYEPQIITTDNTFVSGNCDVVIGIVNNTVYDPLQPELDSGGSGYIPEAPRDGQAYVRKDGEWVLLSTFL

SEQ ID NO: 9655 - protein, 1173 aa, Artificial Sequence
  SARS-CoV-2/bat/Yunnan/RaTG13/2013__EPI_ISL_402131 spike protein (1-1143) Foldon construct
MFVFLVLLPLVSSQCVNLTTRTQLPPAYTNSSTRGVYYPDKVFRSSVLHLTQDLFLPFFSNVTWFHAIHVSGTNGIKRFDNPVLPFNDGVYFASTEKSNIIRGWIFGTTLDSKTQSLLIVNNATNVVIKVCEFQFCNDPFLGVYYHKNNKSWMESEFRVYSSANNCTFEYVSQPFLMDLEGKQGNFKNLREFVFKNIDGYFKIYSKHTPINLVRDLPPGFSALEPLVDLPIGINITRFQTLLALHRSYLTPGDSSSGWTAGAAAYYVGYLQPRTFLLKYNENGTITDAVDCALDPLSETKCTLKSFTVEKGIYQTSNFRVQPTDSIVRFPNITNLCPFGEVFNATTFASVYAWNRKRISNCVADYSVLYNSTSFSTFKCYGVSPTKLNDLCFTNVYADSFVITGDEVRQIAPGQTGKIADYNYKLPDDFTGCVIAWNSKHIDAKEGGNFNYLYRLFRKANLKPFERDISTEIYQAGSKPCNGQTGLNCYYPLYRYGFYPTDGVGHQPYRVVVLSFELLNAPATVCGPKKSTNLVKNKCVNFNFNGLTGTGVLTESNKKFLPFQQFGRDIADTTDAVRDPQTLEILDITPCSFGGVSVITPGTNASNQVAVLYQDVNCTEVPVAIHADQLTPTWRVYSTGSNVFQTRAGCLIGAEHVNNSYECDIPIGAGICASYQTQTNSRSVASQSIIAYTMSLGAENSVAYSNNSIAIPTNFTISVTTEILPVSMTKTSVDCTMYICGDSTECSNLLLQYGSFCTQLNRALTGIAVEQDKNTQEVFAQVKQIYKTPPIKDFGGFNFSQILPDPSKPSKRSFIEDLLFNKVTLADAGFIKQYGDCLGDIAARDLICAQKFNGLTVLPPLLTDEMIAQYTSALLAGTITSGWTFGAGAALQIPFAMQMAYRFNGIGVTQNVLYENQKLIANQFNSAIGKIQDSLSSTASALGKLQDVVNQNAQALNTLVKQLSSNFGAISSVLNDILSRLDKVEAEVQIDRLITGRLQSLQTYVTQQLIRAAEIRASANLAATKMSECVLGQSKRVDFCGKGYHLMSFPQSAPHGVVFLHVTYVPAQEKNFTTAPAICHDGKAHFPREGVFVSNGTHWFVTQRNFYEPQIITTDNTFVSGSCDVVIGIVNNTVYDPLQPELDSGGSGYIPEAPRDGQAYVRKDGEWVLLSTFL

SEQ ID NO: 9656 - protein, 1177 aa, Artificial Sequence
  SARS-CoV-2/Wuhan/HBCDC-HB-01/2019__EPI_ISL_402132 spike protein (1-1147) Foldon construct
MFVFLVLLPLVSSQCVNLTTRTQLPPAYTNSITRGVYYPDKVFRSSVLHSTQDLFLPFFSNVTWFHAIHVSGTNGTKRFDNPVLPFNDGVYFASTEKSNIIRGWIFGTTLDSKTQSLLIVNNATNVVIKVCEFQFCNDPFLGVYYHKNNKSWMESEFRVYSSANNCTFEYVSQPFLMDLEGKQGNFKNLREFVFKNIDGYFKIYSKHTPINLVRDLPQGFSALEPLVDLPIGINITRFQTLLALHRSYLTPGDSSSGWTAGAAAYYVGYLQPRTFLLKYNENGTITDAVDCALDPLSETKCTLKSFTVEKGIYQTSNFRVQPTESIVRFPNITNLCPFGEVFNATRFASVYAWNRKRISNCVADYSVLYNSASFSTFKCYGVSPTKLNDLCFTNVYADSFVIRGDEVRQIAPGQTGKIADYNYKLPDDFTGCVIAWNSNNLDSKVGGNYNYLYRLFRKSNLKPFERDISTEIYQAGSTPCNGVEGFNCYFPLQSYGFQPTNGVGYQPYRVVVLSFELLHAPATVCGPKKSTNLVKNKCVNFNFNGLTGTGVLTESNKKFLPFQQFGRDIADTTDAVRDPQTLEILDITPCSFGGVSVITPGTNTSNQVAVLYQDVNCTEVPVAIHADQLTPTWRVYSTGSNVFQTRAGCLIGAEHVNNSYECDIPIGAGICASYQTQTNSPRRARSVASQSIIAYTMSLGAENSVAYSNNSIAIPTNFTISVTTEILPVSMTKTSVDCTMYICGDSTECSNLLLQYGSFCTQLNRALTGIAVEQDKNTQEVFAQVKQIYKTPPIKDFGGFNFSQILPDPSKPSKRSFIEDLLFNKVTLADAGFIKQYGDCLGDIAARDLICAQKFNGLTVLPPLLTDEMIAQYTSALLAGTITSGWTFGAGAALQIPFAMQMAYRFNGIGVTQNVLYENQKLIANQFNSAIGKIQDSLSSTASALGKLQDVVNQNAQALNTLVKQLSSNFGAISSVLNDILSRLDKVEAEVQIDRLITGRLQSLQTYVTQQLIRAAEIRASANLAATKMSECVLGQSKRVDFCGKGYHLMSFPQSAPHGVVFLHVTYVPAQEKNFTTAPAICHDGKAHFPREGVFVSNGTHWFVTQRNFYEPQIITTDNTFVSGNCDVVIGIVNNTVYDPLQPELDSGGSGYIPEAPRDGQAYVRKDGEWVLLSTFL

SEQ ID NO: 9657 - protein, 1177 aa, Artificial Sequence
  SARS-CoV-2/Guangdong/20SF028/2020__EPI_ISL_403936 spike protein (1-1147) Foldon construct
MFVFLVLLPLVSSQCVNLTTRTQLPPAYTNSFTRGVYYPDKVFRSSVLYSTQDLFLPFFSNVTWFHAIHVSGTNGTKRFDNPVLPFNDGVYFASTEKSNIIRGWIFGTTLDSKTQSLLIVNNATNVVIKVCEFQFCNDPFLGVYYHKNNKSWMESEFRVYSSANNCTFEYVSQPFLMDLEGKQGNFKNLREFVFKNIDGYFKIYSKHTPINLVRDLPQGFSALEPLVDLPIGINITRFQTLLALHRSYLTPGDSSSGWTAGAAAYYVGYLQPRTFLLKYNENGTITDAVDCALDPLSETKCTLKSFTVEKGIYQTSNFRVQPTESIVRFPNITNLCPFGEVFNATRFASVYAWNRKRISNCVADYSVLYNSASFSTFKCYGVSPTKLNDLCFTNVYADSFVIRGDEVRQIAPGQTGKIADYNYKLPDDFTGCVIAWNSNNLDSKVGGNYNYLYRLFRKSNLKPFERDISTEIYQAGSTPCNGVEGFNCYFPLQSYGFQPTNGVGYQPYRVVVLSFELLHAPATVCGPKKSTNLVKNKCVNFNFNGLTGTGVLTESNKKFLPFQQFGRDIADTTDAVRDPQTLEILDITPCSFGGVSVITPGTNTSNQVAVLYQDVNCTEVPVAIHADQLTPTWRVYSTGSNVFQTRAGCLIGAEHVNNSYECDIPIGAGICASYQTQTNSPRRARSVASQSIIAYTMSLGAENSVAYSNNSIAIPTNFTISVTTEILPVSMTKTSVDCTMYICGDSTECSNLLLQYGSFCTQLNRALTGIAVEQDKNTQEVFAQVKQIYKTPPIKDFGGFNFSQILPDPSKPSKRSFIEDLLFNKVTLADAGFIKQYGDCLGDIAARDLICAQKFNGLTVLPPLLTDEMIAQYTSALLAGTITSGWTFGAGAALQIPFAMQMAYRFNGIGVTQNVLYENQKLIANQFNSAIGKIQDSLSSTASALGKLQDVVNQNAQALNTLVKQLSSNFGAISSVLNDILSRLDKVEAEVQIDRLITGRLQSLQTYVTQQLIRAAEIRASANLAATKMSECVLGQSKRVDFCGKGYHLMSFPQSAPHGVVFLHVTYVPAQEKNFTTAPAICHDGKAHFPREGVFVSNGTHWFVTQRNFYEPQIITTDNTFVSGNCDVVIGIVNNTVYDPLQPELDSGGSGYIPEAPRDGQAYVRKDGEWVLLSTFL

SEQ ID NO: 9658 - protein, 1177 aa, Artificial Sequence
  SARS-CoV-2/Shenzhen/SZTH-001/2020__EPI_ISL_406592 spike protein (1-1147) Foldon construct
MFVFLVLLPLVSSQCVNLTTRTQLPPAYTNSFTRGVYYPDKVFRSSVLHSTQDLFLPFFSNVTWFHAIHVSGTNGTKRFDNPVLPFNDGVYFASTEKSNIIRGWIFGTTLDSKTQSLLIVNNATNVVIKVCEFQFCNDPFLGVYYHKNNKSWMESEFRVYSSANNCTFEYVSQPFLMDLEGKQGNFKNLREFVFKNIDGYFKIYSKHTPINLVRDLPQGFSALEPLVDLPIGINITRFQTLLALHRSYLTPGDSSSGWTAGAAAYYVGYLQPRTFLLKYNENGTITDAVDCALDPLSETKCTLKSFTVEKGIYQTSNFRVQPTESIVRFPNITNLCPFGEVFNATRFASVYAWNRKRISNCVADYSVLYNSASFSTFKCYGVSPTKLNDLCFTNVYADSFVIRGDEVRQIAPGQTGKIADYNYKLPDDFTGCVIAWNSNNLDSKVGGNYNYLYRLFRKSNLKPFERDISTEIYQAGSTPCNGVEGFNCYFPLQSYGFQPTNGVGYQPYRVVVLSFELLHAPATVCGPKKSTNLVKNKCVNFNFNGLTGTGVLTESNKKFLPFQQFGRDIADTTDAVRDPQTLEILDITPCSFGGVSVITPGTNTSNQVAVLYQDVNCTEVPVAIHADQLTPTWRVYSTGSNVFQTRAGCLIGAEHVNNSYECDIPIGAGICASYQTQTNSPRRARSVASQSIIAYTMSLGAENSVAYSNNSIAIPTNFTISVTTEILPVSMTKTSVDCTMYICGDSTECSNLLLQYGSFCTQLNRALTGIAVEQDKNTQEVFAQVKQIYKTPPIKDFGGFNFSQILPDPSKPSKRSFIEDLLFNKVTLADAGFIKQYGDCLGDIAARDLICAQKFNGLTVLPPLLTDEMIAQYTSALLAGTITSGWTFGAGAALQIPFAMQMAYRFNGIGVTQNVLYENQKLIANQFNSAIGKIQDSLSSTASALGKLQDVVNQNAQALNTLVKQLSSNFGAISSVLNDILSRLDKVEAEVQIDRLITGRLQSLQTYVTQQLIRAAEIRASANLAATKMSECVLGQSKRVDFCGKGYHLMSFPQSAPHGVVFLHVTYVPAQEKNFTTAPAICHDGKAHFPREGVFVSNGTHWFVTQRNFYEPQIITTDNTFVSGNCDVLIGIVNNTVYDPLQPELDSGGSGYIPEAPRDGQAYVRKDGEWVLLSTFL

SEQ ID NO: 9659 - protein, 1177 aa, Artificial Sequence
  SARS-CoV-2/Shenzhen/SZTH-004/2020__EPI_ISL_406595 spike protein (1-1147) Foldon construct
MFVFLVLLPLVSSQCVNLTTRTQLPPAYTNSFTRGVYYPDKVFRSSVLHSTQDLFLPFFSNVTWFHAIHVSGTNGTKRFDNPVLPFNDGVYFASTEKSNIIRGWIFGTTLDSKTQSLLIVNNATNVVIKVCEFQFCNDPFLGVYYHKNNKSWMESEFRVYSSANNCTFEYVSQPFLMDLEGKQGNFKNLREFVFKNIDGYFKIYSKHTPINLVRDLPQGFSALEPLVDLPIGINITRFQTLLALHRSYLTPGDSSSGWTAGAAAYYVGYLQPRTFLLKYNENGTITDAVDCALDPLSETKCTLKSFTVEKGIYQTSNFRVQPTESIVRFPNITNLCPFGEVFNATRFASVYAWDRKRISNCVAYYSVLYNSASFSTFKCYGVSPTKLNDLCFTNVYADSFVIRGDEVRQIAPGQTGKIADYNYKLPDDFTGCVIAWNSNNLDSKVGGNYNYLYRLFRKSNLKPFERDISTEIYQAGSTPCNGVEGFNCYFPLQSYGFQPTNGVGYQPYRVVVLSFELLHAPATVCGPKKSTNLVKNKCVNFNFNGLTGTGVLTESNKKFLPFQQFGRDIADTTDAVRDPQTLEILDITPCSFGGVSVITPGTNTSNQVAVLYQDVNCTEVPVAIHADQLTPTWRVYSTGSNVFQTRAGCLIGAEHVNNSYECDIPIGAGICASYQTQTNSPRRARSVASQSIIAYTMSLGAENSVAYSNNSIAIPTNFTISVTTEILPVSMTKTSVDCTMYICGDSTECSNLLLQYGSFCTQLNRALTGIAVEQDKNTQEVFAQVKQIYKTPPIKDFGGFNFSQILPDPSKPSKRSFIEDLLFNKVTLADAGFIKQYGDCLGDIAARDLICAQKFNGLTVLPPLLTDEMIAQYTSALLAGTITSGWTFGAGAALQIPFAMQMAYRFNGIGVTQNVLYENQKLIANQFNSAIGKIQDSLSSTASALGKLQDVVNQNAQALNTLVKQLSSNFGAISSVLNDILSRLDKVEAEVQIDRLITGRLQSLQTYVTQQLIRAAEIRASANLAATKMSECVLGQSKRVDFCGKGYHLMSFPQSAPHGVVFLHVTYVPAQEKNFTTAPAICHDGKAHFPREGVFVSNGTHWFVTQRNFYEPQIITTDNTFVSGNCDVVIGIVNNTVYDPLQPELDSGGSGYIPEAPRDGQAYVRKDGEWVLLSTFL

SEQ ID NO: 9660 - protein, 1177 aa, Artificial Sequence
  SARS-CoV-2/France/IDF0372/2020__EPI_ISL_406596 spike protein (1-1147) Foldon construct
MFVFLVLLPLVSSQCVNLTTRTQLPPAYTNSFTRGVYYPDKVFRSSVLHSTQDLFLPFFSNVTWFHAIHVSGTNGTKRFDNPVLPFNDGVYFASTEKSNIIRGWIFGTTLDSKTQSLLIVNNATNVVIKVCEFQFCNDPFLGVYYHKNNKSWMESEFRVYSSANNCTFEYVSQPFLMDLEGKQGNFKNLREFVFKNIDGYFKIYSKHTPINLVRDLPQGFSALEPLVDLPIGINITRFQTLLALHRSYLTPGDSSSGWTAGAAAYYVGYLQPRTFLLKYNENGTITDAVDCALDPLSETKCTLKSFTVEKGIYQTSNFRVQPTESIVRFPNITNLCPFGEVFNATRFASVYAWNRKRISNCVADYSFLYNSASFSTFKCYGVSPTKLNDLCFTNVYADSFVIRGDEVRQIAPGQTGKIADYNYKLPDDFTGCVIAWNSNNLDSKVGGNYNYLYRLFRKSNLKPFERDISTEIYQAGSTPCNGVEGFNCYFPLQSYGFQPTNGVGYQPYRVVVLSFELLHAPATVCGPKKSTNLVKNKCVNFNFNGLTGTGVLTESNKKFLPFQQFGRDIADTTDAVRDPQTLEILDITPCSFGGVSVITPGTNTSNQVAVLYQDVNCTEVPVAIHADQLTPTWRVYSTGSNVFQTRAGCLIGAEHVNNSYECDIPIGAGICASYQTQTNSPRRARSVASQSIIAYTMSLGAENSVAYSNNSIAIPTNFTISVTTEILPVSMTKTSVDCTMYICGDSTECSNLLLQYGSFCTQLNRALTGIAVEQDKNTQEVFAQVKQIYKTPPIKDFGGFNFSQILPDPSKPSKRSFIEDLLFNKVTLADAGFIKQYGDCLGDIAARDLICAQKFNGLTVLPPLLTDEMIAQYTSALLAGTITSGWTFGAGAALQIPFAMQMAYRFNGIGVTQNVLYENQKLIANQFNSAIGKIQDSLSSTASALGKLQDVVNQNAQALNTLVKQLSSNFGAISSVLNDILSRLDKVEAEVQIDRLITGRLQSLQTYVTQQLIRAAEIRASANLAATKMSECVLGQSKRVDFCGKGYHLMSFPQSAPHGVVFLHVTYVPAQEKNFTTAPAICHDGKAHFPREGVFVSNGTHWFVTQRNFYEPQIITTDNTFVSGNCDVVIGIVNNTVYDPLQPELDSGGSGYIPEAPRDGQAYVRKDGEWVLLSTFL

SEQ ID NO: 9661 - protein, 1177 aa, Artificial Sequence
  SARS-CoV-2/Australia/VIC01/2020__EPI_ISL_406844 spike protein (1-1147) Foldon construct
MFVFLVLLPLVSSQCVNLTTRTQLPPAYTNSFTRGVYYPDKVFRSSVLHSTQDLFLPFFSNVTWFHAIHVSGTNGTKRFDNPVLPFNDGVYFASTEKSNIIRGWIFGTTLDSKTQSLLIVNNATNVVIKVCEFQFCNDPFLGVYYHKNNKSWMESEFRVYSSANNCTFEYVSQPFLMDLEGKQGNFKNLREFVFKNIDGYFKIYSKHTPINLVRDLPQGFSALEPLVDLPIGINITRFQTLLALHRRYLTPGDSSSGWTAGAAAYYVGYLQPRTFLLKYNENGTITDAVDCALDPLSETKCTLKSFTVEKGIYQTSNFRVQPTESIVRFPNITNLCPFGEVFNATRFASVYAWNRKRISNCVADYSVLYNSASFSTFKCYGVSPTKLNDLCFTNVYADSFVIRGDEVRQIAPGQTGKIADYNYKLPDDFTGCVIAWNSNNLDSKVGGNYNYLYRLFRKSNLKPFERDISTEIYQAGSTPCNGVEGFNCYFPLQSYGFQPTNGVGYQPYRVVVLSFELLHAPATVCGPKKSTNLVKNKCVNFNFNGLTGTGVLTESNKKFLPFQQFGRDIADTTDAVRDPQTLEILDITPCSFGGVSVITPGTNTSNQVAVLYQDVNCTEVPVAIHADQLTPTWRVYSTGSNVFQTRAGCLIGAEHVNNSYECDIPIGAGICASYQTQTNSPRRARSVASQSIIAYTMSLGAENSVAYSNNSIAIPTNFTISVTTEILPVSMTKTSVDCTMYICGDSTECSNLLLQYGSFCTQLNRALTGIAVEQDKNTQEVFAQVKQIYKTPPIKDFGGFNFSQILPDPSKPSKRSFIEDLLFNKVTLADAGFIKQYGDCLGDIAARDLICAQKFNGLTVLPPLLTDEMIAQYTSALLAGTITSGWTFGAGAALQIPFAMQMAYRFNGIGVTQNVLYENQKLIANQFNSAIGKIQDSLSSTASALGKLQDVVNQNAQALNTLVKQLSSNFGAISSVLNDILSRLDKVEAEVQIDRLITGRLQSLQTYVTQQLIRAAEIRASANLAATKMSECVLGQSKRVDFCGKGYHLMSFPQSAPHGVVFLHVTYVPAQEKNFTTAPAICHDGKAHFPREGVFVSNGTHWFVTQRNFYEPQIITTDNTFVSGNCDVVIGIVNNTVYDPLQPELDSGGSGYIPEAPRDGQAYVRKDGEWVLLSTFL

SEQ ID NO: 9662 - protein, 1177 aa, Artificial Sequence
  SARS-CoV-2/Germany/BavPat1/2020__EPI_ISL_406862 spike protein (1-1147) Foldon construct
MFVFLVLLPLVSSQCVNLTTRTQLPPAYTNSFTRGVYYPDKVFRSSVLHSTQDLFLPFFSNVTWFHAIHVSGTNGTKRFDNPVLPFNDGVYFASTEKSNIIRGWIFGTTLDSKTQSLLIVNNATNVVIKVCEFQFCNDPFLGVYYHKNNKSWMESEFRVYSSANNCTFEYVSQPFLMDLEGKQGNFKNLREFVFKNIDGYFKIYSKHTPINLVRDLPQGFSALEPLVDLPIGINITRFQTLLALHRSYLTPGDSSSGWTAGAAAYYVGYLQPRTFLLKYNENGTITDAVDCALDPLSETKCTLKSFTVEKGIYQTSNFRVQPTESIVRFPNITNLCPFGEVFNATRFASVYAWNRKRISNCVADYSVLYNSASFSTFKCYGVSPTKLNDLCFTNVYADSFVIRGDEVRQIAPGQTGKIADYNYKLPDDFTGCVIAWNSNNLDSKVGGNYNYLYRLFRKSNLKPFERDISTEIYQAGSTPCNGVEGFNCYFPLQSYGFQPTNGVGYQPYRVVVLSFELLHAPATVCGPKKSTNLVKNKCVNFNFNGLTGTGVLTESNKKFLPFQQFGRDIADTTDAVRDPQTLEILDITPCSFGGVSVITPGTNTSNQVAVLYQGVNCTEVPVAIHADQLTPTWRVYSTGSNVFQTRAGCLIGAEHVNNSYECDIPIGAGICASYQTQTNSPRRARSVASQSIIAYTMSLGAENSVAYSNNSIAIPTNFTISVTTEILPVSMTKTSVDCTMYICGDSTECSNLLLQYGSFCTQLNRALTGIAVEQDKNTQEVFAQVKQIYKTPPIKDFGGFNFSQILPDPSKPSKRSFIEDLLFNKVTLADAGFIKQYGDCLGDIAARDLICAQKFNGLTVLPPLLTDEMIAQYTSALLAGTITSGWTFGAGAALQIPFAMQMAYRFNGIGVTQNVLYENQKLIANQFNSAIGKIQDSLSSTASALGKLQDVVNQNAQALNTLVKQLSSNFGAISSVLNDILSRLDKVEAEVQIDRLITGRLQSLQTYVTQQLIRAAEIRASANLAATKMSECVLGQSKRVDFCGKGYHLMSFPQSAPHGVVFLHVTYVPAQEKNFTTAPAICHDGKAHFPREGVFVSNGTHWFVTQRNFYEPQIITTDNTFVSGNCDVVIGIVNNTVYDPLQPELDSGGSGYIPEAPRDGQAYVRKDGEWVLLSTFL

SEQ ID NO: 9663 - protein, 1177 aa, Artificial Sequence
  SARS-CoV-2/Wuhan/HBCDC-HB-02/2020__EPI_ISL_412978 spike protein (1-1147) Foldon construct
MFVFLVLLPLVSSQCVNLTTRTQLPPAYTNSFTRGVYYPDKVFRSSVLHSTQDLFLPFFSNVTWFHAIHVSGTNGTKRFDNPVLPFNDGVYFASTEKSNIIRGWIFGTTLDSKTQSLLIVNNATNVVIKVCEFQFCNDPFLGVYYHKNNKSWMESEFRVYSSANNCTFEYVSQPFLMDLEGKQGNFKNLREFVFKNIDGYFKIYSKHTPINLVRDLPQGFSALEPLVDLPIGINITRFQTLLALHRSYLTPGDSSSGWTAGAAAYYVGYLQPRTFLLKYNENGTITDAVDCALDPLSETKCTLKSFTVEKGIYQTSNFRVQPTESIVRFPNITNLCPFGEVFNATRFASVYAWNRKRISNCVADYSVLYNSASFSTFKCYGVSPTKLNDLCFTNVYADSFVIRGDEVRQIAPGQTGKIADYNYKLPDDFTGCVIAWNSNNLDSKVGGNYNYLYRLFRKSNLKPFERDISTEIYQAGSTPCNGVEGFNCYFPLQSYGFQPTNGVGYQPYRVVVLSFELLHAPATVCGPKKSTNLVKNKCVNFNFNGLTGTGVLTESNKKFLPFQQFGRDIADTTDAVRDPQTLEILDITPCSFGGVSVITPGTNTSNQVAVLYQDVNCTEVPVAIHADQLTPTWRVYSTGSNVFQTRAGCLIGAEHVNNSYECDIPIGAGICASYQTQTNSPRRARSVASQSIIAYTMSLGAENSVAYSNNSIAIPTNFTISVTTEILPVSMTKTSVDCTMYICGDSTECSNFLLQYGSFCTQLNRALTGIAVEQDKNTQEVFAQVKQIYKTPPIKDFGGFNFSQILPDPSKPSKRSFIEDLLFNKVTLADAGFIKQYGDCLGDIAARDLICAQKFNGLTVLPPLLTDEMIAQYTSALLAGTITSGWTFGAGAALQIPFAMQMAYRFNGIGVTQNVLYENQKLIANQFNSAIGKIQDSLSSTASALGKLQDVVNQNAQALNTLVKQLSSNFGAISSVLNDILSRLDKVEAEVQIDRLITGRLQSLQTYVTQQLIRAAEIRASANLAATKMSECVLGQSKRVDFCGKGYHLMSFPQSAPHGVVFLHVTYVPAQEKNFTTAPAICHDGKAHFPREGVFVSNGTHWFVTQRNFYEPQIITTDNTFVSGNCDVVIGIVNNTVYDPLQPELDSGGSGYIPEAPRDGQAYVRKDGEWVLLSTFL

SEQ ID NO: 9664 - protein, 1177 aa, Artificial Sequence
  SARS-CoV-2/Australia/QLD02/2020__EPI_ISL_407896 spike protein (1-1147) Foldon construct
MFVFLVLLPLVSSQCVNLTTRTQLPPAYTNSFTRGVYYPDKVFRSSVLHSTQDLFLPFFSNVTWFHAIHVSGTNGTKRFDNPVLPFNDGVYFASTEKSNIIRGWIFGTTLDSKTQSLLIVNNATNVVIKVCEFQFCNDPFLGVYYHKNNKSWMESEFRVYSSANNCTFEYVSQPFLMDLEGKQGNFKNLREFVFKNIDGYFKIYSKHTPINLVRDLPQGFSALEPLVDLPIGINITRFQTLLALHRSYLTPGDSSSGWTAGAAAYYVGYLQPRTFLLKYNENGTITDAVDCALDPLSETKCTLKSFTVEKGIYQTSNFRVQPTESIVRFPNITNLCPFGEVFNATRFASVYAWNRKRISNCVADYSVLYNSASFSTFKCYGVSPTKLNDLCFTNVYADSFVIRGDEVRQIAPGQTGKIADYNYKLPDDFTGCVIAWNSNNLDSKVGGNYNYLYRLFRKSNLKPFERDISTEIYQAGSTPCNGVEGFNCYFPLQSYGFQPTNGVGYQPYRVVVLSFELLHAPATVCGPKKSTNLVKNKCVNFNFNGLTGTGVLTESNKKFLPFQQFGRDIADTTDAVRDPQTLEILDITPCSFGGVSVITPGTNTSNQVAVLYQDVNCTEVPVAIHADQLTPTWRVYSTGSNVFQTRAGCLIGAEHVNNSYECDIPIGAGICASYQTQTNSPRRARSVASQSIIAYTMSLGAENSVAYSNNSIAIPTNFTISVTTEILPVSMTKTSVDCTMYICGDSTECSNLLLQYGSFCTQLNRALTGIAVEQDKNTQEVFAQVKQIYKTPPIKDFGGFNFSQILPDPSKPSKRSFIEDLLFNKVTLADAGFIKQYGDCLGDIAARDLICAQKFNGLTVLPPLLTDEMIAQYTSALLAGTITSGWTFGAGAALQIPFAMQMAYRFNGIGVTQNVLYENQKLIANQFNSAIGKIQDSLSSTASALGKLQDVVNQNAQALNTLVKQLSSNFGAISSVLNDILSRLDKVEAEVQIDRLITGRLQSLQTYVTQQLIRAAEIRASANLAATKMSECVLGQSKRVDFCGKGYHLMSFPQSAPHGVVFLHVTYVPAQEKNFTTAPAICHDGKAHFPREGVFVSNGTHWFVTQRNFYEPQIITTDNTFVSGNCDVVIGIVNNTVYDPLQLELDSGGSGYIPEAPRDGQAYVRKDGEWVLLSTFL

SEQ ID NO: 9665 - protein, 1177 aa, Artificial Sequence
  SARS-CoV-2/India/1-31/2020__EPI_ISL_413523 spike protein (1-1147) Foldon construct
MFVFLVLLPLVSSQCVNLTTRTQLPPAYTNSFTRGVYYPDKVFRSSVLHSTQDLFLPFFSNVTWFHAIHVSGTNGTKRFDNPVLPFNDGVYFASTEKSNIIRGWIFGTTLDSKTQSLLIVNNATNVVIKVCEFQFCNDPFLGVYYHKNNKSWMESEFRVYSSANNCTFEYVSQPFLMDLEGKQGNFKNLREFVFKNIDGYFKIYSKHTPINLVRDLPQGFSALEPLVDLPIGINITRFQTLLALHRSYLTPGDSSSGWTAGAAAYYVGYLQPRTFLLKYNENGTITDAVDCALDPLSETKCTLKSFTVEKGIYQTSNFRVQPTESIVRFPNITNLCPFGEVFNATRFASVYAWNRKRISNCVADYSVLYNSASFSTFKCYGVSPTKLNDLCFTNVYADSFVIRGDEVRQIAPGQTGKIADYNYKLPDDFTGCVIAWNSNNLDSKVGGNYNYLYRLFRKSNLKPFERDISTEIYQAGSTPCNGVEGFNCYFPLQSYGFQPTNGVGYQPYRVVVLSFELLHAPATVCGPKKSTNLVKNKCVNFNFNGLTGTGVLTESNKKFLPFQQFGRDIADTTDAVRDPQTLEILDITPCSFGGVSVITPGTNTSNQVAVLYQDVNCTEVPVAIHADQLTPTWRVYSTGSNVFQTRAGCLIGAEHVNNSYECDIPIGAGICASYQTQTNSPRRARSVASQSIIAYTMSLGAENSVAYSNNSIAIPTNFTISVTTEILPVSMTKTSVDCTMYICGDSTECSNLLLQYGSFCTQLNRALTGIAVEQDKNTQEVFAQVKQIYKTPPIKDFGGFNFSQILPDPSKPSKRSFIEDLLFNKVTLADAGFIKQYGDCLGDIAARDLICAQKFNGLTVLPPLLTDEMIAQYTSALLAGTITSGWTFGAGAALQIPFAMQMAYRFNGIGVTQNVLYENQKLIANQFNSVIGKIQDSLSSTASALGKLQDVVNQNAQALNTLVKQLSSNFGAISSVLNDILSRLDKVEAEVQIDRLITGRLQSLQTYVTQQLIRAAEIRASANLAATKMSECVLGQSKRVDFCGKGYHLMSFPQSAPHGVVFLHVTYVPAQEKNFTTAPAICHDGKAHFPREGVFVSNGTHWFVTQRNFYEPQIITTDNTFVSGNCDVVIGIVNNTVYDPLQPELDSGGSGYIPEAPRDGQAYVRKDGEWVLLSTFL

SEQ ID NO: 9666 - protein, 1177 aa, Artificial Sequence
  SARS-CoV-2/Guangdong/GD2020087-P0008/2020__EPI_ISL_413863 spike protein (1-1147) Foldon construct
MFVFLVLLPLVSSQCVNLTTRTQLPPAYTNSFTRGVYYPDKVFRSSVLHSTQDLFLPFFSNVTWFHAIHVSGTNGTKRFDNPVLPFNDGVYFASTEKSNIIRGWIFGTTLDSKTQSLLIVNNATNVVIKVCEFQFCNDPFLGVYYHKNNKSWMESEFRVYSSANNCTFEYVSQPFLMDLEGKQGNFKNLREFVFKNIDGYFKIYSKHTPINLVRDLPQGFSALEPLVDLPIGINITRFQTLLALHRSYLTPGDSSSGWTAGAAAYYVGYLQPRTFLLKYNENGTITDAVDCALDPLSETKCTLKSFTVEKGIYQTSNFRVQPTESIVRFPNITNLCPFGEVFNATRFASVYAWNRKRISNCVADYSVLYNSASFSTFKCYGVSPTKLNDLCFTNVYADSFVIRGDEVREIAPGQTGKIADYNYKLPDDFTGCVIAWNSNNLDSKVGGNYNYLYRLFRKSNLKPFERDISTEIYQAGSTPCNGVEGFNCYFPLQSYGFQPTNGVGYQPYRVVVLSFELLHAPATVCGPKKSTNLVKNKCVNFNFNGLTGTGVLTESNKKFLPFQQFGRDIADTTDAVRDPQTLEILDITPCSFGGVSVITPGTNTSNQVAVLYQDVNCTEVPVAIHADQLTPTWRVYSTGSNVFQTRAGCLIGAEHVNNSYECDIPIGAGICASYQTQTNSPRRARSVASQSIIAYTMSLGAENSVAYSNNSIAIPTNFTISVTTEILPVSMTKTSVDCTMYICGDSTECSNLLLQYGSFCTQLNRALTGIAVEQDKNTQEVFAQVKQIYKTPPIKDFGGFNFSQILPDPSKPSKRSFIEDLLFNKVTLADAGFIKQYGDCLGDIAARDLICAQKFNGLTVLPPLLTDEMIAQYTSALLAGTITSGWTFGAGAALQIPFAMQMAYRFNGIGVTQNVLYENQKLIANQFNSAIGKIQDSLSSTASALGKLQDVVNQNAQALNTLVKQLSSNFGAISSVLNDILSRLDKVEAEVQIDRLITGRLQSLQTYVTQQLIRAAEIRASANLAATKMSECVLGQSKRVDFCGKGYHLMSFPQSAPHGVVFLHVTYVPAQEKNFTTAPAICHDGKAHFPREGVFVSNGTHWFVTQRNFYEPQIITTDNTFVSGNCDVVIGIVNNTVYDPLQPELDSGGSGYIPEAPRDGQAYVRKDGEWVLLSTFL

SEQ ID NO: 9667 - protein, 1177 aa, Artificial Sequence
  SARS-CoV-2/Sweden/01/2020__EPI_ISL_411951 spike protein (1-1147) Foldon construct
MFVFLVLLPLVSSQCVNLTTRTQLPPAYTNSFTRGVYYPDKVFRSSVLHSTQDLFLPFFSNVTWFHAIHVSGTNGTKRFDNPVLPFNDGVYFASTEKSNIIRGWIFGTTLDSKTQSLLIVNNATNVVIKVCEFQFCNDPFLGVYYHKNNKSWMESEFRVYSSANNCTFEYVSQPFLMDLEGKQGNFKNLREFVFKNIDGYFKIYSKHTPINLVRDLPQGFSALEPLVDLPIGINITRFQTLLALHRSYLTPGDSSSGWTAGAAAYYVGYLQPRTFLLKYNENGTITDAVDCALDPLSETKCTLKSFTVEKGIYQTSNFRVQPTESIVRFPNITNLCPFGEVFNATRFASVYAWNRKRISNCVADYSVLYNSASFSTFKCYGVSPTKLNDLCFTNVYADSFVIRGDEVRQIAPGQTGKIADYNYKLPDDFTGCVIAWNSNNLDSKVGGNYNYLYRLFRKSNLKPFERDISTEIYQAGSTPCNGVEGFNCYFPLQSYGFQPTNGVGYQPYRVVVLSFELLHAPATVCGPKKSTNLVKNKCVNFNFNGLTGTGVLTESNKKFLPFQQFGRDIADTTDAVRDPQTLEILDITPCSFGGVSVITPGTNTSNQVAVLYQDVNCTEVPVAIHADQLTPTWRVYSTGSNVFQTRAGCLIGAEHVNNSYECDIPIGAGICASYQTQTNSPRRARSVASQSIIAYTMSLGAENSVAYSNNSIAIPTNFTISVTTEILPVSMTKTSVDCTMYICGDSTECSNLLLQYGSFCTQLNRALTGIAVEQDKNTQEVFAQVKQIYKTPPIKDCGGFNFSQILPDPSKPSKRSFIEDLLFNKVTLADAGFIKQYGDCLGDIAARDLICAQKFNGLTVLPPLLTDEMIAQYTSALLAGTITSGWTFGAGAALQIPFAMQMAYRFNGIGVTQNVLYENQKLIANQFNSAIGKIQDSLSSTASALGKLQDVVNQNAQALNTLVKQLSSNFGAISSVLNDILSRLDKVEAEVQIDRLITGRLQSLQTYVTQQLIRAAEIRASANLAATKMSECVLGQSKRVDFCGKGYHLMSFPQSAPHGVVFLHVTYVPAQEKNFTTAPAICHDGKAHFPREGVFVSNGTHWFVTQRNFYEPQIITTDNTFVSGNCDVVIGIVNNTVYDPLQPELDSGGSGYIPEAPRDGQAYVRKDGEWVLLSTFL

SEQ ID NO: 9668 - protein, 1177 aa, Artificial Sequence
  SARS-CoV-2/Tianmen/HBCDC-HB-07/2020__EPI_ISL_412983 spike protein (1-1147) Foldon construct
MFVFLVLLPLVSSQCVNLTTRTQLPPAYTNSFTRGVYYPDKVFRSSVLHSTQDLFLPFFSNVTWFHAIHVSGTNGTKRFDNPVLPFNDGVYFASTEKSNIIRGWIFGTTLDSKTQSLLIVNNATNVVIKVCEFQFCNDPFLGVYYHKNNKSWMESEFRVYSSANNCTFEYVSQPFLMDLEGKQGNFKNLREFVFKNIDGYFKIYSKHTPINLVRDLPQGFSALEPLVDLPIGINITRFQTLLALHRSYLTPGDSSSGWTAGAAAYYVGYLQPRTFLLKYNENGTITDAVDCALDPLSETKCTLKSFTVEKGIYQTSNFRVQPTESIVRFPNITNLCPFGEVFNATRFASVYAWNRKRISNCVADYSVLYNSASFSTFKCYGVSPTKLNDLCFTNVYADSFVIRGDEVRQIAPGQTGKIADYNYKLPDDFTGCVIAWNSNNLDSKVGGNYNYLYRLFRKSNLKPFERDISTEIYQAGSTPCNGVEGFNCYFPLQSYGFQPTNGVGYQPYRVVVLSFELLHAPATVCGPKKSTNLVKNKCVNFNFNGLTGTGVLTESNKKFLPFQQFGRDIADTTDAVRDPQTLEILDITPCSFGGVSVITPGTNTSNQVAVLYQDLNCTEVPVAIHADQLTPTWRVYSTGSNVFQTRAGCLIGAEHVNNSYECDIPIGAGICASYQTQTNSPRRARSVASQSIIAYTMSLGAENSVAYSNNSIAIPTNFTISVTTEILPVSMTKTSVDCTMYICGDSTECSNLLLQYGSFCTQLNRALTGIAVEQDKNTQEVFAQVKQIYKTPPIKDFGGFNFSQILPDPSKPSKRSFIEDLLFNKVTLADAGFIKQYGDCLGDIAARDLICAQKFNGLTVLPPLLTDEMIAQYTSALLAGTITSGWTFGAGAALQIPFAMQMAYRFNGIGVTQNVLYENQKLIANQFNSAIGKIQDSLSSTASALGKLQDVVNQNAQALNTLVKQLSSNFGAISSVLNDILSRLDKVEAEVQIDRLITGRLQSLQTYVTQQLIRAAEIRASANLAATKMSECVLGQSKRVDFCGKGYHLMSFPQSAPHGVVFLHVTYVPAQEKNFTTAPAICHDGKAHFPREGVFVSNGTHWFVTQRNFYEPQIITTDNTFVSGNCDVVIGIVNNTVYDPLQPELDSGGSGYIPEAPRDGQAYVRKDGEWVLLSTFL

SEQ ID NO: 9669 - protein, 1177 aa, Artificial Sequence
  SARS-CoV-2/Hong Kong/case42_VM20002493/2020__EPI_ISL_414527 spike protein (1-1147) Foldon construct
MFVFLVLLPLVSSQCVNLTTRTQLPPAYTNSFTRGVYYPDKVFRSSVLHSTQDLFLPFFSNVTWFHAIHVSGTNGTKRFDNPVLPFNDGVYFASTEKSNIIRGWIFGTTLDSKTQSLLIVNNATNVVIKVCEFQFCNDPFLGVYYHKNNKSWMESEFRVYSSANNCTFEYVSQPFLMDLEGKQGNFKNLREFVFKNIDGYFKIYSKHTPINLVRDLPQGFSALEPLVDLPIGINITRFQTLLALHRSYLTPGDSSSGWTAGAAAYYVGYLQPRTFLLKYNENGTITDAVDCALDPLSETKCTLKSFTVEKGIYQTSNFRVQPTESIVRFPNITNLCPFGEVFNATRFASVYAWNRKRISNCVADYSVLYNSASFSTFKCYGVSPTKLNDLCFTNVYADSFVIRGDEVRQIAPGQTGKIADYNYKLPDDFTGCVIAWNSNNLDSKVGGNYNYLYRLFRKSNLKPFERDISTEIYQAGSTPCNGVEGFNCYFPLQSYGFQPTNGVGYQPYRVVVLSFELLHAPATVCGPKKSTNLVKNKCVNFNFNGLTGTGVLTESNKKFLPFQQFGRDIADTTDAVRDPQTLEILDITPCSFGGVSVITPGTNTSNQVAVLYQDVNCTEVPVAIHADQLTPTWRVYSTGSNVFQTRAGCLIGAEHVNNSYECDIPIGAGICASYQTQTNSPRRARSVASQSIIAYTMSLGAENSVAYSNNSIAIPTNFAISVTTEILPVSMTKTSVDCTMYICGDSTECSNLLLQYGSFCTQLNRALTGIAVEQDKNTQEVFAQVKQIYKTPPIKDFGGFNFSQILPDPSKPSKRSFIEDLLFNKVTLADAGFIKQYGDCLGDIAARDLICAQKFNGLTVLPPLLTDEMIAQYTSALLAGTITSGWTFGAGAALQIPFAMQMAYRFNGIGVTQNVLYENQKLIANQFNSAIGKIQDSLSSTASALGKLQDVVNQNAQALNTLVKQLSSNFGAISSVLNDILSRLDKVEAEVQIDRLITGRLQSLQTYVTQQLIRAAEIRASANLAATKMSECVLGQSKRVDFCGKGYHLMSFPQSAPHGVVFLHVTYVPAQEKNFTTAPAICHDGKAHFPREGVFVSNGTHWFVTQRNFYEPQIITTDNTFVSGNCDVVIGIVNNTVYDPLQPELDSGGSGYIPEAPRDGQAYVRKDGEWVLLSTFL

SEQ ID NO: 9670 - protein, 1177 aa, Artificial Sequence
  SARS-CoV-2/USA/CruiseA-23/2020__EPI_ISL_414482 spike protein (1-1147) Foldon construct
MFVFLVLLPLVSSQCVNLTTRTQLPPAYTNSFTRGVYYPDKVFRSSVLHSTQDLFLPFFSNVTWFHAIHVSGTNGTKRFDNPVLPFNDGVYFASTEKSNIIRGWIFGTTLDSKTQSLLIVNNATNVVIKVCEFQFCNDPFLGVYYHKNNKSWMESEFRVYSSANNCTFEYVSQPFLMDLEVKQGNFKNLREFVFKNIDGYFKIYSKHTPINLVRDLPQGFSALEPLVDLPIGINITRFQTLLALHRSYLTPGDSSSGWTAGAAAYYVGYLQPRTFLLKYNENGTITDAVDCALDPLSETKCTLKSFTVEKGIYQTSNFRVQPTESIVRFPNITNLCPFGEVFNATRFASVYAWNRKRISNCVADYSVLYNSASFSTFKCYGVSPTKLNDLCFTNVYADSFVIRGDEVRQIAPGQTGKIADYNYKLPDDFTGCVIAWNSNNLDSKVGGNYNYLYRLFRKSNLKPFERDISTEIYQAGSTPCNGVEGFNCYFPLQSYGFQPTNGVGYQPYRVVVLSFELLHAPATVCGPKKSTNLVKNKCVNFNFNGLTGTGVLTESNKKFLPFQQFGRDIADTTDAVRDPQTLEILDITPCSFGGVSVITPGTNTSNQVAVLYQDVNCTEVPVAIHADQLTPTWRVYSTGSNVFQTRAGCLIGAEHVNNSYECDIPIGAGICASYQTQTNSPRRARSVASQSIIAYTMSLGAENSVAYSNNSIAIPTNFTISVTTEILPVSMTKTSVDCTMYICGDSTECSNLLLQYGSFCTQLNRALTGIAVEQDKNTQEVFAQVKQIYKTPPIKDFGGFNFSQILPDPSKPSKRSFIEDLLFNKVTLADAGFIKQYGDCLGDIAARDLICAQKFNGLTVLPPLLTDEMIAQYTSALLAGTITSGWTFGAGAALQIPFAMQMAYRFNGIGVTQNVLYENQKLIANQFNSAIGKIQDSLSSTASALGKLQDVVNQNAQALNTLVKQLSSNFGAISSVLNDILSRLDKVEAEVQIDRLITGRLQSLQTYVTQQLIRAAEIRASANLAATKMSECVLGQSKRVDFCGKGYHLMSFPQSAPHGVVFLHVTYVPAQEKNFTTAPAICHDGKAHFPREGVFVSNGTHWFVTQRNFYEPQIITTDNTFVSGNCDVVIGIVNNTVYDPLQPELDSGGSGYIPEAPRDGQAYVRKDGEWVLLSTFL

SEQ ID NO: 9671 - protein, 1177 aa, Artificial Sequence
  SARS-CoV-2/Hong Kong/case85_VM20002868/2020__EPI_ISL_414519 spike protein (1-1147) Foldon construct
MFVFLVLVPLVSSQCVNLTTRTQLPPAYTNSFTRGVYYPDKVFRSSVLHSTQDLFLPFFSNVTWFHAIHVSGTNGTKRFDNPVLPFNDGVYFASTEKSNIIRGWIFGTTLDSKTQSLLIVNNATNVVIKVCEFQFCNDPFLGVYYHKNNKSWMESEFRVYSSANNCTFEYVSQPFLMDLEGKQGNFKNLREFVFKNIDGYFKIYSKHTPINLVRDLPQGFSALEPLVDLPIGINITRFQTLLALHRSYLTPGDSSSGWTAGAAAYYVGYLQPRTFLLKYNENGTITDAVDCALDPLSETKCTLKSFTVEKGIYQTSNFRVQPTESIVRFPNITNLCPFGEVFNATRFASVYAWNRKRISNCVADYSVLYNSASFSTFKCYGVSPTKLNDLCFTNVYADSFVIRGDEVRQIAPGQTGKIADYNYKLPDDFTGCVIAWNSNNLDSKVGGNYNYLYRLFRKSNLKPFERDISTEIYQAGSTPCNGVEGFNCYFPLQSYGFQPTNGVGYQPYRVVVLSFELLHAPATVCGPKKSTNLVKNKCVNFNFNGLTGTGVLTESNKKFLPFQQFGRDIADTTDAVRDPQTLEILDITPCSFGGVSVITPGTNTSNQVAVLYQDVNCTEVPVAIHADQLTPTWRVYSTGSNVFQTRAGCLIGAEHVNNSYECDIPIGAGICASYQTQTNSPRRARSVASQSIIAYTMSLGAENSVAYSNNSIAIPTNFTISVTTEILPVSMTKTSVDCTMYICGDSTECSNLLLQYGSFCTQLNRALTGIAVEQDKNTQEVFAQVKQIYKTPPIKDFGGFNFSQILPDPSKPSKRSFIEDLLFNKVTLADAGFIKQYGDCLGDIAARDLICAQKFNGLTVLPPLLTDEMIAQYTSALLAGTITSGWTFGAGAALQIPFAMQMAYRFNGIGVTQNVLYENQKLIANQFNSAIGKIQDSLSSTASALGKLQDVVNQNAQALNTLVKQLSSNFGAISSVLNDILSRLDKVEAEVQIDRLITGRLQSLQTYVTQQLIRAAEIRASANLAATKMSECVLGQSKRVDFCGKGYHLMSFPQSAPHGVVFLHVTYVPAQEKNFTTAPAICHDGKAHFPREGVFVSNGTHWFVTQRNFYEPQIITTDNTFVSGNCDVVIGIVNNTVYDPLQPELDSGGSGYIPEAPRDGQAYVRKDGEWVLLSTFL

SEQ ID NO: 9672 - protein, 1177 aa, Artificial Sequence; identical to SEQ ID NO: 9662
  SARS-CoV-2/England/200990660/2020__EPI_ISL_414523 spike protein (1-1147) Foldon construct

SEQ ID NO: 9673 - protein, 1177 aa, Artificial Sequence
  SARS-CoV-2/Australia/NSW09/2020__EPI_ISL_413595 spike protein (1-1147) Foldon construct
MFVFLVLLPLVSSQCVNLTTRTQLPPAYTNSFTRGVYYPDKVFRSSVLHSTQDLFLPFFSNVTWFHAIHVSGTNGTKRFDNPVLPFNDGVYFASTEKSNIIRGWIFGTTLDSKTQSLLIVNNATNVVIKVCEFQFCNDPFLGVYYHKNNKSWMESEFRVYSSANNCTFEYVSQPFLMDLEGKQGNFKNLREFVFKNIDGYFKIYSKHTPINLVRDLPQGFSALEPLVDLPIGINITRFQTLLALHRSYLTPGDSSSGWTAGAAAYYVGYLQPRTFLLKYNENGTITDAVDCALDPLSETKCTLKSFTVEKGIYQTSNFRVQPTESIVRFPNITNLCPFGEVFNATRFASVYAWNRKRISNCVADYSVLYNSASFSTFKCYGVSPTKLNDLCFTNVYADSFVIRGDEVRQIAPGQTGKIADYNYKLPDDFTGCVIAWNSNNLDSKVGGNYNYLYRLFRKSNLKPFERDISTEIYQAGSTPCNGVEGFNCYFPLQSYGFQPTNGVGYQPYRVVVLSFELLHAPATVCGPKKSTNLVKNKCVNFNFNGLTGTGVLTESNKKFLPFQQFGRDIADTTDAVRDPQTLEILDITPCSFGGVSVITPGTNTSNQVAVLYQDVNCTEVPVAIHADQLTPTWRVYSTGSNVFQTRAGCLIGAEHVNNSYECDIPIGAGICASYQTQTNSPRRARSVASQSIIAYTMSLGAENSVAYSNNSIAIPTNFTISVTTEILPVSMTKTSVDCTMYICGDSTECSNLLLQYGSFCTQLNRALTGIAVEQDKNTQEVFAQVKQIYKTPPIKDFGGFNFSQILPDPSKPSKRSFIEDLLFNKVTLADAGFIKQYGDCLGDIAARDLICAQKFNGLTVLPPLLTDEMIAQYTSALLAGTITSGWTFGAGAALQIPFAMQMAYRFNGIGVTQNVLYENQKLIANQFNSAIGKIQDSLSFTASALGKLQDVVNQNAQALNTLVKQLSSNFGAISSVLNDILSRLDKVEAEVQIDRLITGRLQSLQTYVTQQLIRAAEIRASANLAATKMSECVLGQSKRVDFCGKGYHLMSFPQSAPHGVVFLHVTYVPAQEKNFTTAPAICHDGKAHFPREGVFVSNGTHWFVTQRNFYEPQIITTDNTFVSGNCDVVIGIVNNTVYDPLQPELDSGGSGYIPEAPRDGQAYVRKDGEWVLLSTFL

SEQ ID NO: 9674 - protein, 1177 aa, Artificial Sequence; identical to SEQ ID NO: 9654
  SARS-CoV-2/Australia/NSW10/2020__EPI_ISL_413596 spike protein (1-1147) Foldon construct

SEQ ID NO: 9675 - protein, 1177 aa, Artificial Sequence
  SARS-CoV-2/Switzerland/1000477797/2020__EPI_ISL_413023 spike protein (1-1147) Foldon construct
MFVFLVLLPLVSSQCVNLTTRTQLPPAYTNSFTRGVYYPDKVFRSSVLHSTQDLFLPFFSNVTWFHAIHVSGTNGTKRFDNPVLPFNDGVYFASTEKSNIIRGWIFGTTLDSKTQSLLIVNNATNVVIKVCEFQFCNDPFLGVYYHKNNKSWMESEFRVYSSANNCTFEYVSQPFLMDLEGKQGNFKNLREFVFKNIDGYFNIYSKHTPINLVRDLPQGFSALEPLVDLPIGINITRFQTLLALHRSYLTPGDSSSGWTAGAAAYYVGYLQPRTFLLKYNENGTITDAVDCALDPLSETKCTLKSFTVEKGIYQTSNFRVQPTESIVRFPNITNLCPFGEVFNATRFASVYAWNRKRISNCVADYSVLYNSASFSTFKCYGVSPTKLNDLCFTNVYADSFVIRGDEVRQIAPGQTGKIADYNYKLPDDFTGCVIAWNSNNLDSKVGGNYNYLYRLFRKSNLKPFERDISTEIYQAGSTPCNGVEGFNCYFPLQSYGFQPTNGVGYQPYRVVVLSFELLHAPATVCGPKKSTNLVKNKCVNFNFNGLTGTGVLTESNKKFLPFQQFGRDIADTTDAVRDPQTLEILDITPCSFGGVSVITPGTNTSNQVAVLYQGVNCTEVPVAIHADQLTPTWRVYSTGSNVFQTRAGCLIGAEHVNNSYECDIPIGAGICASYQTQTNSPRRARSVASQSIIAYTMSLGAENSVAYSNNSIAIPTNFTISVTTEILPVSMTKTSVDCTMYICGDSTECSNLLLQYGSFCTQLNRALTGIAVEQDKNTQEVFAQVKQIYKTPPIKDFGGFNFSQILPDPSKPSKRSFIEDLLFNKVTLADAGFIKQYGDCLGDIAARDLICAQKFNGLTVLPPLLTDEMIAQYTSALLAGTITSGWTFGAGAALQIPFAMQMAYRFNGIGVTQNVLYENQKLIANQFNSAIGKIQDSLSSTASALGKLQDVVNQNAQALNTLVKQLSSNFGAISSVLNDILSRLDKVEAEVQIDRLITGRLQSLQTYVTQQLIRAAEIRASANLAATKMSECVLGQSKRVDFCGKGYHLMSFPQSAPHGVVFLHVTYVPAQEKNFTTAPAICHDGKAHFPREGVFVSNGTHWFVTQRNFYEPQIITTDNTFVSGNCDVVIGIVNNTVYDPLQPELDSGGSGYIPEAPRDGQAYVRKDGEWVLLSTFL

SEQ ID NO: 9676 - protein, 1177 aa, Artificial Sequence
  SARS-CoV-2/Belgium/BA-02291/2020__EPI_ISL_415159 spike protein (1-1147) Foldon construct
MFVFLVLLPLVSSQCVNLTTRTQLPPAYTNSFTRGVYYPDKVFRSSVLHSTQDLFLPFFSNVTWFHAIHVSGTNGTKRFDNPVLPFNDGVYFASTEKSNIIRGWIFGTTLDSKTQSLLIVNNATNVVIKVCEFQFCNDPFLGVYYHKNNKSWMESEFRVYSSANNCTFEYVSQPFLMDLEGKQGNFKNLREFVFKNIDGYFKIYSKHTPINLVRDLPQGFSALEPLVDLPIGINITRFQTLLALHRSYLTPGDSSSGWTAGAAAYYVGYLQPRTFLLKYNENGTITDAVDCALDPLSETKCTLKSFTVEKGIYQTSNFRVQPTESIVRFPNITNLCPFGEVFNATRFASVYAWNRKRISNCVADYSVLYNSASFSTFKCYGVSPTKLNDLCFTNVYADSFVIRGDEVRQIAPGQTGKIADYNYKLPDDFTGCVIAWNSNNLDSKVGGNYNYLYRLFRRSNLKPFERDISTEIYQAGSTPCNGVEGFNCYFPLQSYGFQPTNGVGYQPYRVVVLSFELLPAPATVCGPKKSTNLVKNKCVNFNFNGLTGTGVLTESNKKFLPFQQFGRDIADTTDAVRDPQTLEILDITPCSFGGVSVITPGTNTSNQVAVLYQGVNCTEVPVAIHADQLTPTWRVYSTGSNVFQTRAGCLIGAEHVNNSYECDIPIGAGICASYQTQTNSPRRARSVASQSIIAYTMSLGAENSVAYSNNSIAIPTNFTISVTTEILPVSMTKTSVDCTMYICGDSTECSNLLLQYGSFCTQLNRALTGIAVEQDKNTQEVFAQVKQIYKTPPIKDFGGFNFSQILPDPSKPSKRSFIEDLLFNKVTLADAGFIKQYGDCLGDIAARDLICAQKFNGLTVLPPLLTDEMIAQYTSALLAGTITSGWTFGAGAALQIPFAMQMAYRFNGIGVTQNVLYENQKLIANQFNSAIGKIQDSLSSAAPALGKLQDVVNQNAQALNTLVKQLSSNFGAISSVLNDILSRLDKVEAEVQIDRLITGRLQSLQTYVTQQLIRAAEIRASANLAATKMSECVLGQSKRVDFCGKGYHLMSFPQSAPHGVVFLHVTYVPAQEKNFTTAPAICHDGKAHFPREGVFVSNGTHWFVTQRNFYEPQIITTDNTFVSGNCDVVIGIVNNTVYDPLQPELDSGGSGYIPEAPRDGQAYVRKDGEWVLLSTFL

SEQ ID NO: 9677 - protein, 1177 aa, Artificial Sequence
  SARS-CoV-2/USA/WA8-UW5/2020__EPI_ISL_413486 spike protein (1-1147) Foldon construct
MFVFLVLLPLVSSQCVNLTTRTQLPPAYTNSFTRGVYYPDKVFRSSVLHSTQDLFLPFFSNVTWFHAIHVSGTNGTKRFDNPVLPFNDGVYFASTEKSNIIRGWIFGTTLDSKTQSLLIVNNATNVVIKVCEFQFCNDPFLGVYYHKNNKSWMESEFRVYSSANNCTFEYVSQPFLMDLEGKQGNFKNLREFVFKNIDGYFKIYSKHTPINLVRDLPQGFSALEPLVDLPIGINITRFQTLLALHRSYLTPGDSSSGWTAGAAAYYVGYLQPRTFLLKYNENGTITDAVDCALDPLSETKCTLKSFTVEKGIYQTSNFRVQPTESIVRFPNITNLCPFGEVFNATRFASVYAWNRKRISNCVADYSVLYNSASFSTFKCYGVSPTKLNDLCFTNVYADSFVIRGDEVRQIAPGQTGKIADYNYKLPDDFTGCVIAWNSNNLDSKVGGNYNYLYRLFRKSNLKPFERDISTEIYQAGSTPCNGVEGFNCYFPLQSYGFQPTNGVGYQPYRVVVLSFELLHAPATVCGPKKSTNLVKNKCVNFNFNGLTGTGVLTESNKKFLPFQQFGRDIADTTDAVRDPQTLEILDITPCSFGGVSVITPGTNTSNQVAVLYQDVNCTEVPVAIHADQLTPTWRVYSTGSNVFQTRAGCLIGAEYVNNSYECDIPIGAGICASYQTQTNSPRRARSVASQSIIAYTMSLGAENSVAYSNNSIAIPTNFTISVTTEILPVSMTKTSVDCTMYICGDSTECSNLLLQYGSFCTQLNRALTGIAVEQDKNTQEVFAQVKQIYKTPPIKDFGGFNFSQILPDPSKPSKRSFIEDLLFNKVTLADAGFIKQYGDCLGDIAARDLICAQKFNGLTVLPPLLTDEMIAQYTSALLAGTITSGWTFGAGAALQIPFAMQMAYRFNGIGVTQNVLYENQKLIANQFNSAIGKIQDSLSSTASALGKLQDVVNQNAQALNTLVKQLSSNFGAISSVLNDILSRLDKVEAEVQIDRLITGRLQSLQTYVTQQLIRAAEIRASANLAATKMSECVLGQSKRVDFCGKGYHLMSFPQSAPHGVVFLHVTYVPAQEKNFTTAPAICHDGKAHFPREGVFVSNGTHWFVTQRNFYEPQIITTDNTFVSGNCDVVIGIVNNTVYDPLQPELDSGGSGYIPEAPRDGQAYVRKDGEWVLLSTFL

SEQ ID NO: 9678 - protein, 1177 aa, Artificial Sequence
  SARS-CoV-2/England/20102000506/2020__EPI_ISL_415147 spike protein (1-1147) Foldon construct
MFVFLVLLPLVSSQCVNLTTRTQLPPAYTNSFTRGVYYPDKVFRSSVLHSTQDLFLPFFSNVTWFHAIHVSGTNGTKRFDNPVLPFNDGVYFASTEKSNIIRGWIFGTTLDSKTQSLLIVNNATNVVIKVCEFQFCNDPFLGVYYHKNNKSWMESEFRVYSSANNCTFEYVSQPFLMDLEGKQGNFKNLREFVFKNIDGYFKIYSKHTPINLVRDLPQGFSALEPLVDLPIGINITRFQTLLALHRSYLTPGDSSSGWTAGAAAYYVGYLQPRTFLLKYNENGTITDAVDCALDPLSETKCTLKSFTVEKGIYQTSNFRVQPTESIVRFPNITNLCPFGEVFNATRFASVYAWNRKRISNCVADYSVLYNSASFSTFKCYGVSPTKLNDLCFTNVYADSFVIRGDEVRQIAPGQTGKIADYNYKLPDDFTGCVIAWNSNNLDSKVGGNYNYLYRLFRKSNLKPFERDISTEIYQAGSTPCNGVEGFNCYFPLQSYGFQPTNGVGYQPYRVVVLSFELLHAPATVCGPKKSTNLVKNKCVNFNFNGLTGTGVLTESNKKFLPFQQFGRDIADTTDAVRDPQTLEILDITPCSFGGVSVITPGTNTSNQVAVLYQGVNCTEVPVAIHADQLTPTWRVYSTGSNVFQTRAGCLIGAEHVNNSYECDIPIGAGICASYQTQTNSPRRARSVASQSIIAYTMSLGAENSVAYSNNSIAIPTNFTISVTTEILPVSMTKTSVDCTMYICGDSTECSNLLLQYGSFCTQLNRALTGIAVEQDKNTQEVFAQVKQIYKTPPIKDFGGFNFSQILPDPSKPSKRSFIEDLLFNKVTLADAGFIKQYGYCLGDIAARDLICAQKFNGLTVLPPLLTDEMIAQYTSALLAGTITSGWTFGAGAALQIPFAMQMAYRFNGIGVTQNVLYENQKLIANQFNSAIGKIQDSLSSTASALGKLQDVVNQNAQALNTLVKQLSSNFGAISSVLNDILSRLDKVEAEVQIDRLITGRLQSLQTYVTQQLIRAAEIRASANLAATKMSECVLGQSKRVDFCGKGYHLMSFPQSAPHGVVFLHVTYVPAQEKNFTTAPAICHDGKAHFPREGVFVSNGTHWFVTQRNFYEPQIITTDNTFVSGNCDVVIGIVNNTVYDPLQPELDSGGSGYIPEAPRDGQAYVRKDGEWVLLSTFL

SEQ ID NO: 9679 - protein, 1177 aa, Artificial Sequence
  SARS-CoV-2/Belgium/VAG-03013/2020__EPI_ISL_415155 spike protein (1-1147) Foldon construct
MFVFLVLLPLVSSQCVNLTTRTQLPPAYTNSFTRGVYYPDKVFRSSVLHSTQDLFLPFFSNVTWFHAIHVSGTNGTKRFDNPVLPFNDGVYFASTEKSNIIRGWIFGTTLDSKTQSLLIVNNATNVVIKVCEFQFCNDPFLGVYYHKNNKSWMESEFRVYSSANNCTFEYVSQPFLMDLEGKQGNFKNLREFVFKNIDGYFKIYSKHTPINLVRDLPQGFSALEPLVDLPIGINITRFQTLLALHRSYLTPGDSSSGWTAGAAAYYVGYLQPRTFLLKYNENGTITDAVDCALDPLSETKCTLKSFTVEKGIYQTSNFRVQPTESIVRFPNITNLCPFGEVFNATRFASVYAWNRKRISNCVADYSVLYNSASFSTFKCYGVSPTKLNDLCFTNVYADSFVIRGDEVRQIAPGQTGKIADYNYKLPDDFTGCVIAWNSNNLDSKVGGNYNYLYRLFRKSNLKPFERDISTEIYQAGSTPCNGVEGFNCYFPLQSYGFQPTNGVGYQPYRVVVLSFELLHAPATVCGPKKSTNLVKNKCVNFNFNGLTGTGVLTESNKKFLPFQQFGRDIADTTDAVRDPQTLEILDITPCSFGGVSVITPGTNTSNQVAVLYQGVNCTEVPVAIHADQLTPTWRVYSTGSNVFQTRAGCLIGAEHVNNSYECDIPIGAGICASYQTQTNSPRRARSVASQSIIAYTMSLGAENSVAYSNNSIAIPTNFTISVTTEILPVSMTKTSVDCTMYICGDSTECSNLLLQYGSFCTQLNRALTGIAVEQDKNTQEVFAQVKQIYKTPPIKDFGGFNFSQILPDPSKPSKRSFIEDLLFNKVTLADAGFIKQYGDCLGDIAARDLICAQKFNGLTVLPPLLTDEMIAQYTSALLAGTITSGWTFGAGAALQIPFAMQMAYRFNGIGVTQNVLYENQKLIANQFNSAIGKIQDSLSSTATALGKLQDVVNQNAQALNTLVKQLSSNFGAISSVLNDILSRLDKVEAEVQIDRLITGRLQSLQTYVTQQLIRAAEIRASANLAATKMSECVLGQSKRVDFCGKGYHLMSFPQSAPHGVVFLHVTYVPAQEKNFTTAPAICHDGKAHFPREGVFVSNGTHWFVTQRNFYEPQIITTDNTFVSGNCDVVIGIVNNTVYDPLQPELDSGGSGYIPEAPRDGQAYVRKDGEWVLLSTFL

SEQ ID NO: 9680 - protein, 1177 aa, Artificial Sequence
  SARS-CoV-2/Belgium/BC-03016/2020__EPI_ISL_415157 spike protein (1-1147) Foldon construct
MFVFLVLLPLVSSQCVNLTTRTQLPPAYTNSFTRGVYYPDKVFRSSVLHSTQDLFLPFFSNVTWFHAIHVSGTNGTKRFDNPVLPFNDGVYFASTEKSNIIRGWIFGTTLDSKTQSLLIVNNATNVVIKVCEFQFCNDPFLGVYYHKNNKSWMESEFRVYSSANNCTFEYVSQPFLMDLEGKQGNFKNLREFVFKNIDGYFKIYSKHTPINLVRDLPQGFSALEPLVDLPIGINITRFQTLLALHRSYLTPGDSSSGWTAGAAAYYVGYLQPRTFLLKYNENGTITDAVDCALDPLSETKCTLKSFTVEKGIYQTSNFRVQPTESIVRFPNITNLCPFGEVFNATRFASVYAWNRKRISNCVADYSVLYNSASFSTFKCYGVSPTKLNDLCFTNVYADSFVIRGDEVRQIAPGQTGKIADYNYKLPDDFTGCVIAWNSNNLDSKVGGNYNYLYRLFRKSNLKPFERDISTEIYQAGSTPCNGVEGFNCYFPLQSYGFQPTNGVGYQPYRVVVLSFELLHAPATVCGPKKSTNLVKNKCVNFNFNGLTGTGVLTESNKKFLPFQQFGRDIADTTDAVRDPQTLEILDITPCSFGGVSVITPGTNTSNQVAVLYQGVNCTEVPVAIHADQLTPTWRVYSTGSNVFQTRAGCLIGAEHVNNSYECDIPIGAGICASYQTQTNSPRRARSVASQSIIAYTMSLGAENSVAYSNNSIAIPTNFTISVTTEILPVSMTKTSVDCTMYICGDSTECSNLLLQYGSFCTQLNRALTGIAVEQDKNTQEVFAQVKQIYKTPPIKDFGGFNFSQILPDPSKPSKRSFIEDLLFNKVTLADAGFIKQYGDCLGDIAARDLICAQKFNGLTVLPPLLTDEMIAQYTSALLAGTITSGWTFGAGAALQIPFAMQMAYRFNGIGVTQNVLYENQKLIANQFNSAIGKIQDSLSSTAPALGKLQDVVNQNAQALNTLVKQLSSNFGAISSVLNDILSRLDKVEAEVQIDRLITGRLQSLQTYVTQQLIRAAEIRASANLAATKMSECVLGQSKRVDFCGKGYHLMSFPQSAPHGVVFLHVTYVPAQEKNFTTAPAICHDGKAHFPREGVFVSNGTHWFVTQRNFYEPQIITTDNTFVSGNCDVVIGIVNNTVYDPLQPELDSGGSGYIPEAPRDGQAYVRKDGEWVLLSTFL

SEQ ID NO: 9681 - protein, 1177 aa, Artificial Sequence
  SARS-CoV-2/Germany/BavPat3/2020__EPI_ISL_414521 spike protein (1-1147) Foldon construct
MFVFLVLLPLVSSQCVNLTTRTQLPPAYTNSFTRGVYYPDKVFRSSVLHSTQDLFLPFFSNVTWFHAIHVSGTNGTKRFDNPVLPFNDGVYFASTEKSNIIRGWIFGTTLDSKTQSLLIVNNATNVVIKVCEFQFCNDPFLGVYYHKNNKSWMESEFRVYSSANNCTFEYVSQPFLMDLEGKQGNFKNLREFVFKNIDGYFKIYSKHTPINLVRDLPQGFSALEPLVDLPIGINITRFQTLLALHRSYLTPGDSSSGWTAGAAAYYVGYLQPRTFLLKYNENGTITDAVDCALDPLSETKCTLKSFTVEKGIYQTSNFRVQPTESIVRFPNITNLCPFGEVFNATRFASVYAWNRKRISNCVADYSVLYNSASFSTFKCYGVSPTKLNDLCFTNVYADSFVIRGDEVRQIAPGQTGKIADYNYKLPDDFTGCVIAWNSNNLDSKVGGNYNYLYRLFRKSNLKPFERDISTEIYQAGSTPCNGVEGFNCYFPLQSYGFQPTNGVGYQPYRVVVLSFELLHAPATVCGPKKSTNLVKNKCVNFNFNGLTGTGVLTESNKKFLPFQQFGRDIADTTDAVRDPQTLEILDITPCSFGGVSVITPGTNTSNQVAVLYQDVNCTEVPVAIHADQLTPTWRVYSTGSNVFQTRAGCLIGAEHVNNSYECDIPIGAGICASYQTQTNSPRRARSVASQSIIAYTMSLGAENSVAYSNNSIAIPTNFTISVTTEILPVSMTKTSVDCTMYICGDSTECSNLLLQYGSFCTQLNRALTGIAVEQDKNTQQVFAQVKQIYKTPPIKDFGGFNFSQILPDPSKPSKRSFIEDLLFNKVTLADAGFIKQYGDCLGDIAARDLICAQKFNGLTVLPPLLTDEMIAQYTSALLAGTITSGWTFGAGAALQIPFAMQMAYRFNGIGVTQNVLYENQKLIANQFNSAIGKIQDSLSSTASALGKLQDVVNQNAQALNTLVKQLSSNFGAISSVLNDILSRLDKVEAEVQIDRLITGRLQSLQTYVTQQLIRAAEIRASANLAATKMSECVLGQSKRVDFCGKGYHLMSFPQSAPHGVVFLHVTYVPAQEKNFTTAPAICHDGKAHFPREGVFVSNGTHWFVTQRNFYEPQIITTDNTFVSGNCDVVIGIVNNTVYDPLQPELDSGGSGYIPEAPRDGQAYVRKDGEWVLLSTFL

SEQ ID NO: 9682 - protein, 1177 aa, Artificial Sequence
  SARS-CoV-2/France/HF1805/2020__EPI_ISL_414628 spike protein (1-1147) Foldon construct
MFVFLVLLPLVSSQCVNLTTRTQLPPAYTNSFTRGVYYPDKVFRSSVLHSTQDLFLPFFSNVTWFHAIHVSGTNGTKRFDNPVLPFNDGVYFASTEKSNIIRGWIFGTTLDSKTQSLLIVNNATNVVIKVCEFQFCNDPFLGVYYHKNNKSWMESEFRVYSSANNCTFEYVSQPFLMDLEGKQGNFKNLREFVFKNIDGYFKIYSKHTPINLVRDLPQGFSALEPLVDLPIGINITRFQTLLALHRSYLTPGDSSSGWTAGAAAYYVGYLQPRTFLLKYNENGTITDAVDCALDPLSETKCTLKSFTVEKGIYQTSNFRVQPTESIVRFPNITNLCPFGEVFNATRFASVYAWNRKRISNCVADYSVLYNSASFSTFKCYGVSPTKLNDLCFTNVYADSFVIRGDEVRQIAPGQTGKIADYNYKLPDDFTGCVIAWNSNNLDSKVGGNYNYLYRLFRKSNLKPFERDISTEIYQAGSTPCNGVEGFNCYFPLQSYGFQPTNGVGYQPYRVVVLSFELLHAPATVCGPKKSTNLVKNKCVNFNFNGLTGTGVLTESNKKFLPFQQFGRDIADTTDAVRDPQTLEILDITPCSFGGVSVITPGTNTSNQVAVLYQGVNCTEVPVAIHADQLTPTWRVYSTGSNVFQTRAGCLIGAEHVNNSYECDIPIGAGICASYQTQTNSPRRARSVASQSIIAYTMSLGAENSVAYSNNSIAIPTNFTISVTTEILPVSMTKTSVDCTMYICGDSTECSNLLLQYGSFCTQLNRALTGIAVEQDKNTQEVFAQVKQIYKTPPIKDFGGFNFSQILPDPSKPSKRSFIEDLLFNKVTLADAGFIKQYGDCLGDIAARDLICAQKFNGLTVLPPLLTDEMIAQYTSALLAGTITSGWTFGAGAALQIPFAMQMAYRFNGIGVTQNVLYENQKLIANQFNSAIGKIQDSLSSTASALGKLQDVVNQNAQALNTLVKQLSSNFGAISSVLNDILSRLDKVEAEVQIDRLITGRLQSLQTYVTQQLIRAAEIRASANLAATKMSECVLGQSKRVDFCGKGYHLMSFPQSAPHGVVFLHVTYVPAQEKNFTTAPAICHDGKAHFPREGVFVSNGTHWFVTQRNFYEPQIITTDNTFVSGNCDVVIGVVNNTVYDPLQPELDSGGSGYIPEAPRDGQAYVRKDGEWVLLSTFL

SEQ ID NO: 9683 - protein, 1177 aa, Artificial Sequence
  SARS-CoV-2/Netherlands/ZuidHolland_9/2020__EPI_ISL_414445 spike protein (1-1147) Foldon construct
MFVFLVLLPLVSSQCVNLTTRTQLPPAYTNSFTRGVYYPDKVFRSSVLHSTQDLFLPFFSNVTWFHAIHVSGTNGTKRFDNPVLPFNDGVYFASTEKSNIIRGWIFGTTLDSKTQSLLIVNNATNVVIKVCEFQFCNDPFLGVYYHKNNKSWMESEFRVYSSANNCTFEYVSQPFLMDLEGKQGNFKNLREFVFKNIDGYFKIYSKHTPINLVRDLPQGFSALEPLVDLPIGINITRFQTLLALHRSYLTPGDSSSGWTAGAAAYYVGYLQPRTFLLKYNENGTITDAVDCALDPLSETKCTLKSFTVEKGIYQTSNFRVQPTESIVRFPNITNLCPFGEVFNATRFASVYAWNRKRISNCVADYSVLYNSASFSTFKCYGVSPTKLNDLCFTNVYADSFVIRGDEVRQIAPGQTGKIADYNYKLPDDFTGCVIAWNSNNLDSKVGGNYNYLYRLFRKSNLKPFERDISTEIYQAGSTPCNGVEGFNCYFPLQSYGFQPTNGVGYQPYRVVVLSFELLHAPATVCGPKKSTNLVKNKCVNFNFNGLTGTGVLTESNKKFLPFQQFGRDIADTTDAVRDPQTLEILDITPCSFGGVSVITPGTNTSNQVAVLYQGVNCTEVPVAIHADQLTPTWRVYSTGSNVFQTRAGCLIGAEHVNNSYECDIPIGAGICASYQTQTNSPRRARSVASQSIIAYTMSLGAENSVAYSNNSIAIPTNFTISVTTEILPVSMTKTSVDCTMYICGDSTECSNLLLQYGSFCTQLNRALTGIAVEQDKNTQEVFAQVKQIYKTPPIKDFGGFNFSQILPDPSKPSKRSFIEDLLFNKVTLADAGFIKQYGDCLGDIAARDLICVQKFNGLTVLPPLLTDEMIAQYTSALLAGTITSGWTFGAGAALQIPFAMQMAYRFNGIGVTQNVLYENQKLIANQFNSAIGKIQDSLSSTASALGKLQDVVNQNAQALNTLVKQLSSNFGAISSVLNDILSRLDKVEAEVQIDRLITGRLQSLQTYVTQQLIRAAEIRASANLAATKMSECVLGQSKRVDFCGKGYHLMSFPQSAPHGVVFLHVTYVPAQEKNFTTAPAICHDGKAHFPREGVFVSNGTHWFVTQRNFYEPQIITTDNTFVSGNCDVVIGIVNNTVYDPLQPELDSGGSGYIPEAPRDGQAYVRKDGEWVLLSTFL

SEQ ID NO: 9684 - protein, 1177 aa, Artificial Sequence
  SARS-CoV-2/Finland/FIN03032020A/2020__EPI_ISL_413602 spike protein (1-1147) Foldon construct
MFVFLVLLPLVSSQCVNLTTRTQLPPAYTNSFTRGVYYPDKVFRSSVLHSTQDLFLPFFSNVTWFHAIHVSGTNGTKRFDNPVLPFNDGVYFASTEKSNIIRGWIFGTTLDSKTQSLLIVNNATNVVIKVCEFQFCNDPFLGVYYHKNNKSWMESEFRVYSSANNCTFEYVSQPFLMDLEGKQGNFKNLREFVFKNIDGYFKIYSKHTPINLVRDLPQGFSALEPLVDLPIGINITRFQTLLALHRSYLTPGDSSSGWTAGAAAYYVGYLQPRTFLLKYNENGTITDAVDCALDPLSETKCTLKSFTVEKGIYQTSNFRVQPTESIVRFPNITNLCPFGEVFNATRFASVYAWNRKRISNCVADYSVLYNSASFSTFKCYGVSPTKLNDLCFTNVYADSFVIRGDEVRQIAPGQTGKIADYNYKLPDDFTGCVISWNSNNLDSKVGGNYNYLYRLFRKSNLKPFERDISTEIYQAGSTPCNGVEGFNCYFPLQSYGFQPTNGVGYQPYRVVVLSFELLHAPATVCGPKKSTNLVKNKCVNFNFNGLTGTGVLTESNKKFLPFQQFGRDIADTTDAVRDPQTLEILDITPCSFGGVSVITPGTNTSNQVAVLYQGVNCTEVPVAIHADQLTPTWRVYSTGSNVFQTRAGCLIGAEHVNNSYECDIPIGAGICASYQTQTNSPRRARSVASQSIIAYTMSLGAENSVAYSNNSIAIPTNFTISVTTEILPVSMTKTSVDCTMYICGDSTECSNLLLQYGSFCTQLNRALTGIAVEQDKNTQEVFAQVKQIYKTPPIKDFGGFNFSQILPDPSKPSKRSFIEDLLFNKVTLADAGFIKQYGDCLGDIAARDLICAQKFNGLTVLPPLLTDEMIAQYTSALLAGTITSGWTFGAGAALQIPFAMQMAYRFNGIGVTQNVLYENQKLIANQFNSAIGKIQDSLSSTASALGKLQDVVNQNAQALNTLVKQLSSNFGAISSVLNDILSRLDKVEAEVQIDRLITGRLQSLQTYVTQQLIRAAEIRASANLAATKMSECVLGQSKRVDFCGKGYHLMSFPQSAPHGVVFLHVTYVPAQEKNFTTAPAICHDGKAHFPREGVFVSNGTHWFVTQRNFYEPQIITTDNTFVSGNCDVVIGIVNNTVYDPLQPELDSGGSGYIPEAPRDGQAYVRKDGEWVLLSTFL

SEQ ID NO: 9685 - protein, 1177 aa, Artificial Sequence
  SARS-CoV-2/France/GE1977/2020__EPI_ISL_414632 spike protein (1-1147) Foldon construct
MFVFLVLLPLVSSQCVNLTTRTQLPPAYTNSFTRGVYYPDKVFRSSVLHSTQDLFLPFFSNVTWFHAIHVSGTNGTKRFDNPVLPFNDGVYFASTEKSNIIRGWIFGTTLDSKTQSLLIVNNATNVVIKVCEFQFCNDPFLGVYYHKNNKSWMESEFRVYSSANNCTFEYVSQPFLMDLEGKQGNFKNLREFVFKNIDGYFKIYSKHTPINLVRDLPQGFSALEPLVDLPIGINITRFQTLLALHRSYLTPGDSSSGWTAGAAAYYVGYLQPRTFLLKYNENGTITDAVDCALDPLSETKCTLKSFTVEKGIYQTSNFRVQPTESIVRFPNITNLCPFGEVFNATRFASVYAWNRKRISNCVADYSVLYNSASFSTFKCYGVSPTKLNDLCFTNVYADSFVIRGDEVRQIAPGQTGKIADYNYKLPDDFTGCVIAWNSNNLDSKVGGNYNYLYRLFRKSNLKPFERDISTEIYQAGSTPCNGVEGFNCYFPLQSYGFQPTNGVGYQPYRVVVLSFELLHAPATVCGPKKSTNLVKNKCVNFNFNGLTGTGVLTESNKKFLPFQQFGRDIADTTDAVRDPQTLEILDITPCSFGGVSVITPGTNTSNQVAVLYQGVNCTEVPVAIHADQLTPTWRVYSTGSNVFQTRAGCLIGAEHVNNSYECDIPIGAGICASYQTQTNSPRRARSVASQSIIAYTMSLGAENSVAYSNNSIAIPTNFTISVTTEILPVSMTKTSVDCTMYICGDSTECSNLLLQYGSFCTQLNRALTGIAVEQDKNTQEVFAQVKQIYKTPPIKDFGGFNFSQILPDPSKPSKRSFIEDLLFNKVTLADAGFIKQYGDCLGDIAARDLICAQKFNGLTVLPPLLTDEMIAQYTSALLAGTITSGWTFGAGAALQIPFAMQMAYRFNGIGVTQNVLYENQKLIANQFNSAIGKIQDSLFSTASALGKLQDVVNQNAQALNTLVKQLSSNFGAISSVLNDILSRLDKVEAEVQIDRLITGRLQSLQTYVTQQLIRAAEIRASANLAATKMSECVLGQSKRVDFCGKGYHLMSFPQSAPHGVVFLHVTYVPAQEKNFTTAPAICHDGKAHFPREGVFVSNGTHWFVTQRNFYEPQIITTDNTFVSGNCDVVIGIVNNTVYDPLQPELDSGGSGYIPEAPRDGQAYVRKDGEWVLLSTFL

SEQ ID NO: 9686 - protein, 1177 aa, Artificial Sequence
  SARS-CoV-2/Finland/FIN-313/2020__EPI_ISL_414641 spike protein (1-1147) Foldon construct
MFVFLVLLPLVSSQCVNLTTRTQLPPAYTNSFTRGVYYPDKVFRSSVLHSTQDLFLPFFSNVTWFHAIHVSGTNGTKRFDNPVLPFNDGVYFASTEKSNIIRGWIFGTTLDSKTQSLLIVNNATNVVIKVCEFQFCNDPFLGVYYHKNNKSWMESEFRVYSSANNCTFEYVSQPFLMDLEGKQGNFKNLREFVFKNIDGYFKIYSKHTPINLVRDLPQGFSALEPLVDLPIGINITRFKTLLALHRSYLTPGDSSSGWTAGAAAYYVGYLQPRTFLLKYNENGTITDAVDCALDPLSETKCTLKSFTVEKGIYQTSNFRVQPTESIVRFPNITNLCPFGEVFNATRFASVYAWNRKRISNCVADYSVLYNSASFSTFKCYGVSPTKLNDLCFTNVYADSFVIRGDEVRQIAPGQTGKIADYNYKLPDDFTGCVIAWNSNNLDSKVGGNYNYLYRLFRKSNLKPFERDISTEIYQAGSTPCNGVEGFNCYFPLQSYGFQPTNGVGYQPYRVVVLSFELLHAPATVCGPKKSTNLVKNKCVNFNFNGLTGTGVLTESNKKFLPFQQFGRDIADTTDAVRDPQTLEILDITPCSFGGVSVITPGTNTSNQVAVLYQGVNCTEVPVAIHADQLTPTWRVYSTGSNVFQTRAGCLIGAEHVNNSYECDIPIGAGICASYQTQTNSPRRARSVASQSIIAYTMSLGAENSVAYSNNSIAIPTNFTISVTTEILPVSMTKTSVDCTMYICGDSTECSNLLLQYGSFCTQLNRALTGIAVEQDKNTQEVFAQVKQIYKTPPIKDFGGFNFSQILPDPSKPSKRSFIEDLLFNKVTLADAGFIKQYGDCLGDIAARDLICAQKFNGLTVLPPLLTDEMIAQYTSALLAGTITSGWTFGAGAALQIPFAMQMAYRFNGIGVTQNVLYENQKLIANQFNSAIGKIQDSLSSTASALGKLQDVVNQNAQALNTLVKQLSSNFGAISSVLNDILSRLDKVEAEVQIDRLITGRLQSLQTYVTQQLIRAAEIRASANLAATKMSECVLGQSKRVDFCGKGYHLMSFPQSAPHGVVFLHVTYVPAQEKNFTTAPAICHDGKAHFPREGVFVSNGTHWFVTQRNFYEPQIITTDNTFVSGNCDVVIGIVNNTVYDPLQPELDSGGSGYIPEAPRDGQAYVRKDGEWVLLSTFL

SEQ ID NO: 9687 - protein, 1177 aa, Artificial Sequence
  SARS-CoV-2/Netherlands/ZuidHolland_2/2020__EPI_ISL_414556 spike protein (1-1147) Foldon construct
MFVFLVLLPLVSSQCVNLTTRTQLPPAYTNSFTRGVYYPDKVFRSSVLHSTQDLFLPFFSNVTWFHAIHVSGTNGTKRFDNPVLPFNDGVYFASTEKSNIIRGWIFGTTLDSKTQSLLIVNNATNVVIKVCEFQFCNDPFLGVYYHKNNKSWMESEFRVYSSANNCTFEYVSQPFLMDLEGKQGNFKNLREFVFKNIDGYFKIYSKHTPINLVRDLPQGFSALEPLVDLPIGINITRFQTLLALHRSYLTPGDSSSGWTAGAAAYYVGYLQPRTFLLKYNENGTITDAVDCALDPLSETKCTLKSFTVEKGIYQTSNFRVQPTESIVRFPNITNLCPFGEVFNATRFASVYAWNRKRISNCVADYSVLYNSASFSTFKCYGVSPTKLNDLCFTNVYADSFVIRGDEVRQIAPGQTGKIADYNYKLPDDFTGCVIAWNSNNLDSKVGGNYNYLYRLFRKSNLKPFERDISTEIYQAGSTPCNGVEGFNCYFPLQSYGFQPTNGVGYQPYRVVVLSFELLHAPATVCGPKKSTNLVKNKCVNFNFNGLTGTGVLTESNKKFLPFQQFGRDIADTTDAVRDPQTLEILDITPCSFGGVSVITPGTNTSNQVAVLYQGVNCTEVPVAIHADQLTPTWRVYSTGSNVFQTRAGCLIGAEHVNNSYECDIPIGAGICASYQTQTNSPRRARSVASQSIIAYTMSLGAENSVAYSNNSIAIPTNFTISVTTEILPVSMTKTSVDCTMYICGDSTECSNLLLQYGSFCTQLNRALTGIALEQDKNTQEVFAQVKQIYKTPPIKDFGGFNFSQILPDPSKPSKRSFIEDLLFNKVTLADAGFIKQYGDCLGDIAARDLICAQKFNGLTVLPPLLTDEMIAQYTSALLAGTITSGWTFGAGAALQIPFAMQMAYRFNGIGVTQNVLYENQKLIANQFNSAIGKIQDSLSSTASALGKLQDVVNQNAQALNTLVKQLSSNFGAISSVLNDILSRLDKVEAEVQIDRLITGRLQSLQTYVTQQLIRAAEIRASANLAATKMSECVLGQSKRVDFCGKGYHLMSFPQSAPHGVVFLHVTYVPAQEKNFTTAPAICHDGKAHFPREGVFVSNGTHWFVTQRNFYEPQIITTDNTFVSGNCDVVIGIVNNTVYDPLQPELDSGGSGYIPEAPRDGQAYVRKDGEWVLLSTFL

SEQ ID NO: 9688 - protein, 1177 aa, Artificial Sequence
  SARS-CoV-2/USA/WA-UW31/2020__EPI_ISL_414618 spike protein (1-1147) Foldon construct
MFVFLVLLPLVSSQCVNLTTRTQLPPAYTNSFTRGVYYPDKVFRSSVLHSTQDLFLPFFSNVTWFHAIHVSGTNGTKRFDNPVLPFNDGVYFASTEKSNIIRGWIFGTTLDSKTQSLLIVNNATNVVIKVCEFQFCNDPFLGVYYHKNNKSWMESEFRVYSSANNCTFEYVSQPFLMDLEGKQGNFKNLREFVFKNIDGYFKIYSKHTPINLVRDLPQGFSALEPLVDLPIGINITRFQTLLALHRSYLTPGDSSSGWTAGAAAYYVGYLQPRTFLLKYNENGTITDAVDCALDPLSETKCTLKSFTVEKGIYQTSNFRVQPTESIVRFPNITNLCPFGEVFNATRFASVYAWNRKRISNCVADYSVLYNSASFSTFKCYGVSPTKLNDLCFTNVYADSFVIRGDEVRQIAPGQTGKIADYNYKLPDDFTGCVIAWNSNNLDSKVGGNYNYLYRLFRKSNLKPFERDISTEIYQAGSTPCNGAEGFNCYFPLQSYGFQPTNGVGYQPYRVVVLSFELLHAPATVCGPKKSTNLVKNKCVNFNFNGLTGTGVLTESNKKFLPFQQFGRDIADTTDAVRDPQTLEILDITPCSFGGVSVITPGTNTSNQVAVLYQDVNCTEVPVAIHADQLTPTWRVYSTGSNVFQTRAGCLIGAEHVNNSYECDIPIGAGICASYQTQTNSPRRARSVASQSIIAYTMSLGAENSVAYSNNSIAIPTNFTISVTTEILPVSMTKTSVDCTMYICGDSTECSNLLLQYGSFCTQLNRALTGIAVEQDKNTQEVFAQVKQIYKTPPIKDFGGFNFSQILPDPSKPSKRSFIEDLLFNKVTLADAGFIKQYGDCLGDIAARDLICAQKFNGLTVLPPLLTDEMIAQYTSALLAGTITSGWTFGAGAALQIPFAMQMAYRFNGIGVTQNVLYENQKLIANQFNSAIGKIQDSLSSTASALGKLQDVVNQNAQALNTLVKQLSSNFGAISSVLNDILSRLDKVEAEVQIDRLITGRLQSLQTYVTQQLIRAAEIRASANLAATKMSECVLGQSKRVDFCGKGYHLMSFPQSAPHGVVFLHVTYVPAQEKNFTTAPAICHDGKAHFPREGVFVSNGTHWFVTQRNFYEPQIITTDNTFVSGNCDVVIGIVNNTVYDPLQPELDSGGSGYIPEAPRDGQAYVRKDGEWVLLSTFL

SEQ ID NO: 9689 - protein, 1177 aa, Artificial Sequence
  SARS-CoV-2/South Korea/SNU01/2020__EPI_ISL_411929 spike protein (1-1147) Foldon construct
MFVFLVLLPLVSSQCVNLTTRTQLPPAYTNSFTRGVYYPDKVFRSSVLHSTQDLFLPFFSNVTWFHAIHVSGTNGTKRFDNPVLPFNDGVYFASTEKSNIIRGWIFGTTLDSKTQSLLIVNNATNVVIKVCEFQFCNDPFLGVYYHKNNKSWMESEFRVYSSANNCTFEYVSQPFLMDLEGKQGNFKNLREFVFKNIDGYFKIYSKHTPINLVRDLPQGFWALEPLVDLPIGINITRFQTLLALHRSYLTPGDSSSGWTAGAAAYYVGYLQPRTFLLKYNENGTITDAVDCALDPLSETKCTLKSFTVEKGIYQTSNFRVQPTESIVRFPNITNLCPFGEVFNATRFASVYAWNRKRISNCVADYSVLYNSASFSTFKCYGVSPTKLNDLCFTNVYADSFVIRGDEVRQIAPGQTGKIADYNYKLPDDFTGCVIAWNSNNLDSKVGGNYNYLYRLFRKSNLKPFERDISTEIYQAGSTPCNGVEGFNCYFPLQSYGFQPTNGVGYQPYRVVVLSFELLHAPATVCGPKKSTNLVKNKCVNFNFNGLTGTGVLTESNKKFLPFQQFGRDIADTTDAVRDPQTLEILDITPCSFGGVSVITPGTNTSNQVAVLYQDVNCTEVPVAIHADQLTPTWRVYSTGSNVFQTRAGCLIGAEHVNNSYECDIPIGAGICASYQTQTNSPRRARSVASQSIIAYTMSLGAENSVAYSNNSIAIPTNFTISVTTEILPVSMTKTSVDCTMYICGDSTECSNLLLQYGSFCTQLNRALTGIAVEQDKNTQEVFAQVKQIYKTPPIKDFGGFNFSQILPDPSKPSKRSFIEDLLFNKVTLADAGFIKQYGDCLGDIAARDLICAQKFNGLTVLPPLLTDEMIAQYTSALLAGTITSGWTFGAGAALQIPFAMQMAYRFNGIGVTQNVLYENQKLIANQFNSAIGKIQDSLSSTASALGKLQDVVNQNAQALNTLVKQLSSNFGAISSVLNDILSRLDKVEAEVQIDRLITGRLQSLQTYVTQQLIRAAEIRASANLAATKMSECVLGQSKRVDFCGKGYHLMSFPQSAPHGVVFLHVTYVPAQEKNFTTAPAICHDGKAHFPREGVFVSNGTHWFVTQRNFYEPQIITTDNTFVSGNCDVVIGIVNNTVYDPLQPELDSGGSGYIPEAPRDGQAYVRKDGEWVLLSTFL

SEQ ID NO: 9690 - protein, 1177 aa, Artificial Sequence
  SARS-CoV-2/China/WF0004/2020__EPI_ISL_413694 spike protein (1-1147) Foldon construct
MFVFLVLLPLVSSQCVNLTTRTQLPPAYTNSFTRGVYYPDKVFRSSVLHSTQDLFLPFFSNVTWFHAIHVSGTNGTKRFDNPVLPFNDGVYFASTEKSNIIRGWIFGTTLDSKTQSLLIVNNATNVVIKVCEFQFCNDPFLGVYYHKNNKSWTESEFRVYSSANNCTFEYVSQPFLMDLEGKQGNFKNLREFVFKNIDGYFKIYSKHTPINLVRDLPQGFSALEPLVDLPIGINITRFQTLLALHRSYLTPGDSSSGWTAGAAAYYVGYLQPRTFLLKYNENGTITDAVDCALDPLSETKCTLKSFTVEKGIYQTSNFRVQPTESIVRFPNITNLCPFGEVFNATRFASVYAWNRKRISNCVADYSVLYNSASFSTFKCYGVSPTKLNDLCFTNVYADSFVIRGDEVRQIAPGQTGKIADYNYKLPDDFTGCVIAWNSNNLDSKVGGNYNYLYRLFRKSNLKPFERDISTEIYQAGSTPCNGVEGFNCYFPLQSYGFQPTNGVGYQPYRVVVLSFELLHAPATVCGPKKSTNLVKNKCVNFNFNGLTGTGVLTESNKKFLPFQQFGRDIADTTDAVRDPQTLEILDITPCSFGGVSVITPGTNTSNQVAVLYQDVNCTEVPVAIHADQLTPTWRVYSTGSNVFQTRAGCLIGAEHVNNSYECDIPIGAGICASYQTQTNSPRRARSVASQSIIAYTMSLGAENSVAYSNNSIAIPTNFTISVTTEILPVSMTKTSVDCTMYICGDSTECSNLLLQYGSFCTQLNRALTGIAVEQDKNTQEVFAQVKQIYKTPPIKDFGGFNFSQILPDPSKPSKRSFIEDLLFNKVTLADAGFIKQYGDCLGDIAARDLICAQKFNGLTVLPPLLTDEMIAQYTSALLAGTITSGWTFGAGAALQIPFAMQMAYRFNGIGVTQNVLYENQKLIANQFNSAIGKIQDSLSSTASALGKLQDVVNQNAQALNTLVKQLSSNFGAISSVLNDILSRLDKVEAEVQIDRLITGRLQSLQTYVTQQLIRAAEIRASANLAATKMSECVLGQSKRFDFCGKGYHLMSFPQSAPHGVVFLHVTYVPAQEKNFTTAPAICHDGKAHFPREGVFVSNGTHWFVTQRNFYEPQIITTDNTFVSGNCDVVIGIVNNTVYDPLQPELDSGGSGYIPEAPRDGQAYVRKDGEWVLLSTFL

SEQ ID NO: 9691 - protein, 1177 aa, Artificial Sequence
  SARS-CoV-2/China/WF0028/2020__EPI_ISL_413791 spike protein (1-1147) Foldon construct
MFVFLVLLPLVSSQCVNLTTRTQLPPAYTNSFTRGVYYPDKVFRSSVLHSTQDLFLPFFSNVTWFHAIHVSGTNGTKRFDNPVLPFNDGVYFASTEKSNIIRGWIFGTTLDSKTQSLLIVNNATNVVIKVCEFQFCNDPFLGVYYHKNNKSWMESEFRVYSSANNCTFEYVSQPFLMDLEGKQGNFKNLREFVFKNIDGYFKIYSKHTPINLVRDLPQGFSALEPLVDLPIGINITRFQTLLALHRSYLTPGDSSSGWTAGAAAYYVGYLQPRTFLLKYNENGTITDAVDCALDPLSETKCTLKSFTVEKGIYQTSNFRVQPTESIVRFPNITNLCPFGEVFNATRFASVYAWNRKRISNCVADYSVLYNSASFSTFKCYGVSPTKLNDLCFTNVYADSFVIRGDEVRQIAPGQTGKIADYNYKLPDDFTGCVIAWNSNNLDSKVGGNYNYLYRLFRKSNLKPFERDISTEIYQAGSTPCNGVEGFNCYFPLQSYGFQPTNGVGYQPYRVVVLSFELLHAPATVCGPKKSTNLVKNKCVNFNFNGLTGTGVLTESNKKFLPFQQFGRDIADTTDAVRDPQTLEILDITPCSFGGVSVITPGTNTSNQVAVLYQDVNCTEVPVAIHADQLTPTWRVYSTGSNVFQTRAGCLIGAEHVNNSYECDIPIGAGICASYQTQTNSPRRARSVASQSIIAYTMSLGAENSVAYSNNSIAIPTNFTISVTTEILPVSMTKTSVDCTMYICGDSTECSNLLLQYGSFCTQLNRALTGIAVEQDKNTQEVFAQVKQIYKTPPIKDFGGFNFSQILPDPSKPSKRSFIEDLLFNKVTLADAGFIKQYGDCLGDIAARDLICAQKFNGLTVLPPLLTDEMIAQYTSALLAGTITSGWTFGAGAALQIPFAMQMAYRFNGIGVTQNVLYENQKLIANQFNSAIGKIQDSLSSTASALGKLQDVVNQNAQALNTLVKQLSSNFGAISSVLNDILSRLDKVEAEVQIDRLITGRLQSLQTYVTQQLIRAAEIRASANLAATKMSECVLGQSKRVDFCGKGYHLMSFPQSAPHGVVFLHVTYVPAQEKNFTTAPAICHDGKAHFPREGVFVSNGTHWFVTQRNFYEPQIITTDNTFVSGNCDVVIGIVNNTVYDPLQPELESGGSGYIPEAPRDGQAYVRKDGEWVLLSTFL

SEQ ID NO: 9692 - protein, 1177 aa, Artificial Sequence
  SARS-CoV-2/2019-nCoV/USA-CruiseA-18/2020__MT159716.1 spike protein (1-1147) Foldon construct
MFVFLVLLPLVSSQCVNLTTRTQLPPAYTNSFTRGVYYPDKVFRSSVLHSTQDLFLPFFSNVTWFHAIHVSGTNGTKRFDNPVLPFNDGVYFASTEKSNIIRGWIFGTTLDSKTQSLLIVNNATNVVIKVCEFQFCNDPFLGVYYHKNNKSWMESELRVYSSANNCTFEYVSQPFLMDLEGKQGNFKNLREFVFKNIDGYFKIYSKHTPINLVRDLPQGFSALEPLVDLPIGINITRFQTLLALHRSYLTPGDSSSGWTAGAAAYYVGYLQPRTFLLKYNENGTITDAVDCALDPLSETKCTLKSFTVEKGIYQTSNFRVQPTESIVRFPNITNLCPFGEVFNATRFASVYAWNRKRISNCVADYSVLYNSASFSTFKCYGVSPTKLNDLCFTNVYADSFVIRGDEVRQIAPGQTGKIADYNYKLPDDFTGCVIAWNSNNLDSKVGGNYNYLYRLFRKSNLKPFERDISTEIYQAGSTPCNGVEGFNCYFPLQSYGFQPTNGVGYQPYRVVVLSFELLHAPATVCGPKKSTNLVKNKCVNFNFNGLTGTGVLTESNKKFLPFQQFGRDIADTTDAVRDPQTLEILDITPCSFGGVSVITPGTNTSNQVAVLYQDVNCTEVPVAIHADQLTPTWRVYSTGSNVFQTRAGCLIGAEHVNNSYECDIPIGAGICASYQTQTNSPRRARSVASQSIIAYTMSLGAENSVAYSNNSIAIPTNFTISVTTEILPVSMTKTSVDCTMYICGDSTECSNLLLQYGSFCTQLNRALTGIAVEQDKNTQEVFAQVKQIYKTPPIKDFGGFNFSQILPDPSKPSKRSFIEDLLFNKVTLADAGFIKQYGDCLGDIAARDLICAQKFNGLTVLPPLLTDEMIAQYTSALLAGTITSGWTFGAGAALQIPFAMQMAYRFNGIGVTQNVLYENQKLIANQFNSAIGKIQDSLSSTASALGKLQDVVNQNAQALNTLVKQLSSNFGAISSVLNDILSRLDKVEAEVQIDRLITGRLQSLQTYVTQQLIRAAEIRASANLAATKMSECVLGQSKRVDFCGKGYHLMSFPQSAPHGVVFLHVTYVPAQEKNFTTAPAICHDGKAHFPREGVFVSNGTHWFVTQRNFYEPQIITTDNTFVSGNCDVVIGIVNNTVYDPLQPELDSGGSGYIPEAPRDGQAYVRKDGEWVLLSTFL

SEQ ID NO: 9693 - protein, 1177 aa, Artificial Sequence
  SARS-CoV-2/SARS-CoV-2/Yunnan-01/human/2020/CHN__MT049951.1 spike protein (1-1147) Foldon construct
MFVFLVLLPLVSSQCVNLTTRTQLPPANTNSFTRGVYYPDKVFRSSVLHSTQDLFLPFFSNVTWFHAIHVSGTNGTKRFDNPVLPFNDGVYFASTEKSNIIRGWIFGTTLDSKTQSLLIVNNATNVVIKVCEFQFCNDPFLGVYYHKNNKSWMESEFRVYSSANNCTFEYVSQPFLMDLEGKQGNFKNLREFVFKNIDGYFKIYSKHTPINLVRDLPQGFSALEPLVDLPIGINITRFQTLLALHRSYLTPGDSSSGWTAGAAAYYVGYLQPRTFLLKYNENGTITDAVDCALDPLSETKCTLKSFTVEKGIYQTSNFRVQPTESIVRFPNITNLCPFGEVFNATRFASVYAWNRKRISNCVADYSVLYNSASFSTFKCYGVSPTKLNDLCFTNVYADSFVIRGDEVRQIAPGQTGKIADYNYKLPDDFTGCVIAWNSNNLDSKVGGNYNYLYRLFRKSNLKPFERDISTEIYQAGSTPCNGVEGFNCYFPLQSYGFQPTNGVGYQPYRVVVLSFELLHAPATVCGPKKSTNLVKNKCVNFNFNGLTGTGVLTESNKKFLPFQQFGRDIADTTDAVRDPQTLEILDITPCSFGGVSVITPGTNTSNQVAVLYQDVNCTEVPVAIHADQLTPTWRVYSTGSNVFQTRAGCLIGAEHVNNSYECDIPIGAGICASYQTQTNSPRRARSVASQSIIAYTMSLGAENSVAYSNNSIAIPTNFTISVTTEILPVSMTKTSVDCTMYICGDSTECSNLLLQYGSFCTQLNRALTGIAVEQDKNTQEVFAQVKQIYKTPPIKDFGGFNFSQILPDPSKPSKRSFIEDLLFNKVTLADAGFIKQYGDCLGDIAARDLICAQKFNGLTVLPPLLTDEMIAQYTSALLAGTITSGWTFGAGAALQIPFAMQMAYRFNGIGVTQNVLYENQKLIANQFNSAIGKIQDSLSSTASALGKLQDVVNQNAQALNTLVKQLSSNFGAISSVLNDILSRLDKVEAEVQIDRLITGRLQSLQTYVTQQLIRAAEIRASANLAATKMSECVLGQSKRVDFCGKGYHLMSFPQSAPHGVVFLHVTYVPAQEKNFTTAPAICHDGKAHFPREGVFVSNGTHWFVTQRNFYEPQIITTDNTFVSGNCDVVIGIVNNTVYDPLQPELDSGGSGYIPEAPRDGQAYVRKDGEWVLLSTFL

SEQ ID NO: 9694 - protein, 1177 aa, Artificial Sequence
  SARS-CoV-2/USA/WA-UW292/2020__EPI_ISL_418077 spike protein (1-1147) Foldon construct
MFVFLVLLPLVSSQCVNLTTRTQLPPAYTNSFTRGVYYPDKVFRSSVLHSTQDLFLPFFSNVTWFHAIHVSGTNGTKRFDNPVLPFNDGVYFASTEKSNIIRGWIFGTTLDSKTQSLLIVNNATNVVIKVCEFQFCNDPFLGVYYHKNNKSWMESEFRVYSSANNCTFEYVSQPFLMDLEGKQGNFKNLREFVFKNIDGYFKIYSKHTPINLVRDLPQGFSALEPLVDLPIGINITRFQTLLALHRSYLTPGDSSSGWTAGAAAYYVGYLQPRTFLLKYNENGTITDAVDCALDPLSETKCTLKSFTVEKGIYQTSNFRVQPTESIVRFPNITNLCPFGEVFNATRFASVYAWNRKRISNCVADYSVLYNSASFSTFKCYGVSPTKLNDLCFTNVYADSFVIRGDEVRQIAPGQTGKIADYNYKLPDDFTGCVIAWNSNNLDSKVGGNYNYLYRLFRKSNLKPFERDISTEIYQASSTPCNGVEGFNCYFPLQSYGFQPTNGVGYQPYRVVVLSFELLHAPATVCGPKKSTNLVKNKCVNFNFNGLTGTGVLTESNKKFLPFQQFGRDIADTTDAVRDPQTLEILDITPCSFGGVSVITPGTNTSNQVAVLYQDVNCTEVPVAIHADQLTPTWRVYSTGSNVFQTRAGCLIGAEHVNNSYECDIPIGAGICASYQTQTNSPRRARSVASQSIIAYTMSLGAENSVAYSNNSIAIPTNFTISVTTEILPVSMTKTSVDCTMYICGDSTECSNLLLQYGSFCTQLNRALTGIAVEQDKNTQEVFAQVKQIYKTPPIKDFGGFNFSQILPDPSKPSKRSFIEDLLFNKVTLADAGFIKQYGDCLGDIAARDLICAQKFNGLTVLPPLLTDEMIAQYTSALLAGTITSGWTFGAGAALQIPFAMQMAYRFNGIGVTQNVLYENQKLIANQFNSAIGKIQDSLSSTASALGKLQDVVNQNAQALNTLVKQLSSNFGAISSVLNDILSRLDKVEAEVQIDRLITGRLQSLQTYVTQQLIRAAEIRASANLAATKMSECVLGQSKRVDFCGKGYHLMSFPQSAPHGVVFLHVTYVPAQEKNFTTAPAICHDGKAHFPREGVFVSNGTHWFVTQRNFYEPQIITTDNTFVSGNCDVVIGIVNNTVYDPLQPELDSGGSGYIPEAPRDGQAYVRKDGEWVLLSTFL

SEQ ID NO: 9695 - protein, 1177 aa, Artificial Sequence
  SARS-CoV-2/Iceland/192/2020__EPI_ISL_417819 spike protein (1-1147) Foldon construct
MFVFFVLLPLVSSQCVNLTTRTQLPPAYTNSFTRGVYYPDKVFRSSVLHSTQDLFLPFFSNVTWFHAIHVSGTNGTKRFDNPVLPFNDGVYFASTEKSNIIRGWIFGTTLDSKTQSLLIVNNATNVVIKVCEFQFCNDPFLGVYYHKNNKSWMESEFRVYSSANNCTFEYVSQPFLMDLEGKQGNFKNLREFVFKNIDGYFKIYSKHTPINLVRDLPQGFSALEPLVDLPIGINITRFQTLLALHRSYLTPGDSSSGWTAGAAAYYVGYLQPRTFLLKYNENGTITDAVDCALDPLSETKCTLKSFTVEKGIYQTSNFRVQPTESIVRFPNITNLCPFGEVFNATRFASVYAWNRKRISNCVADYSVLYNSASFSTFKCYGVSPTKLNDLCFTNVYADSFVIRGDEVRQIAPGQTGKIADYNYKLPDDFTGCVIAWNSNNLDSKVGGNYNYLYRLFRKSNLKPFERDISTEIYQAGSTPCNGVEGFNCYFPLQSYGFQPTNGVGYQPYRVVVLSFELLHAPATVCGPKKSTNLVKNKCVNFNFNGLTGTGVLTESNKKFLPFQQFGRDIADTTDAVRDPQTLEILDITPCSFGGVSVITPGTNTSNQVAVLYQGVNCTEVPVAIHADQLTPTWRVYSTGSNVFQTRAGCLIGAEHVNNSYECDIPIGAGICASYQTQTNSPRRARSVASQSIIAYTMSLGAENSVAYSNNSIAIPTNFTISVTTEILPVSMTKTSVDCTMYICGDSTECSNLLLQYGSFCTQLNRALTGIAVEQDKNTQEVFAQVKQIYKTPPIKDFGGFNFSQILPDPSKPSKRSFIEDLLFNKVTLADAGFIKQYGDCLGDIAARDLICAQKFNGLTVLPPLLTDEMIAQYTSALLAGTITSGWTFGAGAALQIPFAMQMAYRFNGIGVTQNVLYENQKLIANQFNSAIGKIQDSLSSTASALGKLQDVVNQNAQALNTLVKQLSSNFGAISSVLNDILSRLDKVEAEVQIDRLITGRLQSLQTYVTQQLIRAAEIRASANLAATKMSECVLGQSKRVDFCGKGYHLMSFPQSAPHGVVFLHVTYVPAQEKNFTTAPAICHDGKAHFPREGVFVSNGTHWFVTQRNFYEPQIITTDNTFVSGNCDVVIGIVNNTVYDPLQPELDSGGSGYIPEAPRDGQAYVRKDGEWVLLSTFL

SEQ ID NO: 9696 - protein, 1177 aa, Artificial Sequence
  SARS-CoV-2/Belgium/ULG-6939/2020__EPI_ISL_417020 spike protein (1-1147) Foldon construct
MFVFLVLLPLVSSQCVNLTTRTQLPPAYTNSFTRGVYYPDKVFRSSVLHSTQDLFLPFFSNVTWFHAIHVSGTNGTKRFDNPVLPFNDGVYFASTEKSNIIRGWIFGTTLDSKTQSLLIVNNATNVVIKVCEFQFCNDPFLGVYYHKNNKSWMESEFRVYSSANNCTFEYVSQPFLMDLEGKQGNFKNLREFVFKNIDGYFKIYSKHTPINLVRDLPQGFSALEPLVDLPIGINITRFQTLLALHRSYLTPGDSSSGWTAGAAAYYVGYLQPRTFLLKYNENGTITDAVDCALDPLSETKCTLKSFTVEKGIYQTSNFRVQPTESIVRFPNITNLCPFGEVFNATRFASVYAWNRKRISNCVADYSVLYNSASFSTFKCYGVSPTKLNDLCFTNVYADSFVIRGDEVRQIAPGQTGKIADYNYKLPDDFTGCVIAWNSNNLDSKVGGNYNYLYRLFRKSNLKPFERDISTEIYQAGSTPCNGVEGFNCYFPLQSYGFQPTNGVGYQPYRVVVLSFELLHAPATVCGPKKSTNLVKNKCVNFNFNGLTGTGVLTESNKKFLPFQQFGRDIADTTDAVRDPQTLEILDITPCSFGGVSVITPGTNTSNQVAVLYQGVNCTEVPVAIHADQLTPTWRVYSTGSNVFQTRAGCLIGAEHVNNSYECDIPIGAGICASYQTQTNSPRRARSVASQSIIAYTMSLGAENSVVYSNNSIAIPTNFTISVTTEILPVSMTKTSVDCTMYICGDSTECSNLLLQYGSFCTQLNRALTGIAVEQDKNTQEVFAQVKQIYKTPPIKDFGGFNFSQILPDPSKPSKRSFIEDLLFNKVTLADAGFIKQYGDCLGDIAARDLICAQKFNGLTVLPPLLTDEMIAQYTSALLAGTITSGWTFGAGAALQIPFAMQMAYRFNGIGVTQNVLYENQKLIANQFNSAIGKIQDSLSSTASALGKLQDVVNQNAQALNTLVKQLSSNFGAISSVLNDILSRLDKVEAEVQIDRLITGRLQSLQTYVTQQLIRAAEIRASANLAATKMSECVLGQSKRVDFCGKGYHLMSFPQSAPHGVVFLHVTYVPAQEKNFTTAPAICHDGKAHFPREGVFVSNGTHWFVTQRNFYEPQIITTDNTFVSGNCDVVIGIVNNTVYDPLQPELDSGGSGYIPEAPRDGQAYVRKDGEWVLLSTFL

SEQ ID NO: 9697 - protein, 1177 aa, Artificial Sequence
  SARS-CoV-2/France/HF2496/2020__EPI_ISL_418231 spike protein (1-1147) Foldon construct
MFVFLVLLPLVSSQCVNLTTRTQLPPAYTNSFTRGVYYPDKVFRSSVLHSTQDLFLPFFSNVTWFHAIHVSGTNGTKRFDNPVLPFNDGVYFASTEKSNIIRGWIFGTTLDSKTQSLLIVNNATNVVIKVCEFQFCNDPFLGVYYHKNNKSWMESEFRVYSSANNCTFEYVSQPFLMDLEGKQGNFKNLREFVFKNIDGYFKIYSKHTPINLVRDLPQGFSALEPLVDLPIGINITRFQTLLALHRSYLTPGDSSSGWTAGAAAYYVGYLQPRTFLLKYNENGTITDAVDCALDPLSETKCTLKSFTVEKGIYQTSNFRVQPTESIVRFPNITNLCPFGEVFNATRFASVYAWNRKRISNCVADYSVLYNSASFSTFKCYGVSPTKLNDLCFTNVYADSFVIRGDEVRQIAPGQTGKIADYNYKLPDDFTGCVIAWNSNNLDSKVGGNYNYLYRLFRKSNLKPFERDISTEIYQAGSTPCNGVEGFNCYFPLQSYGFQPTNGVGYQPYRVVVLSFELLHAPATVCGPKKSTNLVKNKCVNFNFNGLTGTGVLTESNKKFLPFQQFGRDIADTTDAVRDPQTLEILDITPCSFGGVSVITPGTNTSNQVAVLYQGVNCTEVPVAIHADQLTPTWRVYSTGSNVFQTRAGCLIGAEHVNNSYECDIPIGAGICASYQTQTNSPRRARSVASQSIIAYTMSLGAENSVAYSNNSIAIPTNFTISVTTEILPVSMTKTSVDCTMYICGDSTECSNLLLQYGSFCTQLNRALTGIAVEQDKNTQEVFAQVKQIYKTPPIKDFGGFNFSQILPDPSKPSKRSFIEDLLFNKVTLADAGFIKQYGDCLGDIVARDLICAQKFNGLTVLPPLLTDEMIAQYTSALLAGTITSGWTFGAGAALQIPFAMQMAYRFNGIGVTQNVLYENQKLIANQFNSAIGKIQDSLSSTASALGKLQDVVNQNAQALNTLVKQLSSNFGAISSVLNDILSRLDKVEAEVQIDRLITGRLQSLQTYVTQQLIRAAEIRASANLAATKMSECVLGQSKRVDFCGKGYHLMSFPQSAPHGVVFLHVTYVPAQEKNFTTAPAICHDGKAHFPREGVFVSNGTHWFVTQRNFYEPQIITTDNTFVSGNCDVVIGIVNNTVYDPLQPELDSGGSGYIPEAPRDGQAYVRKDGEWVLLSTFL

SEQ ID NO: 9698 - protein, 1177 aa, Artificial Sequence
  SARS-CoV-2/USA/WA-UW291/2020__EPI_ISL_418076 spike protein (1-1147) Foldon construct
MFVFLVLLPLVSSQCVNLTTRTQLPPAYTNSFTRGVYYPDKVFRSSVLHSTQDLFLPFFSNVTWFHAIHVSGTNGTKRFDNPVLPFNDGVYFASTEKSNIIRGWIFGTTLDSKTQSLLIVNNATNVVIKVCEFQFCNDPFLGVYYHKNNKSWMESEFRVYSSANNCTFEYVSQPFLMDLEGKQGNFKNLREFVFKNIDGYFKIYSKHTPINLVRDLPQGFSALEPLVDLPIGINITRFQTLLALHRSYLTPGDSSSGWTAGAAAYYVGYLQPRTFLLKYNENGTITDAVDCALDPLSETKCTLKSFTVEKGIYQTSNFRVQPTESIVRFPNITNLCPFGEVFNATRFASVYAWNRKRISNCVADYSVLYNSASFSTFKCYGVSPTKLNDLCFTNVYADSFVIRGDEVRQIAPGQTGKIADYNYKLPDDFTGCVIAWNSNNLDSKVGGNYNYLYRLFRKSNLKPFERDISTEIYQAGSTPCNGVEGFNCYFPLQSYGFQPTNGVGYQPYRVVVLSFELLHAPATVCGPKKSTNLVKNKCVNFNFNGLTGTGVLTESNKKFLPFQQFGRDIADTTDAVRDPQTLEILDITPCSFGGVSVITPGTNTSNQVAVLYQGVNCTEVPVAIHADQLTPTWRVYSTGSNVFQTRAGCLIGAEHVNNSYECDIPIGAGICASYQTQTNSPRRARSVASQSIIAYTMSLGAENSVAYSNNSIAIPTNFTISVTTEILPVSMTKTSVDCTMYICGDSTECSNLLLQYGSFCTQLNRALTGIAVEQDKNTQEVFAQVKQIYKTPPIKDFGGFNFSQILPDPSKPSKRSFIEDLLFNKVTLADAGFIKQYGDCLGDIAARDLICAQKFNGLTVLPPLLTDEMIAQYTSALLAGTITSGWTFGAGAALQIPFAMQMAYRFNGIGVTQNVLYENQKLIANQFNSAIGKIQYSLSSTASALGKLQDVVNQNAQALNTLVKQLSSNFGAISSVLNDILSRLDKVEAEVQIDRLITGRLQSLQTYVTQQLIRAAEIRASANLAATKMSECVLGQSKRVDFCGKGYHLMSFPQSAPHGVVFLHVTYVPAQEKNFTTAPAICHDGKAHFPREGVFVSNGTHWFVTQRNFYEPQIITTDNTFVSGNCDVVIGIVNNTVYDPLQPELDSGGSGYIPEAPRDGQAYVRKDGEWVLLSTFL

SEQ ID NO: 9699 - protein, 1177 aa, Artificial Sequence; identical to SEQ ID NO: 9662
  SARS-CoV-2/Portugal/PT0034/2020__EPI_ISL_418019 spike protein (1-1147) Foldon construct

SEQ ID NO: 9700 - protein, 1177 aa, Artificial Sequence; identical to SEQ ID NO: 9654
  SARS-CoV-2/Iceland/202/2020__EPI_ISL_417750 spike protein (1-1147) Foldon construct

SEQ ID NO: 9701 - protein, 1177 aa, Artificial Sequence
  SARS-CoV-2/USA/WA-UW261/2020__EPI_ISL_418046 spike protein (1-1147) Foldon construct
MFVFLVLLPLVSSQCVNLTTRTQLPPAYTNSFTRGVYYPDKVFRSSVLHSTQDLFLPFFSNVTWFHAIHVSGTNGTKRFDNPVLPFNDGVYFASTEKSNIIRGWIFGTTLDSKTQSLLIVNNATNVVIKVCEFQFCNDPFLGVYYHKNNKSWMESEFRVYSSANNCTFEYVSQPFLMDLEGKQGNFKNLREFVFKNIDGYFKIYSKHTPINLVRDLPQGFSALEPLVDLPIGINITRFQTLLALHRSYLTPGDSSSGWTAGAAAYYVGYLQPRTFLLKYNENGTITDAVDCALDPLSETKCTLKSFTVEKGIYQTSNFRVQPTESIVRFPNITNLCPFGEVFNATRFTSVYAWNRKRISNCVADYSVLYNSASFSTFKCYGVSPTKLNDLCFTNVYADSFVIRGDEVRQIAPGQTGKIADYNYKLPDDFTGCVIAWNSNNLDSKVGGNYNYLYRLFRKSNLKPFERDISTEIYQAGSTPCNGVEGFNCYFPLQSYGFQPTNGVGYQPYRVVVLSFELLHAPATVCGPKKSTNLVKNKCVNFNFNGLTGTGVLTESNKKFLPFQQFGRDIADTTDAVRDPQTLEILDITPCSFGGVSVITPGTNTSNQVAVLYQDVNCTEVPVAIHADQLTPTWRVYSTGSNVFQTRAGCLIGAEHVNNSYECDIPIGAGICASYQTQTNSPRRARSVASQSIIAYTMSLGAENSVAYSNNSIAIPTNFTISVTTEILPVSMTKTSVDCTMYICGDSTECSNLLLQYGSFCTQLNRALTGIAVEQDKNTQEVFAQVKQIYKTPPIKDFGGFNFSQILPDPSKPSKRSFIEDLLFNKVTLADAGFIKQYGDCLGDIAARDLICAQKFNGLTVLPPLLTDEMIAQYTSALLAGTITSGWTFGAGAALQIPFAMQMAYRFNGIGVTQNVLYENQKLIANQFNSAIGKIQDSLSSTASALGKLQDVVNQNAQALNTLVKQLSSNFGAISSVLNDILSRLDKVEAEVQIDRLITGRLQSLQTYVTQQLIRAAEIRASANLAATKMSECVLGQSKRVDFCGKGYHLMSFPQSAPHGVVFLHVTYVPAQEKNFTTAPAICHDGKAHFPREGVFVSNGTHWFVTQRNFYEPQIITTDNTFVSGNCDVVIGIVNNTVYDPLQPELDSGGSGYIPEAPRDGQAYVRKDGEWVLLSTFL

SEQ ID NO: 9702 - protein, 1177 aa, Artificial Sequence
  SARS-CoV-2/Portugal/PT0035/2020__EPI_ISL_418020 spike protein (1-1147) Foldon construct
MFVFLVLLPLVSSQCVNLTTRTQLPPAYTNSFTRGVYYPDKVFRSSVLHSTQDLFLPFFSNVTWFHAIHVSGTNGTKRFDNPVLPFNDGVYFASTEKSNIIRGWIFGTTLDSKTQSLLIVNNATNVVIKVCEFQFCNDPFLGVYYHKNNKSWMESEFRVYSSANNCTFEYVSQPFLMDLEGKQGNFKNLREFVFKNIDGYFKIYSKHTPINLVRDLPQGFSALEPLVDLPIGINITRFQTLLALHRSYLTPGDSSSGWTAGAAAYYVGYLQPRTFLLKYNENGTITDAVDCALDPLSETKCTLKSFTVEKGIYQTSNFRVQPTESIVRFPNITNLCPFGEVFNATRFASVYAWNRKRISNCVADYSVLYNSASFSTFKCYGVSPTKLNDLCFTNVYADSFVIRGDEVRQIAPGQTGKIADYNYKLPDDFTGCVIAWNSNNLDSKVGGNYNYLYRLFRKSNLKPFERDISTEIYQAGSTPCNGVEGFNCYFPLQSYGFQPTNGVGYQPYRVVVLSFELLHAPATVCGPKKSTNLVKNKCVNFNFNGLTGTGVLTESNKKFLPFQQFGRDIADTTDAVRDPQTLEILDITPCSFGGVSVITPGTNTSNQVAVLYQDVNCTEVPVAIHADQLTPTWRVYSTGSNVFQTRAGCLIGAEHVNNSYECDIPIGAGICASYQTQTNSPRRARSVASQSIIAYTMSLGAENSVAYSNNSIAIPTNFTISVTTEILPVSMTKTSVDCTMYICGDSTECSNLLLQYGSFCTQLNRALTGIAVEQDKNTQEVFAQVKQIYKTPPIKDFGGFNFSQILPDPSKPSKRSFIEDLLFNKVTLADAGFIKQYGDCLGDISARDLICAQKFNGLTVLPPLLTDEMIAQYTSALLAGTITSGWTFGAGAALQIPFAMQMAYRFNGIGVTQNVLYENQKLIANQFNSAIGKIQDSLSSTASALGKLQDVVNQNAQALNTLVKQLSSNFGAISSVLNDILSRLDKVEAEVQIDRLITGRLQSLQTYVTQQLIRAAEIRASANLAATKMSECVLGQSKRVDFCGKGYHLMSFPQSAPHGVVFLHVTYVPAQEKNFTTAPAICHDGKAHFPREGVFVSNGTHWFVTQRNFYEPQIITTDNTFVSGNCDVVIGIVNNTVYDPLQPELDSGGSGYIPEAPRDGQAYVRKDGEWVLLSTFL

SEQ ID NO: 9703 - protein, 1177 aa, Artificial Sequence
  SARS-CoV-2/USA/NY-NYUMC7/2020__EPI_ISL_418192 spike protein (1-1147) Foldon construct
MFVFLVLLPLVSSQCVNLTTRTQLPPAYTNSFTRGVYYPDKVFRSSVLHSTQDLFLPFFSNVTWFHAIHVSGTNGTKRFDNPVLPFNDGVYFASTEKSNIIRGWIFGTTLDSKTQSLLIVNNATNVVIKVCEFQFCNDPFLGVYHHKNNKSWMESEFRVYSSANNCTFEYVSQPFLMDLEGKQGNFKNLREFVFKNIDGYFKIYSKHTPINLVRDLPQGFSALEPLVDLPIGINITRFQTLLALHRSYLTPGDSSSGWTAGAAAYYVGYLQPRTFLLKYNENGTITDAVDCALDPLSETKCTLKSFTVEKGIYQTSNFRVQPTESIVRFPNITNLCPFGEVFNATRFASVYAWNRKRISNCVADYSVLYNSASFSTFKCYGVSPTKLNDLCFTNVYADSFVIRGDEVRQIAPGQTGKIADYNYKLPDDFTGCVIAWNSNNLDSKVGGNYNYLYRLFRKSNLKPFERDISTEIYQAGSTPCNGVEGFNCYFPLQSYGFQPTNGVGYQPYRVVVLSFELLHAPATVCGPKKSTNLVKNKCVNFNFNGLTGTGVLTESNKKFLPFQQFGRDIADTTDAVRDPQTLEILDITPCSFGGVSVITPGTNTSNQVAVLYQGVNCTEVPVAIHADQLTPTWRVYSTGSNVFQTRAGCLIGAEHVNNSYECDIPIGAGICASYQTQTNSPRRARSVASQSIIAYTMSLGAENSVAYSNNSIAIPTNFTISVTTEILPVSMTKTSVDCTMYICGDSTECSNLLLQYGSFCTQLNRALTGIAVEQDKNTQEVFAQVKQIYKTPPIKDFGGFNFSQILPDPSKPSKRSFIEDLLFNKVTLADAGFIKQYGDCLGDIAARDLICAQKFNGLTVLPPLLTDEMIAQYTSALLAGTITSGWTFGAGAALQIPFAMQMAYRFNGIGVTQNVLYENQKLIANQFNSAIGKIQDSLSSTASALGKLQDVVNQNAQALNTLVKQLSSNFGAISSVLNDILSRLDKVEAEVQIDRLITGRLQSLQTYVTQQLIRAAEIRASANLAATKMSECVLGQSKRVDFCGKGYHLMSFPQSAPHGVVFLHVTYVPAQEKNFTTAPAICHDGKAHFPREGVFVSNGTHWFVTQRNFYEPQIITTDNTFVSGNCDVVIGIVNNTVYDPLQPELDSGGSGYIPEAPRDGQAYVRKDGEWVLLSTFL

SEQ ID NO: 9704 - protein, 1177 aa, Artificial Sequence
  SARS-CoV-2/Iceland/189/2020__EPI_ISL_417709 spike protein (1-1147) Foldon construct
MFVFLVLLPLVSSQCVNLTTRTQLPPAYTNSFTRGVYYPDKVFRSSVLHSTQDLFLPFFSNVTWFHAIHVSGTNGTKRFDNPVLPFNDGVYFASTEKSNIIRGWIFGTTLDSKTQSLLIVNNATNVVIKVCEFQFCNDPFLGVYYHKNNKSWMESEFRVYSSANNCTFEYVSQPFLMDLEGKQGNFKNLREFVFKNIDGYFKIYSKHTPINLVRDLPQGFSALEPLVDLPIGINITRFQTLLALHRSYLTPGDSSSGWTAGAAAYYVGYLQPRTFLLKYNENGTITDAVDCALDPLSETKCTLKSFTVEKGIYQTSNFRVQPTESIVRFPNITNLCPFGEVFNATRFASVYAWNRKRISNCVADYSVLYNSASFSTFKCYGVSPTKLNDLCFTNVYADSFVIRGDEVRQIAPGQTGKIADYNYKLPDDFTGCVIAWNSNNLDSKVGGNYNYLYRLFRKSNLKPFERDISTEIYQAGSTPCNGVEGFNCYFPLQSYGFQPTNGVGYQPYRVVVLSFELLHAPATVCGPKKSTNLVKNKCVNFNFNGLTGTGVLTESNKKFLPFQQFGRDIADTTDAVRDPQTLEILDITPCSFGGVSVITPGTNTSNQVAVLYQGVNCTEVPVAIHADQLTPTWRVYSTGSNVFQTRAGCLIGAEHVNNSYECDIPIGAGICASYQTQTNSPRRARSVASQSIIAYTMSLGAENSVAYSNNSIAIPTNFTISVTTEILPVSMTKTSVDCTMYICGDSTECSNLLLQYGSFCTQLNRALTGIAVEQDKNTQEVFAQVKQIYKTPPIKDFGGFNFSQILPDPSKPSKRSFIEDLLFNKVTLADAGFTKQYGDCLGDIAARDLICAQKFNGLTVLPPLLTDEMIAQYTSALLAGTITSGWTFGAGAALQIPFAMQMAYRFNGIGVTQNVLYENQKLIANQFNSAIGKIQDSLSSTASALGKLQDVVNQNAQALNTLVKQLSSNFGAISSVLNDILSRLDKVEAEVQIDRLITGRLQSLQTYVTQQLIRAAEIRASANLAATKMSECVLGQSKRVDFCGKGYHLMSFPQSAPHGVVFLHVTYVPAQEKNFTTAPAICHDGKAHFPREGVFVSNGTHWFVTQRNFYEPQIITTDNTFVSGNCDVVIGIVNNTVYDPLQPELDSGGSGYIPEAPRDGQAYVRKDGEWVLLSTFL

SEQ ID NO: 9705 - protein, 1177 aa, Artificial Sequence
  SARS-CoV-2/Australia/NSW56/2020__EPI_ISL_417408 spike protein (1-1147) Foldon construct
MFVFLVLLPLVSSQCVNLTTRTQLPPAYTNSFTRGVYYPDKVFRSSVLHSTQDLFLPFFSNVTWFHAIHVSGTNGTKRFDNPVLPFNDGVYFASTEKSNIIRGWIFGTTLDSKTQSLLIVNNATNVVIKVCEFQFCNDPFLGVYYHKNNKSWMESEFRVYSSANNCTFEYVSQPFLMDLEGKQGNFKNLREFVFKNIDGYFKIYSKHTPINLVRDLPQGFSALEPLVDLPIGINITRFQTLLALHRSYLTPGDSSSGWTAGAAAYYVGYLQPRTFLLKYNENGTITDAVDCALDPLSETKCTLKSFTVEKGIYQTSNFRVQPTESIVRFPNITNLCPFGEVFNATRFASVYAWNRKRISNCVADYSVLYNSASFSTFKCYGVSPTKLNDLCFTNVYADSFVIRGDEVRQIAPGQTGKIADYNYKLPDDFTGCVIAWNSNNLDSKVGGNYNYLYRLFRKSNLKPFERDISTEIYQAGSTPCNGVEGFNCYFPLQSYGFQPTNGVGYQPYRVVVLSFELLHAPATVCGPKKSTNLVKNKCVNFNFNGLTGTGVLTESNKKFLPFQQFGRDIADTTDAVRDPQTLEILDITPCSFGGVSVITPGTNTSNQVAVLYQDVNCTEVPVAIHADQLTPTWRVYSTGSNVFQTRAGCLIGAEHVNNSYECDIPIGAGICASYQTQTNSPRRARSVASQSIIAYTMSLGAENSVAYSNNSIAIPTNFTISVTTEILPVSMTKTSVDCTMYICGDSTECSNLLLQYGSFCTQLNRALTGIAVEQDKNTQEVFAQVKQIYKTPPIKDFGGFNFSQILPDSSKPSKRSFIEDLLFNKVTLADAGFIKQYGDCLGDIAARDLICAQKFNGLTVLPPLLTDEMIAQYTSALLAGTITSGWTFGAGAALQIPFAMQMAYRFNGIGVTQNVLYENQKLIANQFNSAIGKIQDSLSSTASALGKLQDVVNQNAQALNTLVKQLSSNFGAISSVLNDILSRLDKVEAEVQIDRLITGRLQSLQTYVTQQLIRAAEIRASANLAATKMSECVLGQSKRVDFCGKGYHLMSFPQSAPHGVVFLHVTYVPAQEKNFTTAPAICHDGKAHFPREGVFVSNGTHWFVTQRNFYEPQIITTDNTFVSGNCDVVIGIVNNTVYDPLQPELDSGGSGYIPEAPRDGQAYVRKDGEWVLLSTFL

SEQ ID NO: 9706 - protein, 1177 aa, Artificial Sequence
  SARS-CoV-2/Iceland/280/2020__EPI_ISL_417608 spike protein (1-1147) Foldon construct
MFVFLVLLPLVSSQCVNLTTRTQLPPAYTNSFTRGVYYPDKVFRSSVLHSTQDLFLPFFSNVTWFHAIHVSGTNGTKRFDNPVLPFNDGVYFASTEKSNIIRGWIFGTTLDSKTQSLLIVNNATNVVIKVCEFQFCNDPFLGVYYHKNNKSWMESEFRVYSSANNCTFEYVSQPFLMDLEGKQGNFKNLREFVFKNIDGYFKIYSKHTPINLVRDLPQGFSALEPLVDLPIGINITRFQTLLALHRSYLTPGDSSSGWTAGAAAYYVGYLQPRTFLLKYNENGTITDAVDCALDPLSETKCTLKSFTVEKGIYQTSNFRVQPTESIVRFPNITNLCPFGEVFNATRFASVYAWNRKRISNCVADYSVLYNSASFSTFKCYGVSPTKLNDLCFTNVYADSFVIRGDEVRQIAPGQTGKIADYNYKLPDDFTGCVIAWNSNNLDSKVGGNYNYLYRLFRKSNLKPFERDISTEIYQAGSTPCNGVEGFNCYFPLQSYGFQPTNGVGYQPYRVVVLSFELLHAPATVCGPKKSTNLVKNKCVNFNFNGLTGTGVLTESNKKFLPFQQFGRDIADTTDAVRDPQTLEILDITPCSFGGVSVITPGTNTSNQVAVLYQGVNCTEVPVAIHADQLTPTWRVYSTGSNVFQTRAGCLIGAEHVNNSYECDIPIGAGICASYHTQTNSPRRARSVASQSIIAYTMSLGAENSVAYSNNSIAIPTNFTISVTTEILPVSMTKTSVDCTMYICGDSTECSNLLLQYGSFCTQLNRALTGIAVEQDKNTQEVFAQVKQIYKTPPIKDFGGFNFSQILPDPSKPSKRSFIEDLLFNKVTLADAGFIKQYGDCLGDIAARDLICAQKFNGLTVLPPLLTDEMIAQYTSALLAGTITSGWTFGAGAALQIPFAMQMAYRFNGIGVTQNVLYENQKLIANQFNSAIGKIQDSLSSTASALGKLQDVVNQNAQALNTLVKQLSSNFGAISSVLNDILSRLDKVEAEVQIDRLITGRLQSLQTYVTQQLIRAAEIRASANLAATKMSECVLGQSKRVDFCGKGYHLMSFPQSAPHGVVFLHVTYVPAQEKNFTTAPAICHDGKAHFPREGVFVSNGTHWFVTQRNFYEPQIITTDNTFVSGNCDVVIGIVNNTVYDPLQPELDSGGSGYIPEAPRDGQAYVRKDGEWVLLSTFL

SEQ ID NO: 9707 - protein, 1177 aa, Artificial Sequence; identical to SEQ ID NO: 9662
  SARS-CoV-2/Iceland/247/2020__EPI_ISL_417575 spike protein (1-1147) Foldon construct

SEQ ID NO: 9708 - protein, 1177 aa, Artificial Sequence
  SARS-CoV-2/Iceland/238/2020__EPI_ISL_417566 spike protein (1-1147) Foldon construct
MFVFLVLLPLVSSQCVNLTTRTQLPPAYTNSFTRGVYYPDKVFRSSVLHSTQDLFLPFFSNVTWFHAIHVSGTNGTKRFDNPVLPFNDGVYFASTEKSNIIRGWIFGTTLDSKTQSLLIVNNATNVVIKVCEFQFCNDPFLGVYYHKNNKSWMESEFRVYSSANNCTFEYVSQPFLMDLEGKQGNFKNLREFVFKNIDGYFKIYSKHTPINLVRDLPQGFSALEPLVDLPIGINITRFQTLLALHRSYLTPGDSSSGWTAGAAAYYVGYLQPRTFLLKYNENGTITDAVDCALDPLSETKCTLKSFTVEKGIYQTSNFRVQPTESIVRFPNITNLCPFGEVFNATRFASVYAWNRKRISNCVADYSVLYNSASFSTFKCYGVSPTKLNDLCFTNVYADSFVIRGDEVRQIAPGQTGKIADYNYKLPDDFTGCVIAWNSNNLDSKVGGNYNYLYRLFRKSNLKPFERDISTEIYQAGSTPCNGVEGFNCYFPLQSYGFQPTNGVGYQPYRVVVLSFELLHAPATVCGPKKSTNLVKNKCVNFNFNGLTGTGVLTESNKKFLPFQQFGRDIADTTDAVRDPQTLEILDITPCSFGGVSVITPGTNTSNQVAVLYQGVNCTEVPVAIHADQLTPTWRVYSTGSNVFQTRAGCLIGAEHVNNSYECDIPIGAGICASYQTQTNSPRRARSVASQSIIAYTMSLGAENSVAYSNNSIAIPTNFTISVTTEILPVSMTKTSVDCTMYICGDSTECSNLLLQYGSFCTQLNRALTGIAVEQDKNTQEVFAQVKQIYKTPPIKDFGGFNFSQILPDPSKPSKRSFIEDLLFNKVTLADVGFIKQYGDCLGDIAARDLICAQKFNGLTVLPPLLTDEMIAQYTSALLAGTITSGWTFGAGAALQIPFAMQMAYRFNGIGVTQNVLYENQKLIANQFNSAIGKIQDSLSSTASALGKLQDVVNQNAQALNTLVKQLSSNFGAISSVLNDILSRLDKVEAEVQIDRLITGRLQSLQTYVTQQLIRAAEIRASANLAATKMSECVLGQSKRVDFCGKGYHLMSFPQSAPHGVVFLHVTYVPAQEKNFTTAPAICHDGKAHFPREGVFVSNGTHWFVTQRNFYEPQIITTDNTFVSGNCDVVIGIVNNTVYDPLQPELDSGGSGYIPEAPRDGQAYVRKDGEWVLLSTFL

SEQ ID NO: 9709 - protein, 1177 aa, Artificial Sequence
  SARS-CoV-2/Greece/16/2020__EPI_ISL_418265 spike protein (1-1147) Foldon construct
MFVFLVLLPLVSSQCVNLTTRTQLPPAYTNSFTRGVYYPDKVFRSSVLHSTQDLFLPFFSNVTWFHAIHVSGTNGTKRFDNPVLPFNDGVYFASTEKSNIIRGWIFGTTLDSKTQSLLIVNNATNVVIKVCEFQFCNDPFLGVYYHKNNKSWMESEFRVYSSANNCTFEYVSQPFLMDLEGKQGNFKNLREFVFKNVDGYFKIYSKHTPINLVRDLPQGFSALEPLVDLPIGINITRFQTLLALHRSYLTPGDSSSGWTAGAAAYYVGYLQPRTFLLKYNENGTITDAVDCALDPLSETKCTLKSFTVEKGIYQTSNFRVQPTESIVRFPNITNLCPFGEVFNATRFASVYAWNRKRISNCVADYSVLYNSASFSTFKCYGVSPTKLNDLCFTNVYADSFVIRGDEVRQIAPGQTGKIADYNYKLPDDFTGCVIAWNSNNLDSKVGGNYNYLYRLFRKSNLKPFERDISTEIYQAGSTPCNGVEGFNCYFPLQSYGFQPTNGVGYQPYRVVVLSFELLHAPATVCGPKKSTNLVKNKCVNFNFNGLTGTGVLTESNKKFLPFQQFGRDIADTTDAVRDPQTLEILDITPCSFGGVSVITPGTNTSNQVAVLYQDVNCTEVPVAIHADQLTPTWRVYSTGSNVFQTRAGCLIGAEHVNNSYECDIPIGAGICASYQTQTNSPRRARSVASQSIIAYTMSLGAENSVAYSNNSIAIPTNFTISVTTEILPVSMTKTSVDCTMYICGDSTECSNLLLQYGSFCTQLNRALTGIAVEQDKNTQEVFAQVKQIYKTPPIKDFGGFNFSQILPDPSKPSKRSFIEDLLFNKVTLADAGFIKQYGDCLGDIAARDLICAQKFNGLTVLPPLLTDEMIAQYTSALLAGTITSGWTFGAGAALQIPFAMQMAYRFNGIGVTQNVLYENQKLIANQFNSAIGKIQDSLSSTASALGKLQDVVNQNAQALNTLVKQLSSNFGAISSVLNDILSRLDKVEAEVQIDRLITGRLQSLQTYVTQQLIRAAEIRASANLAATKMSECVLGQSKRVDFCGKGYHLMSFPQSAPHGVVFLHVTYVPAQEKNFTTAPAICHDGKAHFPREGVFVSNGTHWFVTQRNFYEPQIITTDNTFVSGNCDVVIGIVNNTVYDPLQPELDSGGSGYIPEAPRDGQAYVRKDGEWVLLSTFL

SEQ ID NO: 9710 - protein, 1177 aa, Artificial Sequence
  SARS-CoV-2/Iceland/319/2020__EPI_ISL_417648 spike protein (1-1147) Foldon construct
MFVFLVLLPLVSSQCVNLTTRTQLPPAYTNSFTRGVYYPDKVFRSSVLHSTQDLFLPFFSNVTWFHAIHVSGTNGTKRFDNPVLPFNDGVYFASTEKSNIIRGWIFGTTLDSKTQSLLIVNNATNVVIKVCEFQFCNDPFLGVYYHKNNKSWMESEFRVYSSANNCTFEYVSQPFLIDLEGKQGNFKNLREFVFKNIDGYFKIYSKHTPINLVRDLPQGFSALEPLVDLPIGINITRFQTLLALHRSYLTPGDSSSGWTAGAAAYYVGYLQPRTFLLKYNENGTITDAVDCALDPLSETKCTLKSFTVEKGIYQTSNFRVQPTESIVRFPNITNLCPFGEVFNATRFASVYAWNRKRISNCVADYSVLYNSASFSTFKCYGVSPTKLNDLCFTNVYADSFVIRGDEVRQIAPGQTGKIADYNYKLPDDFTGCVIAWNSNNLDSKVGGNYNYLYRLFRKSNLKPFERDISTEIYQAGSTPCNGVEGFNCYFPLQSYGFQPTNGVGYQPYRVVVLSFELLHAPATVCGPKKSTNLVKNKCVNFNFNGLTGTGVLTESNKKFLPFQQFGRDIADTTDAVRDPQTLEILDITPCSFGGVSVITPGTNTSNQVAVLYQGVNCTEVPVAIHADQLTPTWRVYSTGSNVFQTRAGCLIGAEHVNNSYECDIPIGAGICASYQTQTNSPRRARSVASQSIIAYTMSLGAENSVAYSNNSIAIPTNFTISVTTEILPVSMTKTSVDCTMYICGDSTECSNLLLQYGSFCTQLNRALTGIAVEQDKNTQEVFAQVKQIYKTPPIKDFGGFNFSQILPDPSKPSKRSFIEDLLFNKVTLADAGFIKQYGDCLGDIAARDLICAQKFNGLTVLPPLLTDEMIAQYTSALLAGTITSGWTFGAGAALQIPFAMQMAYRFNGIGVTQNVLYENQKLIANQFNSAIGKIQDSLSSTASALGKLQDVVNQNAQALNTLVKQLSSNFGAISSVLNDILSRLDKVEAEVQIDRLITGRLQSLQTYVTQQLIRAAEIRASANLAATKMSECVLGQSKRVDFCGKGYHLMSFPQSAPHGVVFLHVTYVPAQEKNFTTAPAICHDGKAHFPREGVFVSNGTHWFVTQRNFYEPQIITTDNTFVSGNCDVVIGIVNNTVYDPLQPELDSGGSGYIPEAPRDGQAYVRKDGEWVLLSTFL

SEQ ID NO: 9711 - protein, 1177 aa, Artificial Sequence
  SARS-CoV-2/Congo/94/2020__EPI_ISL_417947 spike protein (1-1147) Foldon construct
MFVFLVLLPLVSSQCVNLTTRTQLPPAYTNSFTRGVYYPDKVFRSSVLHSTQDLFLPFFSNVTWFHAIHVSGTNGTKRFDNPVLPFNDGVYFASTEKSNIIRGWIFGTTLDSKTQSLLIVNNATNVVIKVCEFQFCNDPFLGVYYHKNNKSWMESEFRVYSSANNCTFEYVSQPFLMDLEGKQGNFKNLREFVFKNIDGYFKIYSKHTPINLVRDLPQGFSALEPLVDLPIGINITRFQTLLALHRSYLTPGDSSSGWTAGAAAYYVGYLQPRTFLLKYNENGTITDAVDCALDPLSETKCTLKSFTVEKGIYQTSNFRVQPTESIVRFPNITNLCPFGEVFNATRFASVYAWNRKRISNCVADYSVLYNSASFSTFKCYGVSPTKLNDLCFTNVYADSFVIRGDEVRQIAPGQTGKIADYNYKLPDDFTGCVIAWNSNNLDSKVGGNYNYLYRLFRKSNLKPFERDISTEIYQAGSTPCNGVEGFNCYFPLQSYGFQPTNGVGYQPYRVVVLSFELLHAPATVCGPKKSTNLVKNKCVNFNFNGLTGTGVLTESNKKFLPFQQFGRDIADTTDAVRDPQTLEILDITPCSFGGVSVITPGTNTSNQVAVLYQGVNCTEVPVAIHADQLTPTWRVYSTGSNVFQTRAGCLIGAEHVNNSYECDIPIGAGICASYQTQTNSPRRARSVASQSIIAYTMSLGAENSVAYSNNSIAIPTNFTISVTTEILPVSMTKTSVDCTMYICGDSTECSNLLLQYGSFCTQLNRALTGIAVEQDKNTQEVFAQVKQIYKTPPIKDFGGFNFSQILPDPSKPSKRSFIEDILFNKVTLADAGFIKQYGDCLGDIAARDLICAQKFNGLTVLPPLLTDEMIAQYTSALLAGTITSGWTFGAGAALQIPFAMQMAYRFNGIGVTQNVLYENQKLIANQFNSAIGKIQDSLSSTASALGKLQDVVNQNAQALNTLVKQLSSNFGAISSVLNDILSRLDKVEAEVQIDRLITGRLQSLQTYVTQQLIRAAEIRASANLAATKMSECVLGQSKRVDFCGKGYHLMSFPQSAPHGVVFLHVTYVPAQEKNFTTAPAICHDGKAHFPREGVFVSNGTHWFVTQRNFYEPQIITTDNTFVSGNCDVVIGIVNNTVYDPLQPELDSGGSGYIPEAPRDGQAYVRKDGEWVLLSTFL

SEQ ID NO: 9712 - protein, 1177 aa, Artificial Sequence
  SARS-CoV-2/Congo/158/2020__EPI_ISL_417950 spike protein (1-1147) Foldon construct
MFVFLVLLPLVSSQCVNLTTRTQLPPAYTNSFTRGVYYPDKVFRSSVLHSTQDLFLPFFSNVTWFHAIHVSGTNGTKRFDNPVLPFNDGVYFASTEKSNIIRGWIFGTTLDSKTQSLLIVNNATNVVIKVCEFQFCNDPFLGVYYHKNNKSWMESEFRVYSSANNCTFEYVSQPFLMDLEGKQGNFKNLREFVFKNIDGYFKIYSKHTPINLVRDLPQGFSALEPLVDLPIGINITRFQTLLALHRSYLTPGDSSSGWTAGAAAYYVGYLQPRTFLLKYNENGTITDAVDCALDPLSETKCTLKSFTVEKGIYQTSNFRVQPTESIVRFPNITNLCPFGEVFNATRFASVYAWNRKRISNCVADYSVLYNSASFSTFKCYGVSPTKLNDLCFTNVYADSFVIRGDEVRQIAPGQTGKIADYNYKLPDDFTGCVIAWNSNNLDSKVGGNYNYLYRLFRKSNLKPFERDISTEIYQAGSTPCNGVEGFNCYFPLQSYGFQPTNGVGYQPYRVVVLSFELLHAPATVCGPKKSTNLVKNKCVNFNFNGLTGTGVLTESNKKFLPFQQFGRDIADTTDAVRDPQTLEILDITPCSFGGVSVITPGTNTSNQVAVLYQDVNCTEVPVAIHADQLTPTWRVYSTGSNVFQTRAGCLIGAEHVNNSYECDIPIGAGICASYQTQTNSPRRARSVASQSIIAYTMSLGAENSVAYSNNSIAIPTNFTISVTTEILPVSMTKTSVDCTMYICGDSTECSNLLLQYGSFCTQLNRALTGIAVEQDKNTQEVFAQVKQIYKTPPIKDFGGFNFSQILPDPSKPSKRSFIEDLLFNKVTLADAGFIKQYGDCLGDIAARDLICAQKFNGLTVLPPLLTDEMIAQYTSALLAGTITSGWTFGAGAALQIPFAMQMAYRFNGIGVTQNVLYENQKLIANQFNSAIGKIQDSLSSTASALGKLQDVVNQNAQALNTLVKQLSSNFGAISSVLNDILSRLDKVEAEVQIDRLITGRLQSLQTYVTQQLIRAAEIRASANLAATKMSECVLGQSKRVDFCGKGYHLMSFPQSAPHGVVFLHVTYVPAQEKNFTTAPAICHDGKAHFPREGVFVSNGTHWFVTQRNFYEPQIITTDNTFLSGNCDVVIGIVNNTVYDPLQPELDSGGSGYIPEAPRDGQAYVRKDGEWVLLSTFL

SEQ ID NO: 9713 - protein, 1177 aa, Artificial Sequence
  SARS-CoV-2/USA/UT-00034/2020__EPI_ISL_417977 spike protein (1-1147) Foldon construct
MFVFLVLLPLVSSQCVNLTTRTQLPPAYTNSFTRGVYYPDKVFRSSVLHSTQDLFLPFFSNVTWFHAIHVSGTNGTKRFDNPVLPFNDGVYFASTEKSNIIRGWIFGTTLDSKTQSLLIVNNATNVVIKVCEFQFCNDPFLGVYYYKNNKSWMESEFRVYSSANNCTFEYVSQPFLMDLEGKQGNFKNLREFVFKNIDGYFKIYSKHTPINLVRDLPQGFSALEPLVDLPIGINITRFQTLLALHRSYLTPGDSSSGWTAGAAAYYVGYLQPRTFLLKYNENGTITDAVDCALDPLSETKCTLKSFTVEKGIYQTSNFRVQPTESIVRFPNITNLCPFGEVFNATRFASVYAWNRKRISNCVADYSVLYNSASFSTFKCYGVSPTKLNDLCFTNVYADSFVIRGDEVRQIAPGQTGKIADYNYKLPDDFTGCVIAWNSNNLDSKVGGNYNYLYRLFRKSNLKPFERDISTEIYQAGSTPCNGVEGFNCYFPLQSYGFQPTNGVGYQPYRVVVLSFELLHAPATVCGPKKSTNLVKNKCVNFNFNGLTGTGVLTESNKKFLPFQQFGRDIADTTDAVRDPQTLEILDITPCSFGGVSVITPGTNTSNQVAVLYQGVNCTEVPVAIHADQLTPTWRVYSTGSNVFQTRAGCLIGAEHVNNSYECDIPIGAGICASYQTQTNSPRRARSVASQSIIAYTMSLGAENSVAYSNNSIAIPTNFTISVTTEILPVSMTKTSVDCTMYICGDSTECSNLLLQYGSFCTQLNRALTGIAVEQDKNTQEVFAQVKQIYKTPPIKDFGGFNFSQILPDPSKPSKRSFIEDLLFNKVTLADAGFIKQYGDCLGDIAARDLICAQKFNGLTVLPPLLTDEMIAQYTSALLAGTITSGWTFGAGAALQIPFAMQMAYRFNGIGVTQNVLYENQKLIANQFNSAIGKIQDSLSSTASALGKLQDVVNQNAQALNTLVKQLSSNFGAISSVLNDILSRLDKVEAEVQIDRLITGRLQSLQTYVTQQLIRAAEIRASANLAATKMSECVLGQSKRVDFCGKGYHLMSFPQSAPHGVVFLHVTYVPAQEKNFTTAPAICHDGKAHFPREGVFVSNGTHWFVTQRNFYEPQIITTDNTFVSGNCDVVIGIVNNTVYDPLQPELDSGGSGYIPEAPRDGQAYVRKDGEWVLLSTFL

SEQ ID NO: 9714 - protein, 1177 aa, Artificial Sequence
  SARS-CoV-2/USA/UT-00033/2020__EPI_ISL_417976 spike protein (1-1147) Foldon construct
MFVFLVLLPLVSSQCVNLTTRTQLPPAYTNSFTRGVYYPDKVFRSSVLHSTQDLFLPFFSNVTWFHAIHVSGTNGTKRFDNPVLPFNDGVYFASTEKSNIIRGWIFGTTLDSKTQSLLIVNNATNVVIKVCEFQFCNDPFLGVYYHKNNKSWMESEFRVYSSANNCTFEYVSQPFLMDLEGKQGNFKNLREFVFKNIDGYFKIYSKHTPINLVRDLPQGFSALEPLVDLPIGINITRFQTLLALHRSYLTPGDSSSGLTAGAAAYYVGYLQPRTFLLKYNENGTITDAVDCALDPLSETKCTLKSFTVEKGIYQTSNFRVQPTESIVRFPNITNLCPFGEVFNATRFASVYAWNRKRISNCVADYSVLYNSASFSTFKCYGVSPTKLNDLCFTNVYADSFVIRGDEVRQIAPGQTGKIADYNYKLPDDFTGCVIAWNSNNLDSKVGGNYNYLYRLFRKSNLKPFERDISTEIYQAGSTPCNGVEGFNCYFPLQSYGFQPTNGVGYQPYRVVVLSFELLHAPATVCGPKKSTNLVKNKCVNFNFNGLTGTGVLTESNKKFLPFQQFGRDIADTTDAVRDPQTLEILDITPCSFGGVSVITPGTNTSNQVAVLYQGVNCTEVPVAIHADQLTPTWRVYSTGSNVFQTRAGCLIGAEHVNNSYECDIPIGAGICASYQTQTNSPRRARSVASQSIIAYTMSLGAENSVAYSNNSIAIPTNFTISVTTEILPVSMTKTSVDCTMYICGDSTECSNLLLQYGSFCTQLNRALTGIAVEQDKNTQEVFAQVKQIYKTPPIKDFGGFNFSQILPDPSKPSKRSFIEDLLFNKVTLADAGFIKQYGDCLGDIAARDLICAQKFNGLTVLPPLLTDEMIAQYTSALLAGTITSGWTFGAGAALQIPFAMQMAYRFNGIGVTQNVLYENQKLIANQFNSAIGKIQDSLSSTASALGKLQDVVNQNAQALNTLVKQLSSNFGAISSVLNDILSRLDKVEAEVQIDRLITGRLQSLQTYVTQQLIRAAEIRASANLAATKMSECVLGQSKRVDFCGKGYHLMSFPQSAPHGVVFLHVTYVPAQEKNFTTAPAICHDGKAHFPREGVFVSNGTHWFVTQRNFYEPQIITTDNTFVSGNCDVVIGIVNNTVYDPLQPELDSGGSGYIPEAPRDGQAYVRKDGEWVLLSTFL

SEQ ID NO: 9715 - protein, 1177 aa, Artificial Sequence
  SARS-CoV-2/USA/WI-13/2020__EPI_ISL_417516 spike protein (1-1147) Foldon construct
MFVFLVLLPLVSSQCVNLTTRTQLPPAYTNSFTRGVYYPDKVFRSSVLHSTQDLFLPFFSNVTWFHAIHVSGTNGTKRFDNPVLPFNDGVYFASTEKSNIIRGWIFGTTLDSKTQSLLIVNNATNVVIKVCEFQFCNDPFLGVYYHKNNKSWMESEFRVYSSANNCTFEYVSQPFLMDLEGKQGNFKNLREFVFKNIDGYFKIYSKHTPINLVRDLPQGFSALEPLVDLPIGINITRFQTLLALHRSYLTPGDSSSGWTAGAAAYYVGYLQPRTFLLKYNENGTITDAVDCALDPLSETKCTLKSFTVEKGIYQTSNFRVLPTESIVRFPNITNLCPFGEVFNATRFASVYAWNRKRISNCVADYSVLYNSASFSTFKCYGVSPTKLNDLCFTNVYADSFVIRGDEVRQIAPGQTGKIADYNYKLPDDFTGCVIAWNSNNLDSKVGGNYNYLYRLFRKSNLKPFERDISTEIYQAGSTPCNGVEGFNCYFPLQSYGFQPTNGVGYQPYRVVVLSFELLHAPATVCGPKKSTNLVKNKCVNFNFNGLTGTGVLTESNKKFLPFQQFGRDIADTTDAVRDPQTLEILDITPCSFGGVSVITPGTNTSNQVAVLYQGVNCTEVPVAIHADQLTPTWRVYSTGSNVFQTRAGCLIGAEHVNNSYECDIPIGAGICASYQTQTNSPRRARSVASQSIIAYTMSLGAENSVAYSNNSIAIPTNFTISVTTEILPVSMTKTSVDCTMYICGDSTECSNLLLQYGSFCTQLNRALTGIAVEQDKNTQEVFAQVKQIYKTPPIKDFGGFNFSQILPDPSKPSKRSFIEDLLFNKVTLADAGFIKQYGDCLGDIAARDLICAQKFNGLTVLPPLLTDEMIAQYTSALLAGTITSGWTFGAGAALQIPFAMQMAYRFNGIGVTQNVLYENQKLIANQFNSAIGKIQDSLSSTASALGKLQDVVNQNAQALNTLVKQLSSNFGAISSVLNDILSRLDKVEAEVQIDRLITGRLQSLQTYVTQQLIRAAEIRASANLAATKMSECVLGQSKRVDFCGKGYHLMSFPQSAPHGVVFLHVTYVPAQEKNFTTAPAICHDGKAHFPREGVFVSNGTHWFVTQRNFYEPQIITTDNTFVSGNCDVVIGIVNNTVYDPLQPELDSGGSGYIPEAPRDGQAYVRKDGEWVLLSTFL

SEQ ID NO: 9716 - protein, 1176 aa, Artificial Sequence
  SARS-CoV-2/India/1-27/2020__EPI_ISL_413522 spike protein (1-1146) Foldon construct
MFVFLVLLPLVSSQCVNLTTRTQLPPAYTNSFTRGVYYPDKVFRSSVLHSTQDLFLPFFSNVTWFHAIHVSGTNGTKRFDNPVLPFNDGVYFASTEKSNIIRGWIFGTTLDSKTQSLLIVNNATNVVIKVCEFQFCNDPFLGVYHKNNKSWMESEFRVYSSANNCTFEYVSQPFLMDLEGKQGNFKNLREFVFKNIDGYFKIYSKHTPINLVRDLPQGFSALEPLVDLPIGINITRFQTLLALHRSYLTPGDSSSGWTAGAAAYYVGYLQPRTFLLKYNENGTITDAVDCALDPLSETKCTLKSFTVEKGIYQTSNFRVQPTESIVRFPNITNLCPFGEVFNATRFASVYAWNRKRISNCVADYSVLYNSASFSTFKCYGVSPTKLNDLCFTNVYADSFVIRGDEVIQIAPGQTGKIADYNYKLPDDFTGCVIAWNSNNLDSKVGGNYNYLYRLFRKSNLKPFERDISTEIYQAGSTPCNGVEGFNCYFPLQSYGFQPTNGVGYQPYRVVVLSFELLHAPATVCGPKKSTNLVKNKCVNFNFNGLTGTGVLTESNKKFLPFQQFGRDIADTTDAVRDPQTLEILDITPCSFGGVSVITPGTNTSNQVAVLYQDVNCTEVPVAIHADQLTPTWRVYSTGSNVFQTRAGCLIGAEHVNNSYECDIPIGAGICASYQTQTNSPRRARSVASQSIIAYTMSLGAENSVAYSNNSIAIPTNFTISVTTEILPVSMTKTSVDCTMYICGDSTECSNLLLQYGSFCTQLNRALTGIAVEQDKNTQEVFAQVKQIYKTPPIKDFGGFNFSQILPDPSKPSKRSFIEDLLFNKVTLADAGFIKQYGDCLGDIAARDLICAQKFNGLTVLPPLLTDEMIAQYTSALLAGTITSGWTFGAGAALQIPFAMQMAYRFNGIGVTQNVLYENQKLIANQFNSAIGKIQDSLSSTASALGKLQDVVNQNAQALNTLVKQLSSNFGAISSVLNDILSRLDKVEAEVQIDRLITGRLQSLQTYVTQQLIRAAEIRASANLAATKMSECVLGQSKRVDFCGKGYHLMSFPQSAPHGVVFLHVTYVPAQEKNFTTAPAICHDGKAHFPREGVFVSNGTHWFVTQRNFYEPQIITTDNTFVSGNCDVVIGIVNNTVYDPLQPELDSGGSGYIPEAPRDGQAYVRKDGEWVLLSTFL

SEQ ID NO: 9717 - protein, 1171 aa, Artificial Sequence
  SARS-CoV-2/pangolin/Guangxi/P4L/2017__EPI_ISL_410538 spike protein (1-1141) Foldon construct
MFVFLFVLPLVSSQCVNLTTRTGIPPGYTNSSTRGVYYPDKVFRSSILHLTQDLFLPFFSNVTWFNTINYQGGFKKFDNPVLPFNDGVYFASTEKSNIIRGWIFGTTLDARTQSLLIVNNATNVVIKVCEFQFCTDPFLGVYYHNNNKTWVENEFRVYSSANNCTFEYISQPFLMDLEGKQGNFKNLREFVFKNVDGYFKIYSKHTPIDLVRDLPRGFAALEPLVDLPIGINITRFQTLLALHRSYLTPGNLESGWTTGAAAYYVGYLQQRTFLLSYNQNGTITDAVDCSLDPLSETKCTLKSLTVEKGIYQTSNFRVQPTISIVRFPNITNLCPFGEVFNASKFASVYAWNRKRISNCVADYSVLYNSTSFSTFKCYGVSPTKLNDLCFTNVYADSFVVKGDEVRQIAPGQTGVIADYNYKLPDDFTGCVIAWNSVKQDALTGGNYGYLYRLFRKSKLKPFERDISTEIYQAGSTPCNGQVGLNCYYPLERYGFHPTTGVNYQPFRVVVLSFELLNGPATVCGPKLSTTLVKDKCVNFNFNGLTGTGVLTTSKKQFLPFQQFGRDISDTTDAVRDPQTLEILDITPCSFGGVSVITPGTNTSNQVAVLYQDVNCTEVPMAIHAEQLTPAWRVYSAGANVFQTRAGCLVGAEHVNNSYECDIPVGAGICASYHSMSSLRSVNQRSIIAYTMSLGAENSVAYSNNSIAIPTNFTISVTTEILPVSMTKTSVDCTMYICGDSIECSNLLLQYGSFCTQLNRALTGIAVEQDKNTQEVFAQVKQIYKTPPIKDFGGFNFSQILPDPSKPSKRSFIEDLLFNKVTLADAGFIKQYGDCLGDIAARDLICAQKFNGLTVLPPLLTDEMIAQYTSALLAGTITSGWTFGAGAALQIPFAMQMAYRFNGIGVTQNVLYENQKLIANQFNSAIGKIQDSLSSTASALGKLQDVVNQNAQALNTLVKQLSSNFGAISSVLNDILSRLDKVEAEVQIDRLITGRLQSLQTYVTQQLIRAAEIRASANLAATKMSECVLGQSKRVDFCGKGYHLMSFPQSAPHGVVFLHVTYVPAQEKNFTTAPAICHEGKAHFPREGVFVSNGTHWFITQRNFYEPQIITTDNTFVSGSCDVVIGIVNNTVYDPLQPELDSGGSGYIPEAPRDGQAYVRKDGEWVLLSTFL

SEQ ID NO: 9718 - protein, 1171 aa, Artificial Sequence
  SARS-CoV-2/pangolin/Guangxi/P5L/2017__EPI_ISL_410540 spike protein (1-1141) Foldon construct
MFVFLFVLPLVSSQCVNLTTRTGIPPGYTNSSTRGVYYPDKVFRSSILHLTQDLFLPFFSNVTWFNTINYQGGFKKFDNPVLPFNDGVYFASTEKSNIIRGWIFGTTLDARTQSLLIVNNATNVVIKVCEFQFCTDPFLGVYYHNNNKTWVENEFRVYSSANNCTFEYISQPFLMDLEGKQGNFKNLREFVFKNVDGYFKIYSKHTPIDLVRDLPRGFAALEPLVDLPIGINITRFQTLLALHRSYLTPGKLESGWTTGAAAYYVGYLQQRTFLLSYNQNGTITDAVDCSLDPLSETKCTLKSLTVEKGIYQTSNFRVQPTISIVRFPNITNLCPFGEVFNASKFASVYAWNRKRISNCVADYSVLYNSTSFSTFKCYGVSPTKLNDLCFTNVYADSFVVKGDEVRQIAPGQTGVIADYNYKLPDDFTGCVIAWNSVKQDALTGGNYGYLYRLFRKSKLKPFERDISTEIYQAGSTPCNGQVGLNCYYPLERYGFHPTTGVNYQPFRVVVLSFELLNGPATVCGPKLSTTLVKDKCVNFNFNGLTGTGVLTTSKKQFLPFQQFGRDISDTTDAVRDPQTLEILDITPCSFGGVSVITPGTNTSNQVAVLYQDVNCTEVPMAIHAEQLTPAWRVYSAGANVFQTRAGCLVGAEHVNNSYECDIPVGAGICASYHSMSSFRSVNQRSIIAYTMSLGAENSVAYSNNSIAIPTNFTISVTTEILPVSMTKTSVDCTMYICGDSIECSNLLLQYGSFCTQLNRALTGIAVEQDKNTQEVFAQVKQIYKTPPIKDFGGFNFSQILPDPSKPSKRSFIEDLLFNKVTLADAGFIKQYGDCLGDIAARDLICAQKFNGLTVLPPLLTDEMIAQYTSALLAGTITSGWTFGAGAALQIPFAMQMAYRFNGIGVTQNVLYENQKLIANQFNSAIGKIQDSLSSTASALGKLQDVVNQNAQALNTLVKQLSSNFGAISSVLNDILSRLDKVEAEVQIDRLITGRLQSLQTYVTQQLIRAAEIRASANLAATKMSECVLGQSKRVDFCGKGYHLMSFPQSAPHGVVFLHVTYVPAQEKNFTTAPAICHEGKAHFPREGVFVSNGTHWFITQRNFYEPQIITTDNTFVSGSCDVVIGIVNNTVYDPLQPELDSGGSGYIPEAPRDGQAYVRKDGEWVLLSTFL

SEQ ID NO: 9719 - protein, 1171 aa, Artificial Sequence
  SARS-CoV-2/pangolin/Guangxi/P5E/2017__EPI_ISL_410541 spike protein (1-1141) Foldon construct
MFVFLFVLPLVSSQCVNLTTRTGIPPGYTNSSTRGVYYPDKVFRSSILHLTQDLFLPFFSNVTWFNTITYQGGSKKFDNPVLPFNDGVYFASTEKSNIIRGWIFGTTLDARTQSLLIVNNATNVVIKVCEFQFCTDPFLGVYYHNNNKTWVENEFRVYSSANNCTFEYISQPFLMDLEGKQGNFKNLREFVFKNVDGYFKIYSKHTPIDLVRDLPRGFAALEPLVDLPIGINITRFQTLLALHRSYLTPGKLESGWTTGAAAYYVGYLQQRTFLLSYNQNGTITDAVDCSLDPLSETKCTLKSLTVEKGIYQTSNFRVQPTISIVRFPNITNLCPFGEVFNASKFASVYAWNRKRISNCVADYSVLYNSTSFSTFKCYGVSPTKLNDLCFTNVYADSFVVKGDEVRQIAPGQTGVIADYNYKLPDDFTGCVIAWNSVKQDALTGDNYGYLYRLFRKSKLKPFERDISTEIYQAGSTPCNGQVGLNCYYPLERYGFHPTTGVNYQPFRVVVLSFELLNGPATVCGPKLSTTLVKDKCVNFNFNGLTGTGVLTTSKKQFLPFQQFGRDISDTTDAVRDPQTLEILDITPCSFGGVSVITPGTNTSNQVAVLYQDVNCTEVPMAIHAEQLTPAWRVYSAGANVFQTRAGCLVGAEHVNNSYECDIPVGAGICASYHSMSSFRSVNQRSIIAYTMSLGAENSVAYSNNSIAIPTNFTISVTTEILPVSMTKTSVDCTMYICGDSIECSNLLLQYGSFCTQLNRALTGIAVEQDKNTQEVFAQVKQIYKTPPIKDFGGFNFSQILPDPSKPSKRSFIEDLLFNKVTLADAGFIKQYGDCLGDIAARDLICAQKFNGLTVLPPLLTDEMIAQYTSALLAGTITSGWTFGAGAALQIPFAMQMAYRFNGIGVTQNVLYENQKLIANQFNSAIGKIQDSLSSTASALGKLQDVVNQNAQALNTLVKQLSSNFGAISSVLNDILSRLDKVEAEVQIDRLITGRLQSLQTYVTQQLIRAAEIRASANLAATKMSECVLGQSKRVDFCGKGYHLMSFPQSAPHGVVFLHVTYVPAQEKNFTTAPAICHEGKAHFPREGVFVSNGTHWFITQRNFYEPQIITTDNTFVSGSCDVVIGIVNNTVYDPLQPELDSGGSGYIPEAPRDGQAYVRKDGEWVLLSTFL

SEQ ID NO: 9720 - protein, 1169 aa, Artificial Sequence
  SARS-CoV-2/pangolin/Guangxi/P1E/2017__EPI_ISL_410539 spike protein (1-1139) Foldon construct
MFVFLFVLPLVSSQCVNLTTRTGIQPGYTNSSTRGVYYPDKVFRSSILHLTQDLFLPFFSNVTWFNTINYQGGFKKFDNPVLPFNDGVYFASTEKSNIIRGWIFGTTLDARTQSLLIVNNATNVVIKVCEFQFCTDPFLGVYYHNNNKTWVENEFRVYSSANNCTFEYISQPFLMDLEGKQGNFKNLREFVFKNVDGYFKIYSKHTPIDLVRDLPRGFAALEPLVDLPIGINITRFQTLLALHRSYLTPGKLESGWTTGAAAYYVGYLQQRTFLLSYNQNGTITDAVDCSLDPLSETKCTLKSLTVEKGIYQTSNFRVQPTISIVRFPNITNLCPFGEVFNASKFASVYAWNRKRISNCVADYSVLYNSTSFSTFKCYGVSPTKLNDLCFTNVYADSFVVKGDEVRQIAPGQTGVIADYNYKLPDDFTGCVIAWNSVKQDALTGGNYLYRLFRKSKLKPFERDISTEIYQAGSTPCNGQVGLNCYYPLERYGFHPTTGVNYQPFRVVVLSFELLNGPATVCGPKLSTTLVKDKCVNFNFNGLTGTGVLTTSKKQFLPFQQFGRDISDTTDAVRDPQTLEILDITPCSFGGVSVITPGTNTSNQVAVLYQDVNCTEVPMAIHAEQLTPAWRVYSAGANVFQTRAGCLVGAEHVNNSYECDIPVGAGICASYHSMSSLRSVNQRSIIAYTMSLGAENSVAYSNNSIAIPTNFTISVTTEILPVSMTKTSVDCTMYICGDSIECSNLLLQYGSFCTQLNRALTGIAVEQDKNTQEVFAQVKQIYKTPPIKDFGGFNFSQILPDPSKPSKRSFIEDLLFNKVTLADAGFIKQYGDCLGDIAARDLICAQKFNGLTVLPPLLTDEMIAQYTSALLAGTITSGWTFGAGAALQIPFAMQMAYRFNGIGVTQNVLYENQKLIANQFNSAIGKIQDSLSSTASALGKLQDVVNQNAQALNTLVKQLSSNFGAISSVLNDILSRLDKVEAEVQIDRLITGRLQSLQTYVTQQLIRAAEIRASANLAATKMSECVLGQSKRVDFCGKGYHLMSFPQSAPHGVVFLHVTYVPAQEKNFTTAPAICHEGKAHFPREGVFVSNGTHWFITQRNFYEPQIITTDNTFVSGSCDVVIGIVNNTVYDPLQPELDSGGSGYIPEAPRDGQAYVRKDGEWVLLSTFL

SEQ ID NO: 9721 - protein, 1177 aa, Artificial Sequence
  SARS-CoV-2/Wuhan/WIV05/2019__EPI_ISL_402128 spike protein (1-1147)(K986P_V987P) Foldon construct
MFVFLVLLPLVSSQCVNLTTRTQLPPAYTNSFTRGVYYPDKVFRSSVLHSTQDLFLPFFSNVTWFHAIHVSGTNGTKRFDNPVLPFNDGVYFASTEKSNIIRGWIFGTTLDSKTQSLLIVNNATNVVIKVCEFQFCNDPFLGVYYHKNNKSWMESEFRVYSSANNCTFEYVSQPFLMDLEGKQGNFKNLREFVFKNIDGYFKIYSKHTPINLVRDLPQGFSALEPLVDLPIGINITRFQTLLALHRSYLTPGDSSSGWTAGAAAYYVGYLQPRTFLLKYNENGTITDAVDCALDPLSETKCTLKSFTVEKGIYQTSNFRVQPTESIVRFPNITNLCPFGEVFNATRFASVYAWNRKRISNCVADYSVLYNSASFSTFKCYGVSPTKLNDLCFTNVYADSFVIRGDEVRQIAPGQTGKIADYNYKLPDDFTGCVIAWNSNNLDSKVGGNYNYLYRLFRKSNLKPFERDISTEIYQAGSTPCNGVEGFNCYFPLQSYGFQPTNGVGYQPYRVVVLSFELLHAPATVCGPKKSTNLVKNKCVNFNFNGLTGTGVLTESNKKFLPFQQFGRDIADTTDAVRDPQTLEILDITPCSFGGVSVITPGTNTSNQVAVLYQDVNCTEVPVAIHADQLTPTWRVYSTGSNVFQTRAGCLIGAEHVNNSYECDIPIGAGICASYQTQTNSPRRARSVASQSIIAYTMSLGAENSVAYSNNSIAIPTNFTISVTTEILPVSMTKTSVDCTMYICGDSTECSNLLLQYGSFCTQLNRALTGIAVEQDKNTQEVFAQVKQIYKTPPIKDFGGFNFSQILPDPSKPSKRSFIEDLLFNKVTLADAGFIKQYGDCLGDIAARDLICAQKFNGLTVLPPLLTDEMIAQYTSALLAGTITSGWTFGAGAALQIPFAMQMAYRFNGIGVTQNVLYENQKLIANQFNSAIGKIQDSLSSTASALGKLQDVVNQNAQALNTLVKQLSSNFGAISSVLNDILSRLDPPEAEVQIDRLITGRLQSLQTYVTQQLIRAAEIRASANLAATKMSECVLGQSKRVDFCGKGYHLMSFPQSAPHGVVFLHVTYVPAQEKNFTTAPAICHDGKAHFPREGVFVSNGTHWFVTQRNFYEPQIITTDNTFVSGNCDVVIGIVNNTVYDPLQPELDSGGSGYIPEAPRDGQAYVRKDGEWVLLSTFL

SEQ ID NO: 9722 - protein, 1173 aa, Artificial Sequence
  SARS-CoV-2/bat/Yunnan/RaTG13/2013__EPI_ISL_402131 spike protein (1-1143)(K982P_V983P) Foldon construct
MFVFLVLLPLVSSQCVNLTTRTQLPPAYTNSSTRGVYYPDKVFRSSVLHLTQDLFLPFFSNVTWFHAIHVSGTNGIKRFDNPVLPFNDGVYFASTEKSNIIRGWIFGTTLDSKTQSLLIVNNATNVVIKVCEFQFCNDPFLGVYYHKNNKSWMESEFRVYSSANNCTFEYVSQPFLMDLEGKQGNFKNLREFVFKNIDGYFKIYSKHTPINLVRDLPPGFSALEPLVDLPIGINITRFQTLLALHRSYLTPGDSSSGWTAGAAAYYVGYLQPRTFLLKYNENGTITDAVDCALDPLSETKCTLKSFTVEKGIYQTSNFRVQPTDSIVRFPNITNLCPFGEVFNATTFASVYAWNRKRISNCVADYSVLYNSTSFSTFKCYGVSPTKLNDLCFTNVYADSFVITGDEVRQIAPGQTGKIADYNYKLPDDFTGCVIAWNSKHIDAKEGGNFNYLYRLFRKANLKPFERDISTEIYQAGSKPCNGQTGLNCYYPLYRYGFYPTDGVGHQPYRVVVLSFELLNAPATVCGPKKSTNLVKNKCVNFNFNGLTGTGVLTESNKKFLPFQQFGRDIADTTDAVRDPQTLEILDITPCSFGGVSVITPGTNASNQVAVLYQDVNCTEVPVAIHADQLTPTWRVYSTGSNVFQTRAGCLIGAEHVNNSYECDIPIGAGICASYQTQTNSRSVASQSIIAYTMSLGAENSVAYSNNSIAIPTNFTISVTTEILPVSMTKTSVDCTMYICGDSTECSNLLLQYGSFCTQLNRALTGIAVEQDKNTQEVFAQVKQIYKTPPIKDFGGFNFSQILPDPSKPSKRSFIEDLLFNKVTLADAGFIKQYGDCLGDIAARDLICAQKFNGLTVLPPLLTDEMIAQYTSALLAGTITSGWTFGAGAALQIPFAMQMAYRFNGIGVTQNVLYENQKLIANQFNSAIGKIQDSLSSTASALGKLQDVVNQNAQALNTLVKQLSSNFGAISSVLNDILSRLDPPEAEVQIDRLITGRLQSLQTYVTQQLIRAAEIRASANLAATKMSECVLGQSKRVDFCGKGYHLMSFPQSAPHGVVFLHVTYVPAQEKNFTTAPAICHDGKAHFPREGVFVSNGTHWFVTQRNFYEPQIITTDNTFVSGSCDVVIGIVNNTVYDPLQPELDSGGSGYIPEAPRDGQAYVRKDGEWVLLSTFL

SEQ ID NO: 9723 - protein, 1177 aa, Artificial Sequence
  SARS-CoV-2/Wuhan/HBCDC-HB-01/2019__EPI_ISL_402132 spike protein (1-1147)(K986P_V987P) Foldon construct
MFVFLVLLPLVSSQCVNLTTRTQLPPAYTNSITRGVYYPDKVFRSSVLHSTQDLFLPFFSNVTWFHAIHVSGTNGTKRFDNPVLPFNDGVYFASTEKSNIIRGWIFGTTLDSKTQSLLIVNNATNVVIKVCEFQFCNDPFLGVYYHKNNKSWMESEFRVYSSANNCTFEYVSQPFLMDLEGKQGNFKNLREFVFKNIDGYFKIYSKHTPINLVRDLPQGFSALEPLVDLPIGINITRFQTLLALHRSYLTPGDSSSGWTAGAAAYYVGYLQPRTFLLKYNENGTITDAVDCALDPLSETKCTLKSFTVEKGIYQTSNFRVQPTESIVRFPNITNLCPFGEVFNATRFASVYAWNRKRISNCVADYSVLYNSASFSTFKCYGVSPTKLNDLCFTNVYADSFVIRGDEVRQIAPGQTGKIADYNYKLPDDFTGCVIAWNSNNLDSKVGGNYNYLYRLFRKSNLKPFERDISTEIYQAGSTPCNGVEGFNCYFPLQSYGFQPTNGVGYQPYRVVVLSFELLHAPATVCGPKKSTNLVKNKCVNFNFNGLTGTGVLTESNKKFLPFQQFGRDIADTTDAVRDPQTLEILDITPCSFGGVSVITPGTNTSNQVAVLYQDVNCTEVPVAIHADQLTPTWRVYSTGSNVFQTRAGCLIGAEHVNNSYECDIPIGAGICASYQTQTNSPRRARSVASQSIIAYTMSLGAENSVAYSNNSIAIPTNFTISVTTEILPVSMTKTSVDCTMYICGDSTECSNLLLQYGSFCTQLNRALTGIAVEQDKNTQEVFAQVKQIYKTPPIKDFGGFNFSQILPDPSKPSKRSFIEDLLFNKVTLADAGFIKQYGDCLGDIAARDLICAQKFNGLTVLPPLLTDEMIAQYTSALLAGTITSGWTFGAGAALQIPFAMQMAYRFNGIGVTQNVLYENQKLIANQFNSAIGKIQDSLSSTASALGKLQDVVNQNAQALNTLVKQLSSNFGAISSVLNDILSRLDPPEAEVQIDRLITGRLQSLQTYVTQQLIRAAEIRASANLAATKMSECVLGQSKRVDFCGKGYHLMSFPQSAPHGVVFLHVTYVPAQEKNFTTAPAICHDGKAHFPREGVFVSNGTHWFVTQRNFYEPQIITTDNTFVSGNCDVVIGIVNNTVYDPLQPELDSGGSGYIPEAPRDGQAYVRKDGEWVLLSTFL

SEQ ID NO: 9724 - protein, 1177 aa, Artificial Sequence
  SARS-CoV-2/Guangdong/20SF028/2020__EPI_ISL_403936 spike protein (1-1147)(K986P_V987P) Foldon construct
MFVFLVLLPLVSSQCVNLTTRTQLPPAYTNSFTRGVYYPDKVFRSSVLYSTQDLFLPFFSNVTWFHAIHVSGTNGTKRFDNPVLPFNDGVYFASTEKSNIIRGWIFGTTLDSKTQSLLIVNNATNVVIKVCEFQFCNDPFLGVYYHKNNKSWMESEFRVYSSANNCTFEYVSQPFLMDLEGKQGNFKNLREFVFKNIDGYFKIYSKHTPINLVRDLPQGFSALEPLVDLPIGINITRFQTLLALHRSYLTPGDSSSGWTAGAAAYYVGYLQPRTFLLKYNENGTITDAVDCALDPLSETKCTLKSFTVEKGIYQTSNFRVQPTESIVRFPNITNLCPFGEVFNATRFASVYAWNRKRISNCVADYSVLYNSASFSTFKCYGVSPTKLNDLCFTNVYADSFVIRGDEVRQIAPGQTGKIADYNYKLPDDFTGCVIAWNSNNLDSKVGGNYNYLYRLFRKSNLKPFERDISTEIYQAGSTPCNGVEGFNCYFPLQSYGFQPTNGVGYQPYRVVVLSFELLHAPATVCGPKKSTNLVKNKCVNFNFNGLTGTGVLTESNKKFLPFQQFGRDIADTTDAVRDPQTLEILDITPCSFGGVSVITPGTNTSNQVAVLYQDVNCTEVPVAIHADQLTPTWRVYSTGSNVFQTRAGCLIGAEHVNNSYECDIPIGAGICASYQTQTNSPRRARSVASQSIIAYTMSLGAENSVAYSNNSIAIPTNFTISVTTEILPVSMTKTSVDCTMYICGDSTECSNLLLQYGSFCTQLNRALTGIAVEQDKNTQEVFAQVKQIYKTPPIKDFGGFNFSQILPDPSKPSKRSFIEDLLFNKVTLADAGFIKQYGDCLGDIAARDLICAQKFNGLTVLPPLLTDEMIAQYTSALLAGTITSGWTFGAGAALQIPFAMQMAYRFNGIGVTQNVLYENQKLIANQFNSAIGKIQDSLSSTASALGKLQDVVNQNAQALNTLVKQLSSNFGAISSVLNDILSRLDPPEAEVQIDRLITGRLQSLQTYVTQQLIRAAEIRASANLAATKMSECVLGQSKRVDFCGKGYHLMSFPQSAPHGVVFLHVTYVPAQEKNFTTAPAICHDGKAHFPREGVFVSNGTHWFVTQRNFYEPQIITTDNTFVSGNCDVVIGIVNNTVYDPLQPELDSGGSGYIPEAPRDGQAYVRKDGEWVLLSTFL

SEQ ID NO: 9725 - protein, 1177 aa, Artificial Sequence
  SARS-CoV-2/Shenzhen/SZTH-001/2020__EPI_ISL_406592 spike protein (1-1147)(K986P_V987P) Foldon construct
MFVFLVLLPLVSSQCVNLTTRTQLPPAYTNSFTRGVYYPDKVFRSSVLHSTQDLFLPFFSNVTWFHAIHVSGTNGTKRFDNPVLPFNDGVYFASTEKSNIIRGWIFGTTLDSKTQSLLIVNNATNVVIKVCEFQFCNDPFLGVYYHKNNKSWMESEFRVYSSANNCTFEYVSQPFLMDLEGKQGNFKNLREFVFKNIDGYFKIYSKHTPINLVRDLPQGFSALEPLVDLPIGINITRFQTLLALHRSYLTPGDSSSGWTAGAAAYYVGYLQPRTFLLKYNENGTITDAVDCALDPLSETKCTLKSFTVEKGIYQTSNFRVQPTESIVRFPNITNLCPFGEVFNATRFASVYAWNRKRISNCVADYSVLYNSASFSTFKCYGVSPTKLNDLCFTNVYADSFVIRGDEVRQIAPGQTGKIADYNYKLPDDFTGCVIAWNSNNLDSKVGGNYNYLYRLFRKSNLKPFERDISTEIYQAGSTPCNGVEGFNCYFPLQSYGFQPTNGVGYQPYRVVVLSFELLHAPATVCGPKKSTNLVKNKCVNFNFNGLTGTGVLTESNKKFLPFQQFGRDIADTTDAVRDPQTLEILDITPCSFGGVSVITPGTNTSNQVAVLYQDVNCTEVPVAIHADQLTPTWRVYSTGSNVFQTRAGCLIGAEHVNNSYECDIPIGAGICASYQTQTNSPRRARSVASQSIIAYTMSLGAENSVAYSNNSIAIPTNFTISVTTEILPVSMTKTSVDCTMYICGDSTECSNLLLQYGSFCTQLNRALTGIAVEQDKNTQEVFAQVKQIYKTPPIKDFGGFNFSQILPDPSKPSKRSFIEDLLFNKVTLADAGFIKQYGDCLGDIAARDLICAQKFNGLTVLPPLLTDEMIAQYTSALLAGTITSGWTFGAGAALQIPFAMQMAYRFNGIGVTQNVLYENQKLIANQFNSAIGKIQDSLSSTASALGKLQDVVNQNAQALNTLVKQLSSNFGAISSVLNDILSRLDPPEAEVQIDRLITGRLQSLQTYVTQQLIRAAEIRASANLAATKMSECVLGQSKRVDFCGKGYHLMSFPQSAPHGVVFLHVTYVPAQEKNFTTAPAICHDGKAHFPREGVFVSNGTHWFVTQRNFYEPQIITTDNTFVSGNCDVLIGIVNNTVYDPLQPELDSGGSGYIPEAPRDGQAYVRKDGEWVLLSTFL

SEQ ID NO: 9726 - protein, 1177 aa, Artificial Sequence
  SARS-CoV-2/Shenzhen/SZTH-004/2020__EPI_ISL_406595 spike protein (1-1147)(K986P_V987P) Foldon construct
MFVFLVLLPLVSSQCVNLTTRTQLPPAYTNSFTRGVYYPDKVFRSSVLHSTQDLFLPFFSNVTWFHAIHVSGTNGTKRFDNPVLPFNDGVYFASTEKSNIIRGWIFGTTLDSKTQSLLIVNNATNVVIKVCEFQFCNDPFLGVYYHKNNKSWMESEFRVYSSANNCTFEYVSQPFLMDLEGKQGNFKNLREFVFKNIDGYFKIYSKHTPINLVRDLPQGFSALEPLVDLPIGINITRFQTLLALHRSYLTPGDSSSGWTAGAAAYYVGYLQPRTFLLKYNENGTITDAVDCALDPLSETKCTLKSFTVEKGIYQTSNFRVQPTESIVRFPNITNLCPFGEVFNATRFASVYAWDRKRISNCVAYYSVLYNSASFSTFKCYGVSPTKLNDLCFTNVYADSFVIRGDEVRQIAPGQTGKIADYNYKLPDDFTGCVIAWNSNNLDSKVGGNYNYLYRLFRKSNLKPFERDISTEIYQAGSTPCNGVEGFNCYFPLQSYGFQPTNGVGYQPYRVVVLSFELLHAPATVCGPKKSTNLVKNKCVNFNFNGLTGTGVLTESNKKFLPFQQFGRDIADTTDAVRDPQTLEILDITPCSFGGVSVITPGTNTSNQVAVLYQDVNCTEVPVAIHADQLTPTWRVYSTGSNVFQTRAGCLIGAEHVNNSYECDIPIGAGICASYQTQTNSPRRARSVASQSIIAYTMSLGAENSVAYSNNSIAIPTNFTISVTTEILPVSMTKTSVDCTMYICGDSTECSNLLLQYGSFCTQLNRALTGIAVEQDKNTQEVFAQVKQIYKTPPIKDFGGFNFSQILPDPSKPSKRSFIEDLLFNKVTLADAGFIKQYGDCLGDIAARDLICAQKFNGLTVLPPLLTDEMIAQYTSALLAGTITSGWTFGAGAALQIPFAMQMAYRFNGIGVTQNVLYENQKLIANQFNSAIGKIQDSLSSTASALGKLQDVVNQNAQALNTLVKQLSSNFGAISSVLNDILSRLDPPEAEVQIDRLITGRLQSLQTYVTQQLIRAAEIRASANLAATKMSECVLGQSKRVDFCGKGYHLMSFPQSAPHGVVFLHVTYVPAQEKNFTTAPAICHDGKAHFPREGVFVSNGTHWFVTQRNFYEPQIITTDNTFVSGNCDVVIGIVNNTVYDPLQPELDSGGSGYIPEAPRDGQAYVRKDGEWVLLSTFL

SEQ ID NO: 9727 - protein, 1177 aa, Artificial Sequence
  SARS-CoV-2/France/IDF0372/2020__EPI_ISL_406596 spike protein (1-1147)(K986P_V987P) Foldon construct
MFVFLVLLPLVSSQCVNLTTRTQLPPAYTNSFTRGVYYPDKVFRSSVLHSTQDLFLPFFSNVTWFHAIHVSGTNGTKRFDNPVLPFNDGVYFASTEKSNIIRGWIFGTTLDSKTQSLLIVNNATNVVIKVCEFQFCNDPFLGVYYHKNNKSWMESEFRVYSSANNCTFEYVSQPFLMDLEGKQGNFKNLREFVFKNIDGYFKIYSKHTPINLVRDLPQGFSALEPLVDLPIGINITRFQTLLALHRSYLTPGDSSSGWTAGAAAYYVGYLQPRTFLLKYNENGTITDAVDCALDPLSETKCTLKSFTVEKGIYQTSNFRVQPTESIVRFPNITNLCPFGEVFNATRFASVYAWNRKRISNCVADYSFLYNSASFSTFKCYGVSPTKLNDLCFTNVYADSFVIRGDEVRQIAPGQTGKIADYNYKLPDDFTGCVIAWNSNNLDSKVGGNYNYLYRLFRKSNLKPFERDISTEIYQAGSTPCNGVEGFNCYFPLQSYGFQPTNGVGYQPYRVVVLSFELLHAPATVCGPKKSTNLVKNKCVNFNFNGLTGTGVLTESNKKFLPFQQFGRDIADTTDAVRDPQTLEILDITPCSFGGVSVITPGTNTSNQVAVLYQDVNCTEVPVAIHADQLTPTWRVYSTGSNVFQTRAGCLIGAEHVNNSYECDIPIGAGICASYQTQTNSPRRARSVASQSIIAYTMSLGAENSVAYSNNSIAIPTNFTISVTTEILPVSMTKTSVDCTMYICGDSTECSNLLLQYGSFCTQLNRALTGIAVEQDKNTQEVFAQVKQIYKTPPIKDFGGFNFSQILPDPSKPSKRSFIEDLLFNKVTLADAGFIKQYGDCLGDIAARDLICAQKFNGLTVLPPLLTDEMIAQYTSALLAGTITSGWTFGAGAALQIPFAMQMAYRFNGIGVTQNVLYENQKLIANQFNSAIGKIQDSLSSTASALGKLQDVVNQNAQALNTLVKQLSSNFGAISSVLNDILSRLDPPEAEVQIDRLITGRLQSLQTYVTQQLIRAAEIRASANLAATKMSECVLGQSKRVDFCGKGYHLMSFPQSAPHGVVFLHVTYVPAQEKNFTTAPAICHDGKAHFPREGVFVSNGTHWFVTQRNFYEPQIITTDNTFVSGNCDVVIGIVNNTVYDPLQPELDSGGSGYIPEAPRDGQAYVRKDGEWVLLSTFL

SEQ ID NO: 9728 - protein, 1177 aa, Artificial Sequence
  SARS-CoV-2/Australia/VIC01/2020__EPI_ISL_406844 spike protein (1-1147)(K986P_V987P) Foldon construct
MFVFLVLLPLVSSQCVNLTTRTQLPPAYTNSFTRGVYYPDKVFRSSVLHSTQDLFLPFFSNVTWFHAIHVSGTNGTKRFDNPVLPFNDGVYFASTEKSNIIRGWIFGTTLDSKTQSLLIVNNATNVVIKVCEFQFCNDPFLGVYYHKNNKSWMESEFRVYSSANNCTFEYVSQPFLMDLEGKQGNFKNLREFVFKNIDGYFKIYSKHTPINLVRDLPQGFSALEPLVDLPIGINITRFQTLLALHRRYLTPGDSSSGWTAGAAAYYVGYLQPRTFLLKYNENGTITDAVDCALDPLSETKCTLKSFTVEKGIYQTSNFRVQPTESIVRFPNITNLCPFGEVFNATRFASVYAWNRKRISNCVADYSVLYNSASFSTFKCYGVSPTKLNDLCFTNVYADSFVIRGDEVRQIAPGQTGKIADYNYKLPDDFTGCVIAWNSNNLDSKVGGNYNYLYRLFRKSNLKPFERDISTEIYQAGSTPCNGVEGFNCYFPLQSYGFQPTNGVGYQPYRVVVLSFELLHAPATVCGPKKSTNLVKNKCVNFNFNGLTGTGVLTESNKKFLPFQQFGRDIADTTDAVRDPQTLEILDITPCSFGGVSVITPGTNTSNQVAVLYQDVNCTEVPVAIHADQLTPTWRVYSTGSNVFQTRAGCLIGAEHVNNSYECDIPIGAGICASYQTQTNSPRRARSVASQSIIAYTMSLGAENSVAYSNNSIAIPTNFTISVTTEILPVSMTKTSVDCTMYICGDSTECSNLLLQYGSFCTQLNRALTGIAVEQDKNTQEVFAQVKQIYKTPPIKDFGGFNFSQILPDPSKPSKRSFIEDLLFNKVTLADAGFIKQYGDCLGDIAARDLICAQKFNGLTVLPPLLTDEMIAQYTSALLAGTITSGWTFGAGAALQIPFAMQMAYRFNGIGVTQNVLYENQKLIANQFNSAIGKIQDSLSSTASALGKLQDVVNQNAQALNTLVKQLSSNFGAISSVLNDILSRLDPPEAEVQIDRLITGRLQSLQTYVTQQLIRAAEIRASANLAATKMSECVLGQSKRVDFCGKGYHLMSFPQSAPHGVVFLHVTYVPAQEKNFTTAPAICHDGKAHFPREGVFVSNGTHWFVTQRNFYEPQIITTDNTFVSGNCDVVIGIVNNTVYDPLQPELDSGGSGYIPEAPRDGQAYVRKDGEWVLLSTFL

SEQ ID NO: 9729 - protein, 1177 aa, Artificial Sequence
  SARS-CoV-2/Germany/BavPat1/2020__EPI_ISL_406862 spike protein (1-1147)(K986P_V987P) Foldon construct
MFVFLVLLPLVSSQCVNLTTRTQLPPAYTNSFTRGVYYPDKVFRSSVLHSTQDLFLPFFSNVTWFHAIHVSGTNGTKRFDNPVLPFNDGVYFASTEKSNIIRGWIFGTTLDSKTQSLLIVNNATNVVIKVCEFQFCNDPFLGVYYHKNNKSWMESEFRVYSSANNCTFEYVSQPFLMDLEGKQGNFKNLREFVFKNIDGYFKIYSKHTPINLVRDLPQGFSALEPLVDLPIGINITRFQTLLALHRSYLTPGDSSSGWTAGAAAYYVGYLQPRTFLLKYNENGTITDAVDCALDPLSETKCTLKSFTVEKGIYQTSNFRVQPTESIVRFPNITNLCPFGEVFNATRFASVYAWNRKRISNCVADYSVLYNSASFSTFKCYGVSPTKLNDLCFTNVYADSFVIRGDEVRQIAPGQTGKIADYNYKLPDDFTGCVIAWNSNNLDSKVGGNYNYLYRLFRKSNLKPFERDISTEIYQAGSTPCNGVEGFNCYFPLQSYGFQPTNGVGYQPYRVVVLSFELLHAPATVCGPKKSTNLVKNKCVNFNFNGLTGTGVLTESNKKFLPFQQFGRDIADTTDAVRDPQTLEILDITPCSFGGVSVITPGTNTSNQVAVLYQGVNCTEVPVAIHADQLTPTWRVYSTGSNVFQTRAGCLIGAEHVNNSYECDIPIGAGICASYQTQTNSPRRARSVASQSIIAYTMSLGAENSVAYSNNSIAIPTNFTISVTTEILPVSMTKTSVDCTMYICGDSTECSNLLLQYGSFCTQLNRALTGIAVEQDKNTQEVFAQVKQIYKTPPIKDFGGFNFSQILPDPSKPSKRSFIEDLLFNKVTLADAGFIKQYGDCLGDIAARDLICAQKFNGLTVLPPLLTDEMIAQYTSALLAGTITSGWTFGAGAALQIPFAMQMAYRFNGIGVTQNVLYENQKLIANQFNSAIGKIQDSLSSTASALGKLQDVVNQNAQALNTLVKQLSSNFGAISSVLNDILSRLDPPEAEVQIDRLITGRLQSLQTYVTQQLIRAAEIRASANLAATKMSECVLGQSKRVDFCGKGYHLMSFPQSAPHGVVFLHVTYVPAQEKNFTTAPAICHDGKAHFPREGVFVSNGTHWFVTQRNFYEPQIITTDNTFVSGNCDVVIGIVNNTVYDPLQPELDSGGSGYIPEAPRDGQAYVRKDGEWVLLSTFL

SEQ ID NO: 9730 - protein, 1177 aa, Artificial Sequence
  SARS-CoV-2/Wuhan/HBCDC-HB-02/2020__EPI_ISL_412978 spike protein (1-1147)(K986P_V987P) Foldon construct
MFVFLVLLPLVSSQCVNLTTRTQLPPAYTNSFTRGVYYPDKVFRSSVLHSTQDLFLPFFSNVTWFHAIHVSGTNGTKRFDNPVLPFNDGVYFASTEKSNIIRGWIFGTTLDSKTQSLLIVNNATNVVIKVCEFQFCNDPFLGVYYHKNNKSWMESEFRVYSSANNCTFEYVSQPFLMDLEGKQGNFKNLREFVFKNIDGYFKIYSKHTPINLVRDLPQGFSALEPLVDLPIGINITRFQTLLALHRSYLTPGDSSSGWTAGAAAYYVGYLQPRTFLLKYNENGTITDAVDCALDPLSETKCTLKSFTVEKGIYQTSNFRVQPTESIVRFPNITNLCPFGEVFNATRFASVYAWNRKRISNCVADYSVLYNSASFSTFKCYGVSPTKLNDLCFTNVYADSFVIRGDEVRQIAPGQTGKIADYNYKLPDDFTGCVIAWNSNNLDSKVGGNYNYLYRLFRKSNLKPFERDISTEIYQAGSTPCNGVEGFNCYFPLQSYGFQPTNGVGYQPYRVVVLSFELLHAPATVCGPKKSTNLVKNKCVNFNFNGLTGTGVLTESNKKFLPFQQFGRDIADTTDAVRDPQTLEILDITPCSFGGVSVITPGTNTSNQVAVLYQDVNCTEVPVAIHADQLTPTWRVYSTGSNVFQTRAGCLIGAEHVNNSYECDIPIGAGICASYQTQTNSPRRARSVASQSIIAYTMSLGAENSVAYSNNSIAIPTNFTISVTTEILPVSMTKTSVDCTMYICGDSTECSNFLLQYGSFCTQLNRALTGIAVEQDKNTQEVFAQVKQIYKTPPIKDFGGFNFSQILPDPSKPSKRSFIEDLLFNKVTLADAGFIKQYGDCLGDIAARDLICAQKFNGLTVLPPLLTDEMIAQYTSALLAGTITSGWTFGAGAALQIPFAMQMAYRFNGIGVTQNVLYENQKLIANQFNSAIGKIQDSLSSTASALGKLQDVVNQNAQALNTLVKQLSSNFGAISSVLNDILSRLDPPEAEVQIDRLITGRLQSLQTYVTQQLIRAAEIRASANLAATKMSECVLGQSKRVDFCGKGYHLMSFPQSAPHGVVFLHVTYVPAQEKNFTTAPAICHDGKAHFPREGVFVSNGTHWFVTQRNFYEPQIITTDNTFVSGNCDVVIGIVNNTVYDPLQPELDSGGSGYIPEAPRDGQAYVRKDGEWVLLSTFL

SEQ ID NO: 9731 - protein, 1177 aa, Artificial Sequence
  SARS-CoV-2/Australia/QLD02/2020__EPI_ISL_407896 spike protein (1-1147)(K986P_V987P) Foldon construct
MFVFLVLLPLVSSQCVNLTTRTQLPPAYTNSFTRGVYYPDKVFRSSVLHSTQDLFLPFFSNVTWFHAIHVSGTNGTKRFDNPVLPFNDGVYFASTEKSNIIRGWIFGTTLDSKTQSLLIVNNATNVVIKVCEFQFCNDPFLGVYYHKNNKSWMESEFRVYSSANNCTFEYVSQPFLMDLEGKQGNFKNLREFVFKNIDGYFKIYSKHTPINLVRDLPQGFSALEPLVDLPIGINITRFQTLLALHRSYLTPGDSSSGWTAGAAAYYVGYLQPRTFLLKYNENGTITDAVDCALDPLSETKCTLKSFTVEKGIYQTSNFRVQPTESIVRFPNITNLCPFGEVFNATRFASVYAWNRKRISNCVADYSVLYNSASFSTFKCYGVSPTKLNDLCFTNVYADSFVIRGDEVRQIAPGQTGKIADYNYKLPDDFTGCVIAWNSNNLDSKVGGNYNYLYRLFRKSNLKPFERDISTEIYQAGSTPCNGVEGFNCYFPLQSYGFQPTNGVGYQPYRVVVLSFELLHAPATVCGPKKSTNLVKNKCVNFNFNGLTGTGVLTESNKKFLPFQQFGRDIADTTDAVRDPQTLEILDITPCSFGGVSVITPGTNTSNQVAVLYQDVNCTEVPVAIHADQLTPTWRVYSTGSNVFQTRAGCLIGAEHVNNSYECDIPIGAGICASYQTQTNSPRRARSVASQSIIAYTMSLGAENSVAYSNNSIAIPTNFTISVTTEILPVSMTKTSVDCTMYICGDSTECSNLLLQYGSFCTQLNRALTGIAVEQDKNTQEVFAQVKQIYKTPPIKDFGGFNFSQILPDPSKPSKRSFIEDLLFNKVTLADAGFIKQYGDCLGDIAARDLICAQKFNGLTVLPPLLTDEMIAQYTSALLAGTITSGWTFGAGAALQIPFAMQMAYRFNGIGVTQNVLYENQKLIANQFNSAIGKIQDSLSSTASALGKLQDVVNQNAQALNTLVKQLSSNFGAISSVLNDILSRLDPPEAEVQIDRLITGRLQSLQTYVTQQLIRAAEIRASANLAATKMSECVLGQSKRVDFCGKGYHLMSFPQSAPHGVVFLHVTYVPAQEKNFTTAPAICHDGKAHFPREGVFVSNGTHWFVTQRNFYEPQIITTDNTFVSGNCDVVIGIVNNTVYDPLQLELDSGGSGYIPEAPRDGQAYVRKDGEWVLLSTFL

SEQ ID NO: 9732 - protein, 1177 aa, Artificial Sequence
  SARS-CoV-2/India/1-31/2020__EPI_ISL_413523 spike protein (1-1147)(K986P_V987P) Foldon construct
MFVFLVLLPLVSSQCVNLTTRTQLPPAYTNSFTRGVYYPDKVFRSSVLHSTQDLFLPFFSNVTWFHAIHVSGTNGTKRFDNPVLPFNDGVYFASTEKSNIIRGWIFGTTLDSKTQSLLIVNNATNVVIKVCEFQFCNDPFLGVYYHKNNKSWMESEFRVYSSANNCTFEYVSQPFLMDLEGKQGNFKNLREFVFKNIDGYFKIYSKHTPINLVRDLPQGFSALEPLVDLPIGINITRFQTLLALHRSYLTPGDSSSGWTAGAAAYYVGYLQPRTFLLKYNENGTITDAVDCALDPLSETKCTLKSFTVEKGIYQTSNFRVQPTESIVRFPNITNLCPFGEVFNATRFASVYAWNRKRISNCVADYSVLYNSASFSTFKCYGVSPTKLNDLCFTNVYADSFVIRGDEVRQIAPGQTGKIADYNYKLPDDFTGCVIAWNSNNLDSKVGGNYNYLYRLFRKSNLKPFERDISTEIYQAGSTPCNGVEGFNCYFPLQSYGFQPTNGVGYQPYRVVVLSFELLHAPATVCGPKKSTNLVKNKCVNFNFNGLTGTGVLTESNKKFLPFQQFGRDIADTTDAVRDPQTLEILDITPCSFGGVSVITPGTNTSNQVAVLYQDVNCTEVPVAIHADQLTPTWRVYSTGSNVFQTRAGCLIGAEHVNNSYECDIPIGAGICASYQTQTNSPRRARSVASQSIIAYTMSLGAENSVAYSNNSIAIPTNFTISVTTEILPVSMTKTSVDCTMYICGDSTECSNLLLQYGSFCTQLNRALTGIAVEQDKNTQEVFAQVKQIYKTPPIKDFGGFNFSQILPDPSKPSKRSFIEDLLFNKVTLADAGFIKQYGDCLGDIAARDLICAQKFNGLTVLPPLLTDEMIAQYTSALLAGTITSGWTFGAGAALQIPFAMQMAYRFNGIGVTQNVLYENQKLIANQFNSVIGKIQDSLSSTASALGKLQDVVNQNAQALNTLVKQLSSNFGAISSVLNDILSRLDPPEAEVQIDRLITGRLQSLQTYVTQQLIRAAEIRASANLAATKMSECVLGQSKRVDFCGKGYHLMSFPQSAPHGVVFLHVTYVPAQEKNFTTAPAICHDGKAHFPREGVFVSNGTHWFVTQRNFYEPQIITTDNTFVSGNCDVVIGIVNNTVYDPLQPELDSGGSGYIPEAPRDGQAYVRKDGEWVLLSTFL

SEQ ID NO: 9733 - protein, 1177 aa, Artificial Sequence
  SARS-CoV-2/Guangdong/GD2020087-P0008/2020__EPI_ISL_413863 spike protein (1-1147)(K986P_V987P) Foldon construct
MFVFLVLLPLVSSQCVNLTTRTQLPPAYTNSFTRGVYYPDKVFRSSVLHSTQDLFLPFFSNVTWFHAIHVSGTNGTKRFDNPVLPFNDGVYFASTEKSNIIRGWIFGTTLDSKTQSLLIVNNATNVVIKVCEFQFCNDPFLGVYYHKNNKSWMESEFRVYSSANNCTFEYVSQPFLMDLEGKQGNFKNLREFVFKNIDGYFKIYSKHTPINLVRDLPQGFSALEPLVDLPIGINITRFQTLLALHRSYLTPGDSSSGWTAGAAAYYVGYLQPRTFLLKYNENGTITDAVDCALDPLSETKCTLKSFTVEKGIYQTSNFRVQPTESIVRFPNITNLCPFGEVFNATRFASVYAWNRKRISNCVADYSVLYNSASFSTFKCYGVSPTKLNDLCFTNVYADSFVIRGDEVREIAPGQTGKIADYNYKLPDDFTGCVIAWNSNNLDSKVGGNYNYLYRLFRKSNLKPFERDISTEIYQAGSTPCNGVEGFNCYFPLQSYGFQPTNGVGYQPYRVVVLSFELLHAPATVCGPKKSTNLVKNKCVNFNFNGLTGTGVLTESNKKFLPFQQFGRDIADTTDAVRDPQTLEILDITPCSFGGVSVITPGTNTSNQVAVLYQDVNCTEVPVAIHADQLTPTWRVYSTGSNVFQTRAGCLIGAEHVNNSYECDIPIGAGICASYQTQTNSPRRARSVASQSIIAYTMSLGAENSVAYSNNSIAIPTNFTISVTTEILPVSMTKTSVDCTMYICGDSTECSNLLLQYGSFCTQLNRALTGIAVEQDKNTQEVFAQVKQIYKTPPIKDFGGFNFSQILPDPSKPSKRSFIEDLLFNKVTLADAGFIKQYGDCLGDIAARDLICAQKFNGLTVLPPLLTDEMIAQYTSALLAGTITSGWTFGAGAALQIPFAMQMAYRFNGIGVTQNVLYENQKLIANQFNSAIGKIQDSLSSTASALGKLQDVVNQNAQALNTLVKQLSSNFGAISSVLNDILSRLDPPEAEVQIDRLITGRLQSLQTYVTQQLIRAAEIRASANLAATKMSECVLGQSKRVDFCGKGYHLMSFPQSAPHGVVFLHVTYVPAQEKNFTTAPAICHDGKAHFPREGVFVSNGTHWFVTQRNFYEPQIITTDNTFVSGNCDVVIGIVNNTVYDPLQPELDSGGSGYIPEAPRDGQAYVRKDGEWVLLSTFL

SEQ ID NO: 9734 - protein, 1177 aa, Artificial Sequence
  SARS-CoV-2/Sweden/01/2020__EPI_ISL_411951 spike protein (1-1147)(K986P_V987P) Foldon construct
MFVFLVLLPLVSSQCVNLTTRTQLPPAYTNSFTRGVYYPDKVFRSSVLHSTQDLFLPFFSNVTWFHAIHVSGTNGTKRFDNPVLPFNDGVYFASTEKSNIIRGWIFGTTLDSKTQSLLIVNNATNVVIKVCEFQFCNDPFLGVYYHKNNKSWMESEFRVYSSANNCTFEYVSQPFLMDLEGKQGNFKNLREFVFKNIDGYFKIYSKHTPINLVRDLPQGFSALEPLVDLPIGINITRFQTLLALHRSYLTPGDSSSGWTAGAAAYYVGYLQPRTFLLKYNENGTITDAVDCALDPLSETKCTLKSFTVEKGIYQTSNFRVQPTESIVRFPNITNLCPFGEVFNATRFASVYAWNRKRISNCVADYSVLYNSASFSTFKCYGVSPTKLNDLCFTNVYADSFVIRGDEVRQIAPGQTGKIADYNYKLPDDFTGCVIAWNSNNLDSKVGGNYNYLYRLFRKSNLKPFERDISTEIYQAGSTPCNGVEGFNCYFPLQSYGFQPTNGVGYQPYRVVVLSFELLHAPATVCGPKKSTNLVKNKCVNFNFNGLTGTGVLTESNKKFLPFQQFGRDIADTTDAVRDPQTLEILDITPCSFGGVSVITPGTNTSNQVAVLYQDVNCTEVPVAIHADQLTPTWRVYSTGSNVFQTRAGCLIGAEHVNNSYECDIPIGAGICASYQTQTNSPRRARSVASQSIIAYTMSLGAENSVAYSNNSIAIPTNFTISVTTEILPVSMTKTSVDCTMYICGDSTECSNLLLQYGSFCTQLNRALTGIAVEQDKNTQEVFAQVKQIYKTPPIKDCGGFNFSQILPDPSKPSKRSFIEDLLFNKVTLADAGFIKQYGDCLGDIAARDLICAQKFNGLTVLPPLLTDEMIAQYTSALLAGTITSGWTFGAGAALQIPFAMQMAYRFNGIGVTQNVLYENQKLIANQFNSAIGKIQDSLSSTASALGKLQDVVNQNAQALNTLVKQLSSNFGAISSVLNDILSRLDPPEAEVQIDRLITGRLQSLQTYVTQQLIRAAEIRASANLAATKMSECVLGQSKRVDFCGKGYHLMSFPQSAPHGVVFLHVTYVPAQEKNFTTAPAICHDGKAHFPREGVFVSNGTHWFVTQRNFYEPQIITTDNTFVSGNCDVVIGIVNNTVYDPLQPELDSGGSGYIPEAPRDGQAYVRKDGEWVLLSTFL

SEQ ID NO: 9735 - protein, 1177 aa, Artificial Sequence
  SARS-CoV-2/Tianmen/HBCDC-HB-07/2020__EPI_ISL_412983 spike protein (1-1147)(K986P_V987P) Foldon construct
MFVFLVLLPLVSSQCVNLTTRTQLPPAYTNSFTRGVYYPDKVFRSSVLHSTQDLFLPFFSNVTWFHAIHVSGTNGTKRFDNPVLPFNDGVYFASTEKSNIIRGWIFGTTLDSKTQSLLIVNNATNVVIKVCEFQFCNDPFLGVYYHKNNKSWMESEFRVYSSANNCTFEYVSQPFLMDLEGKQGNFKNLREFVFKNIDGYFKIYSKHTPINLVRDLPQGFSALEPLVDLPIGINITRFQTLLALHRSYLTPGDSSSGWTAGAAAYYVGYLQPRTFLLKYNENGTITDAVDCALDPLSETKCTLKSFTVEKGIYQTSNFRVQPTESIVRFPNITNLCPFGEVFNATRFASVYAWNRKRISNCVADYSVLYNSASFSTFKCYGVSPTKLNDLCFTNVYADSFVIRGDEVRQIAPGQTGKIADYNYKLPDDFTGCVIAWNSNNLDSKVGGNYNYLYRLFRKSNLKPFERDISTEIYQAGSTPCNGVEGFNCYFPLQSYGFQPTNGVGYQPYRVVVLSFELLHAPATVCGPKKSTNLVKNKCVNFNFNGLTGTGVLTESNKKFLPFQQFGRDIADTTDAVRDPQTLEILDITPCSFGGVSVITPGTNTSNQVAVLYQDLNCTEVPVAIHADQLTPTWRVYSTGSNVFQTRAGCLIGAEHVNNSYECDIPIGAGICASYQTQTNSPRRARSVASQSIIAYTMSLGAENSVAYSNNSIAIPTNFTISVTTEILPVSMTKTSVDCTMYICGDSTECSNLLLQYGSFCTQLNRALTGIAVEQDKNTQEVFAQVKQIYKTPPIKDFGGFNFSQILPDPSKPSKRSFIEDLLFNKVTLADAGFIKQYGDCLGDIAARDLICAQKFNGLTVLPPLLTDEMIAQYTSALLAGTITSGWTFGAGAALQIPFAMQMAYRFNGIGVTQNVLYENQKLIANQFNSAIGKIQDSLSSTASALGKLQDVVNQNAQALNTLVKQLSSNFGAISSVLNDILSRLDPPEAEVQIDRLITGRLQSLQTYVTQQLIRAAEIRASANLAATKMSECVLGQSKRVDFCGKGYHLMSFPQSAPHGVVFLHVTYVPAQEKNFTTAPAICHDGKAHFPREGVFVSNGTHWFVTQRNFYEPQIITTDNTFVSGNCDVVIGIVNNTVYDPLQPELDSGGSGYIPEAPRDGQAYVRKDGEWVLLSTFL

SEQ ID NO: 9736 - protein, 1177 aa, Artificial Sequence
  SARS-CoV-2/Hong Kong/case42_VM20002493/2020__EPI_ISL_414527 spike protein (1-1147)(K986P_V987P) Foldon construct
MFVFLVLLPLVSSQCVNLTTRTQLPPAYTNSFTRGVYYPDKVFRSSVLHSTQDLFLPFFSNVTWFHAIHVSGTNGTKRFDNPVLPFNDGVYFASTEKSNIIRGWIFGTTLDSKTQSLLIVNNATNVVIKVCEFQFCNDPFLGVYYHKNNKSWMESEFRVYSSANNCTFEYVSQPFLMDLEGKQGNFKNLREFVFKNIDGYFKIYSKHTPINLVRDLPQGFSALEPLVDLPIGINITRFQTLLALHRSYLTPGDSSSGWTAGAAAYYVGYLQPRTFLLKYNENGTITDAVDCALDPLSETKCTLKSFTVEKGIYQTSNFRVQPTESIVRFPNITNLCPFGEVFNATRFASVYAWNRKRISNCVADYSVLYNSASFSTFKCYGVSPTKLNDLCFTNVYADSFVIRGDEVRQIAPGQTGKIADYNYKLPDDFTGCVIAWNSNNLDSKVGGNYNYLYRLFRKSNLKPFERDISTEIYQAGSTPCNGVEGFNCYFPLQSYGFQPTNGVGYQPYRVVVLSFELLHAPATVCGPKKSTNLVKNKCVNFNFNGLTGTGVLTESNKKFLPFQQFGRDIADTTDAVRDPQTLEILDITPCSFGGVSVITPGTNTSNQVAVLYQDVNCTEVPVAIHADQLTPTWRVYSTGSNVFQTRAGCLIGAEHVNNSYECDIPIGAGICASYQTQTNSPRRARSVASQSIIAYTMSLGAENSVAYSNNSIAIPTNFAISVTTEILPVSMTKTSVDCTMYICGDSTECSNLLLQYGSFCTQLNRALTGIAVEQDKNTQEVFAQVKQIYKTPPIKDFGGFNFSQILPDPSKPSKRSFIEDLLFNKVTLADAGFIKQYGDCLGDIAARDLICAQKFNGLTVLPPLLTDEMIAQYTSALLAGTITSGWTFGAGAALQIPFAMQMAYRFNGIGVTQNVLYENQKLIANQFNSAIGKIQDSLSSTASALGKLQDVVNQNAQALNTLVKQLSSNFGAISSVLNDILSRLDPPEAEVQIDRLITGRLQSLQTYVTQQLIRAAEIRASANLAATKMSECVLGQSKRVDFCGKGYHLMSFPQSAPHGVVFLHVTYVPAQEKNFTTAPAICHDGKAHFPREGVFVSNGTHWFVTQRNFYEPQIITTDNTFVSGNCDVVIGIVNNTVYDPLQPELDSGGSGYIPEAPRDGQAYVRKDGEWVLLSTFL

SEQ ID NO: 9737 - protein, 1177 aa, Artificial Sequence
  SARS-CoV-2/USA/CruiseA-23/2020__EPI_ISL_414482 spike protein (1-1147)(K986P_V987P) Foldon construct
MFVFLVLLPLVSSQCVNLTTRTQLPPAYTNSFTRGVYYPDKVFRSSVLHSTQDLFLPFFSNVTWFHAIHVSGTNGTKRFDNPVLPFNDGVYFASTEKSNIIRGWIFGTTLDSKTQSLLIVNNATNVVIKVCEFQFCNDPFLGVYYHKNNKSWMESEFRVYSSANNCTFEYVSQPFLMDLEVKQGNFKNLREFVFKNIDGYFKIYSKHTPINLVRDLPQGFSALEPLVDLPIGINITRFQTLLALHRSYLTPGDSSSGWTAGAAAYYVGYLQPRTFLLKYNENGTITDAVDCALDPLSETKCTLKSFTVEKGIYQTSNFRVQPTESIVRFPNITNLCPFGEVFNATRFASVYAWNRKRISNCVADYSVLYNSASFSTFKCYGVSPTKLNDLCFTNVYADSFVIRGDEVRQIAPGQTGKIADYNYKLPDDFTGCVIAWNSNNLDSKVGGNYNYLYRLFRKSNLKPFERDISTEIYQAGSTPCNGVEGFNCYFPLQSYGFQPTNGVGYQPYRVVVLSFELLHAPATVCGPKKSTNLVKNKCVNFNFNGLTGTGVLTESNKKFLPFQQFGRDIADTTDAVRDPQTLEILDITPCSFGGVSVITPGTNTSNQVAVLYQDVNCTEVPVAIHADQLTPTWRVYSTGSNVFQTRAGCLIGAEHVNNSYECDIPIGAGICASYQTQTNSPRRARSVASQSIIAYTMSLGAENSVAYSNNSIAIPTNFTISVTTEILPVSMTKTSVDCTMYICGDSTECSNLLLQYGSFCTQLNRALTGIAVEQDKNTQEVFAQVKQIYKTPPIKDFGGFNFSQILPDPSKPSKRSFIEDLLFNKVTLADAGFIKQYGDCLGDIAARDLICAQKFNGLTVLPPLLTDEMIAQYTSALLAGTITSGWTFGAGAALQIPFAMQMAYRFNGIGVTQNVLYENQKLIANQFNSAIGKIQDSLSSTASALGKLQDVVNQNAQALNTLVKQLSSNFGAISSVLNDILSRLDPPEAEVQIDRLITGRLQSLQTYVTQQLIRAAEIRASANLAATKMSECVLGQSKRVDFCGKGYHLMSFPQSAPHGVVFLHVTYVPAQEKNFTTAPAICHDGKAHFPREGVFVSNGTHWFVTQRNFYEPQIITTDNTFVSGNCDVVIGIVNNTVYDPLQPELDSGGSGYIPEAPRDGQAYVRKDGEWVLLSTFL

SEQ ID NO: 9738 - protein, 1177 aa, Artificial Sequence
  SARS-CoV-2/Hong Kong/case85_VM20002868/2020__EPI_ISL_414519 spike protein (1-1147)(K986P_V987P) Foldon construct
MFVFLVLVPLVSSQCVNLTTRTQLPPAYTNSFTRGVYYPDKVFRSSVLHSTQDLFLPFFSNVTWFHAIHVSGTNGTKRFDNPVLPFNDGVYFASTEKSNIIRGWIFGTTLDSKTQSLLIVNNATNVVIKVCEFQFCNDPFLGVYYHKNNKSWMESEFRVYSSANNCTFEYVSQPFLMDLEGKQGNFKNLREFVFKNIDGYFKIYSKHTPINLVRDLPQGFSALEPLVDLPIGINITRFQTLLALHRSYLTPGDSSSGWTAGAAAYYVGYLQPRTFLLKYNENGTITDAVDCALDPLSETKCTLKSFTVEKGIYQTSNFRVQPTESIVRFPNITNLCPFGEVFNATRFASVYAWNRKRISNCVADYSVLYNSASFSTFKCYGVSPTKLNDLCFTNVYADSFVIRGDEVRQIAPGQTGKIADYNYKLPDDFTGCVIAWNSNNLDSKVGGNYNYLYRLFRKSNLKPFERDISTEIYQAGSTPCNGVEGFNCYFPLQSYGFQPTNGVGYQPYRVVVLSFELLHAPATVCGPKKSTNLVKNKCVNFNFNGLTGTGVLTESNKKFLPFQQFGRDIADTTDAVRDPQTLEILDITPCSFGGVSVITPGTNTSNQVAVLYQDVNCTEVPVAIHADQLTPTWRVYSTGSNVFQTRAGCLIGAEHVNNSYECDIPIGAGICASYQTQTNSPRRARSVASQSIIAYTMSLGAENSVAYSNNSIAIPTNFTISVTTEILPVSMTKTSVDCTMYICGDSTECSNLLLQYGSFCTQLNRALTGIAVEQDKNTQEVFAQVKQIYKTPPIKDFGGFNFSQILPDPSKPSKRSFIEDLLFNKVTLADAGFIKQYGDCLGDIAARDLICAQKFNGLTVLPPLLTDEMIAQYTSALLAGTITSGWTFGAGAALQIPFAMQMAYRFNGIGVTQNVLYENQKLIANQFNSAIGKIQDSLSSTASALGKLQDVVNQNAQALNTLVKQLSSNFGAISSVLNDILSRLDPPEAEVQIDRLITGRLQSLQTYVTQQLIRAAEIRASANLAATKMSECVLGQSKRVDFCGKGYHLMSFPQSAPHGVVFLHVTYVPAQEKNFTTAPAICHDGKAHFPREGVFVSNGTHWFVTQRNFYEPQIITTDNTFVSGNCDVVIGIVNNTVYDPLQPELDSGGSGYIPEAPRDGQAYVRKDGEWVLLSTFL

SEQ ID NO: 9739 - protein, 1177 aa, Artificial Sequence; identical to SEQ ID NO: 9729
  SARS-CoV-2/England/200990660/2020__EPI_ISL_414523 spike protein (1-1147)(K986P_V987P) Foldon construct

SEQ ID NO: 9740 - protein, 1177 aa, Artificial Sequence
  SARS-CoV-2/Australia/NSW09/2020__EPI_ISL_413595 spike protein (1-1147)(K986P_V987P) Foldon construct
MFVFLVLLPLVSSQCVNLTTRTQLPPAYTNSFTRGVYYPDKVFRSSVLHSTQDLFLPFFSNVTWFHAIHVSGTNGTKRFDNPVLPFNDGVYFASTEKSNIIRGWIFGTTLDSKTQSLLIVNNATNVVIKVCEFQFCNDPFLGVYYHKNNKSWMESEFRVYSSANNCTFEYVSQPFLMDLEGKQGNFKNLREFVFKNIDGYFKIYSKHTPINLVRDLPQGFSALEPLVDLPIGINITRFQTLLALHRSYLTPGDSSSGWTAGAAAYYVGYLQPRTFLLKYNENGTITDAVDCALDPLSETKCTLKSFTVEKGIYQTSNFRVQPTESIVRFPNITNLCPFGEVFNATRFASVYAWNRKRISNCVADYSVLYNSASFSTFKCYGVSPTKLNDLCFTNVYADSFVIRGDEVRQIAPGQTGKIADYNYKLPDDFTGCVIAWNSNNLDSKVGGNYNYLYRLFRKSNLKPFERDISTEIYQAGSTPCNGVEGFNCYFPLQSYGFQPTNGVGYQPYRVVVLSFELLHAPATVCGPKKSTNLVKNKCVNFNFNGLTGTGVLTESNKKFLPFQQFGRDIADTTDAVRDPQTLEILDITPCSFGGVSVITPGTNTSNQVAVLYQDVNCTEVPVAIHADQLTPTWRVYSTGSNVFQTRAGCLIGAEHVNNSYECDIPIGAGICASYQTQTNSPRRARSVASQSIIAYTMSLGAENSVAYSNNSIAIPTNFTISVTTEILPVSMTKTSVDCTMYICGDSTECSNLLLQYGSFCTQLNRALTGIAVEQDKNTQEVFAQVKQIYKTPPIKDFGGFNFSQILPDPSKPSKRSFIEDLLFNKVTLADAGFIKQYGDCLGDIAARDLICAQKFNGLTVLPPLLTDEMIAQYTSALLAGTITSGWTFGAGAALQIPFAMQMAYRFNGIGVTQNVLYENQKLIANQFNSAIGKIQDSLSFTASALGKLQDVVNQNAQALNTLVKQLSSNFGAISSVLNDILSRLDPPEAEVQIDRLITGRLQSLQTYVTQQLIRAAEIRASANLAATKMSECVLGQSKRVDFCGKGYHLMSFPQSAPHGVVFLHVTYVPAQEKNFTTAPAICHDGKAHFPREGVFVSNGTHWFVTQRNFYEPQIITTDNTFVSGNCDVVIGIVNNTVYDPLQPELDSGGSGYIPEAPRDGQAYVRKDGEWVLLSTFL

SEQ ID NO: 9741 - protein, 1177 aa, Artificial Sequence; identical to SEQ ID NO: 9721
  SARS-CoV-2/Australia/NSW10/2020__EPI_ISL_413596 spike protein (1-1147)(K986P_V987P) Foldon construct

SEQ ID NO: 9742 - protein, 1177 aa, Artificial Sequence
  SARS-CoV-2/Switzerland/1000477797/2020__EPI_ISL_413023 spike protein (1-1147)(K986P_V987P) Foldon construct
MFVFLVLLPLVSSQCVNLTTRTQLPPAYTNSFTRGVYYPDKVFRSSVLHSTQDLFLPFFSNVTWFHAIHVSGTNGTKRFDNPVLPFNDGVYFASTEKSNIIRGWIFGTTLDSKTQSLLIVNNATNVVIKVCEFQFCNDPFLGVYYHKNNKSWMESEFRVYSSANNCTFEYVSQPFLMDLEGKQGNFKNLREFVFKNIDGYFNIYSKHTPINLVRDLPQGFSALEPLVDLPIGINITRFQTLLALHRSYLTPGDSSSGWTAGAAAYYVGYLQPRTFLLKYNENGTITDAVDCALDPLSETKCTLKSFTVEKGIYQTSNFRVQPTESIVRFPNITNLCPFGEVFNATRFASVYAWNRKRISNCVADYSVLYNSASFSTFKCYGVSPTKLNDLCFTNVYADSFVIRGDEVRQIAPGQTGKIADYNYKLPDDFTGCVIAWNSNNLDSKVGGNYNYLYRLFRKSNLKPFERDISTEIYQAGSTPCNGVEGFNCYFPLQSYGFQPTNGVGYQPYRVVVLSFELLHAPATVCGPKKSTNLVKNKCVNFNFNGLTGTGVLTESNKKFLPFQQFGRDIADTTDAVRDPQTLEILDITPCSFGGVSVITPGTNTSNQVAVLYQGVNCTEVPVAIHADQLTPTWRVYSTGSNVFQTRAGCLIGAEHVNNSYECDIPIGAGICASYQTQTNSPRRARSVASQSIIAYTMSLGAENSVAYSNNSIAIPTNFTISVTTEILPVSMTKTSVDCTMYICGDSTECSNLLLQYGSFCTQLNRALTGIAVEQDKNTQEVFAQVKQIYKTPPIKDFGGFNFSQILPDPSKPSKRSFIEDLLFNKVTLADAGFIKQYGDCLGDIAARDLICAQKFNGLTVLPPLLTDEMIAQYTSALLAGTITSGWTFGAGAALQIPFAMQMAYRFNGIGVTQNVLYENQKLIANQFNSAIGKIQDSLSSTASALGKLQDVVNQNAQALNTLVKQLSSNFGAISSVLNDILSRLDPPEAEVQIDRLITGRLQSLQTYVTQQLIRAAEIRASANLAATKMSECVLGQSKRVDFCGKGYHLMSFPQSAPHGVVFLHVTYVPAQEKNFTTAPAICHDGKAHFPREGVFVSNGTHWFVTQRNFYEPQIITTDNTFVSGNCDVVIGIVNNTVYDPLQPELDSGGSGYIPEAPRDGQAYVRKDGEWVLLSTFL

SEQ ID NO: 9743 - protein, 1177 aa, Artificial Sequence
  SARS-CoV-2/Belgium/BA-02291/2020__EPI_ISL_415159 spike protein (1-1147)(K986P_V987P) Foldon construct
MFVFLVLLPLVSSQCVNLTTRTQLPPAYTNSFTRGVYYPDKVFRSSVLHSTQDLFLPFFSNVTWFHAIHVSGTNGTKRFDNPVLPFNDGVYFASTEKSNIIRGWIFGTTLDSKTQSLLIVNNATNVVIKVCEFQFCNDPFLGVYYHKNNKSWMESEFRVYSSANNCTFEYVSQPFLMDLEGKQGNFKNLREFVFKNIDGYFKIYSKHTPINLVRDLPQGFSALEPLVDLPIGINITRFQTLLALHRSYLTPGDSSSGWTAGAAAYYVGYLQPRTFLLKYNENGTITDAVDCALDPLSETKCTLKSFTVEKGIYQTSNFRVQPTESIVRFPNITNLCPFGEVFNATRFASVYAWNRKRISNCVADYSVLYNSASFSTFKCYGVSPTKLNDLCFTNVYADSFVIRGDEVRQIAPGQTGKIADYNYKLPDDFTGCVIAWNSNNLDSKVGGNYNYLYRLFRRSNLKPFERDISTEIYQAGSTPCNGVEGFNCYFPLQSYGFQPTNGVGYQPYRVVVLSFELLPAPATVCGPKKSTNLVKNKCVNFNFNGLTGTGVLTESNKKFLPFQQFGRDIADTTDAVRDPQTLEILDITPCSFGGVSVITPGTNTSNQVAVLYQGVNCTEVPVAIHADQLTPTWRVYSTGSNVFQTRAGCLIGAEHVNNSYECDIPIGAGICASYQTQTNSPRRARSVASQSIIAYTMSLGAENSVAYSNNSIAIPTNFTISVTTEILPVSMTKTSVDCTMYICGDSTECSNLLLQYGSFCTQLNRALTGIAVEQDKNTQEVFAQVKQIYKTPPIKDFGGFNFSQILPDPSKPSKRSFIEDLLFNKVTLADAGFIKQYGDCLGDIAARDLICAQKFNGLTVLPPLLTDEMIAQYTSALLAGTITSGWTFGAGAALQIPFAMQMAYRFNGIGVTQNVLYENQKLIANQFNSAIGKIQDSLSSAAPALGKLQDVVNQNAQALNTLVKQLSSNFGAISSVLNDILSRLDPPEAEVQIDRLITGRLQSLQTYVTQQLIRAAEIRASANLAATKMSECVLGQSKRVDFCGKGYHLMSFPQSAPHGVVFLHVTYVPAQEKNFTTAPAICHDGKAHFPREGVFVSNGTHWFVTQRNFYEPQIITTDNTFVSGNCDVVIGIVNNTVYDPLQPELDSGGSGYIPEAPRDGQAYVRKDGEWVLLSTFL

SEQ ID NO: 9744 - protein, 1177 aa, Artificial Sequence
  SARS-CoV-2/USA/WA8-UW5/2020__EPI_ISL_413486 spike protein (1-1147)(K986P_V987P) Foldon construct
MFVFLVLLPLVSSQCVNLTTRTQLPPAYTNSFTRGVYYPDKVFRSSVLHSTQDLFLPFFSNVTWFHAIHVSGTNGTKRFDNPVLPFNDGVYFASTEKSNIIRGWIFGTTLDSKTQSLLIVNNATNVVIKVCEFQFCNDPFLGVYYHKNNKSWMESEFRVYSSANNCTFEYVSQPFLMDLEGKQGNFKNLREFVFKNIDGYFKIYSKHTPINLVRDLPQGFSALEPLVDLPIGINITRFQTLLALHRSYLTPGDSSSGWTAGAAAYYVGYLQPRTFLLKYNENGTITDAVDCALDPLSETKCTLKSFTVEKGIYQTSNFRVQPTESIVRFPNITNLCPFGEVFNATRFASVYAWNRKRISNCVADYSVLYNSASFSTFKCYGVSPTKLNDLCFTNVYADSFVIRGDEVRQIAPGQTGKIADYNYKLPDDFTGCVIAWNSNNLDSKVGGNYNYLYRLFRKSNLKPFERDISTEIYQAGSTPCNGVEGFNCYFPLQSYGFQPTNGVGYQPYRVVVLSFELLHAPATVCGPKKSTNLVKNKCVNFNFNGLTGTGVLTESNKKFLPFQQFGRDIADTTDAVRDPQTLEILDITPCSFGGVSVITPGTNTSNQVAVLYQDVNCTEVPVAIHADQLTPTWRVYSTGSNVFQTRAGCLIGAEYVNNSYECDIPIGAGICASYQTQTNSPRRARSVASQSIIAYTMSLGAENSVAYSNNSIAIPTNFTISVTTEILPVSMTKTSVDCTMYICGDSTECSNLLLQYGSFCTQLNRALTGIAVEQDKNTQEVFAQVKQIYKTPPIKDFGGFNFSQILPDPSKPSKRSFIEDLLFNKVTLADAGFIKQYGDCLGDIAARDLICAQKFNGLTVLPPLLTDEMIAQYTSALLAGTITSGWTFGAGAALQIPFAMQMAYRFNGIGVTQNVLYENQKLIANQFNSAIGKIQDSLSSTASALGKLQDVVNQNAQALNTLVKQLSSNFGAISSVLNDILSRLDPPEAEVQIDRLITGRLQSLQTYVTQQLIRAAEIRASANLAATKMSECVLGQSKRVDFCGKGYHLMSFPQSAPHGVVFLHVTYVPAQEKNFTTAPAICHDGKAHFPREGVFVSNGTHWFVTQRNFYEPQIITTDNTFVSGNCDVVIGIVNNTVYDPLQPELDSGGSGYIPEAPRDGQAYVRKDGEWVLLSTFL

SEQ ID NO: 9745 - protein, 1177 aa, Artificial Sequence
  SARS-CoV-2/England/20102000506/2020__EPI_ISL_415147 spike protein (1-1147)(K986P_V987P) Foldon construct
MFVFLVLLPLVSSQCVNLTTRTQLPPAYTNSFTRGVYYPDKVFRSSVLHSTQDLFLPFFSNVTWFHAIHVSGTNGTKRFDNPVLPFNDGVYFASTEKSNIIRGWIFGTTLDSKTQSLLIVNNATNVVIKVCEFQFCNDPFLGVYYHKNNKSWMESEFRVYSSANNCTFEYVSQPFLMDLEGKQGNFKNLREFVFKNIDGYFKIYSKHTPINLVRDLPQGFSALEPLVDLPIGINITRFQTLLALHRSYLTPGDSSSGWTAGAAAYYVGYLQPRTFLLKYNENGTITDAVDCALDPLSETKCTLKSFTVEKGIYQTSNFRVQPTESIVRFPNITNLCPFGEVFNATRFASVYAWNRKRISNCVADYSVLYNSASFSTFKCYGVSPTKLNDLCFTNVYADSFVIRGDEVRQIAPGQTGKIADYNYKLPDDFTGCVIAWNSNNLDSKVGGNYNYLYRLFRKSNLKPFERDISTEIYQAGSTPCNGVEGFNCYFPLQSYGFQPTNGVGYQPYRVVVLSFELLHAPATVCGPKKSTNLVKNKCVNFNFNGLTGTGVLTESNKKFLPFQQFGRDIADTTDAVRDPQTLEILDITPCSFGGVSVITPGTNTSNQVAVLYQGVNCTEVPVAIHADQLTPTWRVYSTGSNVFQTRAGCLIGAEHVNNSYECDIPIGAGICASYQTQTNSPRRARSVASQSIIAYTMSLGAENSVAYSNNSIAIPTNFTISVTTEILPVSMTKTSVDCTMYICGDSTECSNLLLQYGSFCTQLNRALTGIAVEQDKNTQEVFAQVKQIYKTPPIKDFGGFNFSQILPDPSKPSKRSFIEDLLFNKVTLADAGFIKQYGYCLGDIAARDLICAQKFNGLTVLPPLLTDEMIAQYTSALLAGTITSGWTFGAGAALQIPFAMQMAYRFNGIGVTQNVLYENQKLIANQFNSAIGKIQDSLSSTASALGKLQDVVNQNAQALNTLVKQLSSNFGAISSVLNDILSRLDPPEAEVQIDRLITGRLQSLQTYVTQQLIRAAEIRASANLAATKMSECVLGQSKRVDFCGKGYHLMSFPQSAPHGVVFLHVTYVPAQEKNFTTAPAICHDGKAHFPREGVFVSNGTHWFVTQRNFYEPQIITTDNTFVSGNCDVVIGIVNNTVYDPLQPELDSGGSGYIPEAPRDGQAYVRKDGEWVLLSTFL

SEQ ID NO: 9746 - protein, 1177 aa, Artificial Sequence
  SARS-CoV-2/Belgium/VAG-03013/2020__EPI_ISL_415155 spike protein (1-1147)(K986P_V987P) Foldon construct
MFVFLVLLPLVSSQCVNLTTRTQLPPAYTNSFTRGVYYPDKVFRSSVLHSTQDLFLPFFSNVTWFHAIHVSGTNGTKRFDNPVLPFNDGVYFASTEKSNIIRGWIFGTTLDSKTQSLLIVNNATNVVIKVCEFQFCNDPFLGVYYHKNNKSWMESEFRVYSSANNCTFEYVSQPFLMDLEGKQGNFKNLREFVFKNIDGYFKIYSKHTPINLVRDLPQGFSALEPLVDLPIGINITRFQTLLALHRSYLTPGDSSSGWTAGAAAYYVGYLQPRTFLLKYNENGTITDAVDCALDPLSETKCTLKSFTVEKGIYQTSNFRVQPTESIVRFPNITNLCPFGEVFNATRFASVYAWNRKRISNCVADYSVLYNSASFSTFKCYGVSPTKLNDLCFTNVYADSFVIRGDEVRQIAPGQTGKIADYNYKLPDDFTGCVIAWNSNNLDSKVGGNYNYLYRLFRKSNLKPFERDISTEIYQAGSTPCNGVEGFNCYFPLQSYGFQPTNGVGYQPYRVVVLSFELLHAPATVCGPKKSTNLVKNKCVNFNFNGLTGTGVLTESNKKFLPFQQFGRDIADTTDAVRDPQTLEILDITPCSFGGVSVITPGTNTSNQVAVLYQGVNCTEVPVAIHADQLTPTWRVYSTGSNVFQTRAGCLIGAEHVNNSYECDIPIGAGICASYQTQTNSPRRARSVASQSIIAYTMSLGAENSVAYSNNSIAIPTNFTISVTTEILPVSMTKTSVDCTMYICGDSTECSNLLLQYGSFCTQLNRALTGIAVEQDKNTQEVFAQVKQIYKTPPIKDFGGFNFSQILPDPSKPSKRSFIEDLLFNKVTLADAGFIKQYGDCLGDIAARDLICAQKFNGLTVLPPLLTDEMIAQYTSALLAGTITSGWTFGAGAALQIPFAMQMAYRFNGIGVTQNVLYENQKLIANQFNSAIGKIQDSLSSTATALGKLQDVVNQNAQALNTLVKQLSSNFGAISSVLNDILSRLDPPEAEVQIDRLITGRLQSLQTYVTQQLIRAAEIRASANLAATKMSECVLGQSKRVDFCGKGYHLMSFPQSAPHGVVFLHVTYVPAQEKNFTTAPAICHDGKAHFPREGVFVSNGTHWFVTQRNFYEPQIITTDNTFVSGNCDVVIGIVNNTVYDPLQPELDSGGSGYIPEAPRDGQAYVRKDGEWVLLSTFL

SEQ ID NO: 9747 - protein, 1177 aa, Artificial Sequence
  SARS-CoV-2/Belgium/BC-03016/2020__EPI_ISL_415157 spike protein (1-1147)(K986P_V987P) Foldon construct
MFVFLVLLPLVSSQCVNLTTRTQLPPAYTNSFTRGVYYPDKVFRSSVLHSTQDLFLPFFSNVTWFHAIHVSGTNGTKRFDNPVLPFNDGVYFASTEKSNIIRGWIFGTTLDSKTQSLLIVNNATNVVIKVCEFQFCNDPFLGVYYHKNNKSWMESEFRVYSSANNCTFEYVSQPFLMDLEGKQGNFKNLREFVFKNIDGYFKIYSKHTPINLVRDLPQGFSALEPLVDLPIGINITRFQTLLALHRSYLTPGDSSSGWTAGAAAYYVGYLQPRTFLLKYNENGTITDAVDCALDPLSETKCTLKSFTVEKGIYQTSNFRVQPTESIVRFPNITNLCPFGEVFNATRFASVYAWNRKRISNCVADYSVLYNSASFSTFKCYGVSPTKLNDLCFTNVYADSFVIRGDEVRQIAPGQTGKIADYNYKLPDDFTGCVIAWNSNNLDSKVGGNYNYLYRLFRKSNLKPFERDISTEIYQAGSTPCNGVEGFNCYFPLQSYGFQPTNGVGYQPYRVVVLSFELLHAPATVCGPKKSTNLVKNKCVNFNFNGLTGTGVLTESNKKFLPFQQFGRDIADTTDAVRDPQTLEILDITPCSFGGVSVITPGTNTSNQVAVLYQGVNCTEVPVAIHADQLTPTWRVYSTGSNVFQTRAGCLIGAEHVNNSYECDIPIGAGICASYQTQTNSPRRARSVASQSIIAYTMSLGAENSVAYSNNSIAIPTNFTISVTTEILPVSMTKTSVDCTMYICGDSTECSNLLLQYGSFCTQLNRALTGIAVEQDKNTQEVFAQVKQIYKTPPIKDFGGFNFSQILPDPSKPSKRSFIEDLLFNKVTLADAGFIKQYGDCLGDIAARDLICAQKFNGLTVLPPLLTDEMIAQYTSALLAGTITSGWTFGAGAALQIPFAMQMAYRFNGIGVTQNVLYENQKLIANQFNSAIGKIQDSLSSTAPALGKLQDVVNQNAQALNTLVKQLSSNFGAISSVLNDILSRLDPPEAEVQIDRLITGRLQSLQTYVTQQLIRAAEIRASANLAATKMSECVLGQSKRVDFCGKGYHLMSFPQSAPHGVVFLHVTYVPAQEKNFTTAPAICHDGKAHFPREGVFVSNGTHWFVTQRNFYEPQIITTDNTFVSGNCDVVIGIVNNTVYDPLQPELDSGGSGYIPEAPRDGQAYVRKDGEWVLLSTFL

SEQ ID NO: 9748 - protein, 1177 aa, Artificial Sequence
  SARS-CoV-2/Germany/BavPat3/2020__EPI_ISL_414521 spike protein (1-1147)(K986P_V987P) Foldon construct
MFVFLVLLPLVSSQCVNLTTRTQLPPAYTNSFTRGVYYPDKVFRSSVLHSTQDLFLPFFSNVTWFHAIHVSGTNGTKRFDNPVLPFNDGVYFASTEKSNIIRGWIFGTTLDSKTQSLLIVNNATNVVIKVCEFQFCNDPFLGVYYHKNNKSWMESEFRVYSSANNCTFEYVSQPFLMDLEGKQGNFKNLREFVFKNIDGYFKIYSKHTPINLVRDLPQGFSALEPLVDLPIGINITRFQTLLALHRSYLTPGDSSSGWTAGAAAYYVGYLQPRTFLLKYNENGTITDAVDCALDPLSETKCTLKSFTVEKGIYQTSNFRVQPTESIVRFPNITNLCPFGEVFNATRFASVYAWNRKRISNCVADYSVLYNSASFSTFKCYGVSPTKLNDLCFTNVYADSFVIRGDEVRQIAPGQTGKIADYNYKLPDDFTGCVIAWNSNNLDSKVGGNYNYLYRLFRKSNLKPFERDISTEIYQAGSTPCNGVEGFNCYFPLQSYGFQPTNGVGYQPYRVVVLSFELLHAPATVCGPKKSTNLVKNKCVNFNFNGLTGTGVLTESNKKFLPFQQFGRDIADTTDAVRDPQTLEILDITPCSFGGVSVITPGTNTSNQVAVLYQDVNCTEVPVAIHADQLTPTWRVYSTGSNVFQTRAGCLIGAEHVNNSYECDIPIGAGICASYQTQTNSPRRARSVASQSIIAYTMSLGAENSVAYSNNSIAIPTNFTISVTTEILPVSMTKTSVDCTMYICGDSTECSNLLLQYGSFCTQLNRALTGIAVEQDKNTQQVFAQVKQIYKTPPIKDFGGFNFSQILPDPSKPSKRSFIEDLLFNKVTLADAGFIKQYGDCLGDIAARDLICAQKFNGLTVLPPLLTDEMIAQYTSALLAGTITSGWTFGAGAALQIPFAMQMAYRFNGIGVTQNVLYENQKLIANQFNSAIGKIQDSLSSTASALGKLQDVVNQNAQALNTLVKQLSSNFGAISSVLNDILSRLDPPEAEVQIDRLITGRLQSLQTYVTQQLIRAAEIRASANLAATKMSECVLGQSKRVDFCGKGYHLMSFPQSAPHGVVFLHVTYVPAQEKNFTTAPAICHDGKAHFPREGVFVSNGTHWFVTQRNFYEPQIITTDNTFVSGNCDVVIGIVNNTVYDPLQPELDSGGSGYIPEAPRDGQAYVRKDGEWVLLSTFL

SEQ ID NO: 9749 - protein, 1177 aa, Artificial Sequence
  SARS-CoV-2/France/HF1805/2020__EPI_ISL_414628 spike protein (1-1147)(K986P_V987P) Foldon construct
MFVFLVLLPLVSSQCVNLTTRTQLPPAYTNSFTRGVYYPDKVFRSSVLHSTQDLFLPFFSNVTWFHAIHVSGTNGTKRFDNPVLPFNDGVYFASTEKSNIIRGWIFGTTLDSKTQSLLIVNNATNVVIKVCEFQFCNDPFLGVYYHKNNKSWMESEFRVYSSANNCTFEYVSQPFLMDLEGKQGNFKNLREFVFKNIDGYFKIYSKHTPINLVRDLPQGFSALEPLVDLPIGINITRFQTLLALHRSYLTPGDSSSGWTAGAAAYYVGYLQPRTFLLKYNENGTITDAVDCALDPLSETKCTLKSFTVEKGIYQTSNFRVQPTESIVRFPNITNLCPFGEVFNATRFASVYAWNRKRISNCVADYSVLYNSASFSTFKCYGVSPTKLNDLCFTNVYADSFVIRGDEVRQIAPGQTGKIADYNYKLPDDFTGCVIAWNSNNLDSKVGGNYNYLYRLFRKSNLKPFERDISTEIYQAGSTPCNGVEGFNCYFPLQSYGFQPTNGVGYQPYRVVVLSFELLHAPATVCGPKKSTNLVKNKCVNFNFNGLTGTGVLTESNKKFLPFQQFGRDIADTTDAVRDPQTLEILDITPCSFGGVSVITPGTNTSNQVAVLYQGVNCTEVPVAIHADQLTPTWRVYSTGSNVFQTRAGCLIGAEHVNNSYECDIPIGAGICASYQTQTNSPRRARSVASQSIIAYTMSLGAENSVAYSNNSIAIPTNFTISVTTEILPVSMTKTSVDCTMYICGDSTECSNLLLQYGSFCTQLNRALTGIAVEQDKNTQEVFAQVKQIYKTPPIKDFGGFNFSQILPDPSKPSKRSFIEDLLFNKVTLADAGFIKQYGDCLGDIAARDLICAQKFNGLTVLPPLLTDEMIAQYTSALLAGTITSGWTFGAGAALQIPFAMQMAYRFNGIGVTQNVLYENQKLIANQFNSAIGKIQDSLSSTASALGKLQDVVNQNAQALNTLVKQLSSNFGAISSVLNDILSRLDPPEAEVQIDRLITGRLQSLQTYVTQQLIRAAEIRASANLAATKMSECVLGQSKRVDFCGKGYHLMSFPQSAPHGVVFLHVTYVPAQEKNFTTAPAICHDGKAHFPREGVFVSNGTHWFVTQRNFYEPQIITTDNTFVSGNCDVVIGVVNNTVYDPLQPELDSGGSGYIPEAPRDGQAYVRKDGEWVLLSTFL

SEQ ID NO: 9750 - protein, 1177 aa, Artificial Sequence
  SARS-CoV-2/Netherlands/ZuidHolland_9/2020__EPI_ISL_414445 spike protein (1-1147)(K986P_V987P) Foldon construct
MFVFLVLLPLVSSQCVNLTTRTQLPPAYTNSFTRGVYYPDKVFRSSVLHSTQDLFLPFFSNVTWFHAIHVSGTNGTKRFDNPVLPFNDGVYFASTEKSNIIRGWIFGTTLDSKTQSLLIVNNATNVVIKVCEFQFCNDPFLGVYYHKNNKSWMESEFRVYSSANNCTFEYVSQPFLMDLEGKQGNFKNLREFVFKNIDGYFKIYSKHTPINLVRDLPQGFSALEPLVDLPIGINITRFQTLLALHRSYLTPGDSSSGWTAGAAAYYVGYLQPRTFLLKYNENGTITDAVDCALDPLSETKCTLKSFTVEKGIYQTSNFRVQPTESIVRFPNITNLCPFGEVFNATRFASVYAWNRKRISNCVADYSVLYNSASFSTFKCYGVSPTKLNDLCFTNVYADSFVIRGDEVRQIAPGQTGKIADYNYKLPDDFTGCVIAWNSNNLDSKVGGNYNYLYRLFRKSNLKPFERDISTEIYQAGSTPCNGVEGFNCYFPLQSYGFQPTNGVGYQPYRVVVLSFELLHAPATVCGPKKSTNLVKNKCVNFNFNGLTGTGVLTESNKKFLPFQQFGRDIADTTDAVRDPQTLEILDITPCSFGGVSVITPGTNTSNQVAVLYQGVNCTEVPVAIHADQLTPTWRVYSTGSNVFQTRAGCLIGAEHVNNSYECDIPIGAGICASYQTQTNSPRRARSVASQSIIAYTMSLGAENSVAYSNNSIAIPTNFTISVTTEILPVSMTKTSVDCTMYICGDSTECSNLLLQYGSFCTQLNRALTGIAVEQDKNTQEVFAQVKQIYKTPPIKDFGGFNFSQILPDPSKPSKRSFIEDLLFNKVTLADAGFIKQYGDCLGDIAARDLICVQKFNGLTVLPPLLTDEMIAQYTSALLAGTITSGWTFGAGAALQIPFAMQMAYRFNGIGVTQNVLYENQKLIANQFNSAIGKIQDSLSSTASALGKLQDVVNQNAQALNTLVKQLSSNFGAISSVLNDILSRLDPPEAEVQIDRLITGRLQSLQTYVTQQLIRAAEIRASANLAATKMSECVLGQSKRVDFCGKGYHLMSFPQSAPHGVVFLHVTYVPAQEKNFTTAPAICHDGKAHFPREGVFVSNGTHWFVTQRNFYEPQIITTDNTFVSGNCDVVIGIVNNTVYDPLQPELDSGGSGYIPEAPRDGQAYVRKDGEWVLLSTFL

SEQ ID NO: 9751 - protein, 1177 aa, Artificial Sequence
  SARS-CoV-2/Finland/FIN03032020A/2020__EPI_ISL_413602 spike protein (1-1147)(K986P_V987P) Foldon construct
MFVFLVLLPLVSSQCVNLTTRTQLPPAYTNSFTRGVYYPDKVFRSSVLHSTQDLFLPFFSNVTWFHAIHVSGTNGTKRFDNPVLPFNDGVYFASTEKSNIIRGWIFGTTLDSKTQSLLIVNNATNVVIKVCEFQFCNDPFLGVYYHKNNKSWMESEFRVYSSANNCTFEYVSQPFLMDLEGKQGNFKNLREFVFKNIDGYFKIYSKHTPINLVRDLPQGFSALEPLVDLPIGINITRFQTLLALHRSYLTPGDSSSGWTAGAAAYYVGYLQPRTFLLKYNENGTITDAVDCALDPLSETKCTLKSFTVEKGIYQTSNFRVQPTESIVRFPNITNLCPFGEVFNATRFASVYAWNRKRISNCVADYSVLYNSASFSTFKCYGVSPTKLNDLCFTNVYADSFVIRGDEVRQIAPGQTGKIADYNYKLPDDFTGCVISWNSNNLDSKVGGNYNYLYRLFRKSNLKPFERDISTEIYQAGSTPCNGVEGFNCYFPLQSYGFQPTNGVGYQPYRVVVLSFELLHAPATVCGPKKSTNLVKNKCVNFNFNGLTGTGVLTESNKKFLPFQQFGRDIADTTDAVRDPQTLEILDITPCSFGGVSVITPGTNTSNQVAVLYQGVNCTEVPVAIHADQLTPTWRVYSTGSNVFQTRAGCLIGAEHVNNSYECDIPIGAGICASYQTQTNSPRRARSVASQSIIAYTMSLGAENSVAYSNNSIAIPTNFTISVTTEILPVSMTKTSVDCTMYICGDSTECSNLLLQYGSFCTQLNRALTGIAVEQDKNTQEVFAQVKQIYKTPPIKDFGGFNFSQILPDPSKPSKRSFIEDLLFNKVTLADAGFIKQYGDCLGDIAARDLICAQKFNGLTVLPPLLTDEMIAQYTSALLAGTITSGWTFGAGAALQIPFAMQMAYRFNGIGVTQNVLYENQKLIANQFNSAIGKIQDSLSSTASALGKLQDVVNQNAQALNTLVKQLSSNFGAISSVLNDILSRLDPPEAEVQIDRLITGRLQSLQTYVTQQLIRAAEIRASANLAATKMSECVLGQSKRVDFCGKGYHLMSFPQSAPHGVVFLHVTYVPAQEKNFTTAPAICHDGKAHFPREGVFVSNGTHWFVTQRNFYEPQIITTDNTFVSGNCDVVIGIVNNTVYDPLQPELDSGGSGYIPEAPRDGQAYVRKDGEWVLLSTFL

SEQ ID NO: 9752 - protein, 1177 aa, Artificial Sequence
  SARS-CoV-2/France/GE1977/2020__EPI_ISL_414632 spike protein (1-1147)(K986P_V987P) Foldon construct
MFVFLVLLPLVSSQCVNLTTRTQLPPAYTNSFTRGVYYPDKVFRSSVLHSTQDLFLPFFSNVTWFHAIHVSGTNGTKRFDNPVLPFNDGVYFASTEKSNIIRGWIFGTTLDSKTQSLLIVNNATNVVIKVCEFQFCNDPFLGVYYHKNNKSWMESEFRVYSSANNCTFEYVSQPFLMDLEGKQGNFKNLREFVFKNIDGYFKIYSKHTPINLVRDLPQGFSALEPLVDLPIGINITRFQTLLALHRSYLTPGDSSSGWTAGAAAYYVGYLQPRTFLLKYNENGTITDAVDCALDPLSETKCTLKSFTVEKGIYQTSNFRVQPTESIVRFPNITNLCPFGEVFNATRFASVYAWNRKRISNCVADYSVLYNSASFSTFKCYGVSPTKLNDLCFTNVYADSFVIRGDEVRQIAPGQTGKIADYNYKLPDDFTGCVIAWNSNNLDSKVGGNYNYLYRLFRKSNLKPFERDISTEIYQAGSTPCNGVEGFNCYFPLQSYGFQPTNGVGYQPYRVVVLSFELLHAPATVCGPKKSTNLVKNKCVNFNFNGLTGTGVLTESNKKFLPFQQFGRDIADTTDAVRDPQTLEILDITPCSFGGVSVITPGTNTSNQVAVLYQGVNCTEVPVAIHADQLTPTWRVYSTGSNVFQTRAGCLIGAEHVNNSYECDIPIGAGICASYQTQTNSPRRARSVASQSIIAYTMSLGAENSVAYSNNSIAIPTNFTISVTTEILPVSMTKTSVDCTMYICGDSTECSNLLLQYGSFCTQLNRALTGIAVEQDKNTQEVFAQVKQIYKTPPIKDFGGFNFSQILPDPSKPSKRSFIEDLLFNKVTLADAGFIKQYGDCLGDIAARDLICAQKFNGLTVLPPLLTDEMIAQYTSALLAGTITSGWTFGAGAALQIPFAMQMAYRFNGIGVTQNVLYENQKLIANQFNSAIGKIQDSLFSTASALGKLQDVVNQNAQALNTLVKQLSSNFGAISSVLNDILSRLDPPEAEVQIDRLITGRLQSLQTYVTQQLIRAAEIRASANLAATKMSECVLGQSKRVDFCGKGYHLMSFPQSAPHGVVFLHVTYVPAQEKNFTTAPAICHDGKAHFPREGVFVSNGTHWFVTQRNFYEPQIITTDNTFVSGNCDVVIGIVNNTVYDPLQPELDSGGSGYIPEAPRDGQAYVRKDGEWVLLSTFL

SEQ ID NO: 9753 - protein, 1177 aa, Artificial Sequence
  SARS-CoV-2/Finland/FIN-313/2020__EPI_ISL_414641 spike protein (1-1147)(K986P_V987P) Foldon construct
MFVFLVLLPLVSSQCVNLTTRTQLPPAYTNSFTRGVYYPDKVFRSSVLHSTQDLFLPFFSNVTWFHAIHVSGTNGTKRFDNPVLPFNDGVYFASTEKSNIIRGWIFGTTLDSKTQSLLIVNNATNVVIKVCEFQFCNDPFLGVYYHKNNKSWMESEFRVYSSANNCTFEYVSQPFLMDLEGKQGNFKNLREFVFKNIDGYFKIYSKHTPINLVRDLPQGFSALEPLVDLPIGINITRFKTLLALHRSYLTPGDSSSGWTAGAAAYYVGYLQPRTFLLKYNENGTITDAVDCALDPLSETKCTLKSFTVEKGIYQTSNFRVQPTESIVRFPNITNLCPFGEVFNATRFASVYAWNRKRISNCVADYSVLYNSASFSTFKCYGVSPTKLNDLCFTNVYADSFVIRGDEVRQIAPGQTGKIADYNYKLPDDFTGCVIAWNSNNLDSKVGGNYNYLYRLFRKSNLKPFERDISTEIYQAGSTPCNGVEGFNCYFPLQSYGFQPTNGVGYQPYRVVVLSFELLHAPATVCGPKKSTNLVKNKCVNFNFNGLTGTGVLTESNKKFLPFQQFGRDIADTTDAVRDPQTLEILDITPCSFGGVSVITPGTNTSNQVAVLYQGVNCTEVPVAIHADQLTPTWRVYSTGSNVFQTRAGCLIGAEHVNNSYECDIPIGAGICASYQTQTNSPRRARSVASQSIIAYTMSLGAENSVAYSNNSIAIPTNFTISVTTEILPVSMTKTSVDCTMYICGDSTECSNLLLQYGSFCTQLNRALTGIAVEQDKNTQEVFAQVKQIYKTPPIKDFGGFNFSQILPDPSKPSKRSFIEDLLFNKVTLADAGFIKQYGDCLGDIAARDLICAQKFNGLTVLPPLLTDEMIAQYTSALLAGTITSGWTFGAGAALQIPFAMQMAYRFNGIGVTQNVLYENQKLIANQFNSAIGKIQDSLSSTASALGKLQDVVNQNAQALNTLVKQLSSNFGAISSVLNDILSRLDPPEAEVQIDRLITGRLQSLQTYVTQQLIRAAEIRASANLAATKMSECVLGQSKRVDFCGKGYHLMSFPQSAPHGVVFLHVTYVPAQEKNFTTAPAICHDGKAHFPREGVFVSNGTHWFVTQRNFYEPQIITTDNTFVSGNCDVVIGIVNNTVYDPLQPELDSGGSGYIPEAPRDGQAYVRKDGEWVLLSTFL

SEQ ID NO: 9754 - protein, 1177 aa, Artificial Sequence
  SARS-CoV-2/Netherlands/ZuidHolland_2/2020__EPI_ISL_414556 spike protein (1-1147)(K986P_V987P) Foldon construct
MFVFLVLLPLVSSQCVNLTTRTQLPPAYTNSFTRGVYYPDKVFRSSVLHSTQDLFLPFFSNVTWFHAIHVSGTNGTKRFDNPVLPFNDGVYFASTEKSNIIRGWIFGTTLDSKTQSLLIVNNATNVVIKVCEFQFCNDPFLGVYYHKNNKSWMESEFRVYSSANNCTFEYVSQPFLMDLEGKQGNFKNLREFVFKNIDGYFKIYSKHTPINLVRDLPQGFSALEPLVDLPIGINITRFQTLLALHRSYLTPGDSSSGWTAGAAAYYVGYLQPRTFLLKYNENGTITDAVDCALDPLSETKCTLKSFTVEKGIYQTSNFRVQPTESIVRFPNITNLCPFGEVFNATRFASVYAWNRKRISNCVADYSVLYNSASFSTFKCYGVSPTKLNDLCFTNVYADSFVIRGDEVRQIAPGQTGKIADYNYKLPDDFTGCVIAWNSNNLDSKVGGNYNYLYRLFRKSNLKPFERDISTEIYQAGSTPCNGVEGFNCYFPLQSYGFQPTNGVGYQPYRVVVLSFELLHAPATVCGPKKSTNLVKNKCVNFNFNGLTGTGVLTESNKKFLPFQQFGRDIADTTDAVRDPQTLEILDITPCSFGGVSVITPGTNTSNQVAVLYQGVNCTEVPVAIHADQLTPTWRVYSTGSNVFQTRAGCLIGAEHVNNSYECDIPIGAGICASYQTQTNSPRRARSVASQSIIAYTMSLGAENSVAYSNNSIAIPTNFTISVTTEILPVSMTKTSVDCTMYICGDSTECSNLLLQYGSFCTQLNRALTGIALEQDKNTQEVFAQVKQIYKTPPIKDFGGFNFSQILPDPSKPSKRSFIEDLLFNKVTLADAGFIKQYGDCLGDIAARDLICAQKFNGLTVLPPLLTDEMIAQYTSALLAGTITSGWTFGAGAALQIPFAMQMAYRFNGIGVTQNVLYENQKLIANQFNSAIGKIQDSLSSTASALGKLQDVVNQNAQALNTLVKQLSSNFGAISSVLNDILSRLDPPEAEVQIDRLITGRLQSLQTYVTQQLIRAAEIRASANLAATKMSECVLGQSKRVDFCGKGYHLMSFPQSAPHGVVFLHVTYVPAQEKNFTTAPAICHDGKAHFPREGVFVSNGTHWFVTQRNFYEPQIITTDNTFVSGNCDVVIGIVNNTVYDPLQPELDSGGSGYIPEAPRDGQAYVRKDGEWVLLSTFL

SEQ ID NO: 9755 - protein, 1177 aa, Artificial Sequence
  SARS-CoV-2/USA/WA-UW31/2020__EPI_ISL_414618 spike protein (1-1147)(K986P_V987P) Foldon construct
MFVFLVLLPLVSSQCVNLTTRTQLPPAYTNSFTRGVYYPDKVFRSSVLHSTQDLFLPFFSNVTWFHAIHVSGTNGTKRFDNPVLPFNDGVYFASTEKSNIIRGWIFGTTLDSKTQSLLIVNNATNVVIKVCEFQFCNDPFLGVYYHKNNKSWMESEFRVYSSANNCTFEYVSQPFLMDLEGKQGNFKNLREFVFKNIDGYFKIYSKHTPINLVRDLPQGFSALEPLVDLPIGINITRFQTLLALHRSYLTPGDSSSGWTAGAAAYYVGYLQPRTFLLKYNENGTITDAVDCALDPLSETKCTLKSFTVEKGIYQTSNFRVQPTESIVRFPNITNLCPFGEVFNATRFASVYAWNRKRISNCVADYSVLYNSASFSTFKCYGVSPTKLNDLCFTNVYADSFVIRGDEVRQIAPGQTGKIADYNYKLPDDFTGCVIAWNSNNLDSKVGGNYNYLYRLFRKSNLKPFERDISTEIYQAGSTPCNGAEGFNCYFPLQSYGFQPTNGVGYQPYRVVVLSFELLHAPATVCGPKKSTNLVKNKCVNFNFNGLTGTGVLTESNKKFLPFQQFGRDIADTTDAVRDPQTLEILDITPCSFGGVSVITPGTNTSNQVAVLYQDVNCTEVPVAIHADQLTPTWRVYSTGSNVFQTRAGCLIGAEHVNNSYECDIPIGAGICASYQTQTNSPRRARSVASQSIIAYTMSLGAENSVAYSNNSIAIPTNFTISVTTEILPVSMTKTSVDCTMYICGDSTECSNLLLQYGSFCTQLNRALTGIAVEQDKNTQEVFAQVKQIYKTPPIKDFGGFNFSQILPDPSKPSKRSFIEDLLFNKVTLADAGFIKQYGDCLGDIAARDLICAQKFNGLTVLPPLLTDEMIAQYTSALLAGTITSGWTFGAGAALQIPFAMQMAYRFNGIGVTQNVLYENQKLIANQFNSAIGKIQDSLSSTASALGKLQDVVNQNAQALNTLVKQLSSNFGAISSVLNDILSRLDPPEAEVQIDRLITGRLQSLQTYVTQQLIRAAEIRASANLAATKMSECVLGQSKRVDFCGKGYHLMSFPQSAPHGVVFLHVTYVPAQEKNFTTAPAICHDGKAHFPREGVFVSNGTHWFVTQRNFYEPQIITTDNTFVSGNCDVVIGIVNNTVYDPLQPELDSGGSGYIPEAPRDGQAYVRKDGEWVLLSTFL

SEQ ID NO: 9756 - protein, 1177 aa, Artificial Sequence
  SARS-CoV-2/South Korea/SNU01/2020__EPI_ISL_411929 spike protein (1-1147)(K986P_V987P) Foldon construct
MFVFLVLLPLVSSQCVNLTTRTQLPPAYTNSFTRGVYYPDKVFRSSVLHSTQDLFLPFFSNVTWFHAIHVSGTNGTKRFDNPVLPFNDGVYFASTEKSNIIRGWIFGTTLDSKTQSLLIVNNATNVVIKVCEFQFCNDPFLGVYYHKNNKSWMESEFRVYSSANNCTFEYVSQPFLMDLEGKQGNFKNLREFVFKNIDGYFKIYSKHTPINLVRDLPQGFWALEPLVDLPIGINITRFQTLLALHRSYLTPGDSSSGWTAGAAAYYVGYLQPRTFLLKYNENGTITDAVDCALDPLSETKCTLKSFTVEKGIYQTSNFRVQPTESIVRFPNITNLCPFGEVFNATRFASVYAWNRKRISNCVADYSVLYNSASFSTFKCYGVSPTKLNDLCFTNVYADSFVIRGDEVRQIAPGQTGKIADYNYKLPDDFTGCVIAWNSNNLDSKVGGNYNYLYRLFRKSNLKPFERDISTEIYQAGSTPCNGVEGFNCYFPLQSYGFQPTNGVGYQPYRVVVLSFELLHAPATVCGPKKSTNLVKNKCVNFNFNGLTGTGVLTESNKKFLPFQQFGRDIADTTDAVRDPQTLEILDITPCSFGGVSVITPGTNTSNQVAVLYQDVNCTEVPVAIHADQLTPTWRVYSTGSNVFQTRAGCLIGAEHVNNSYECDIPIGAGICASYQTQTNSPRRARSVASQSIIAYTMSLGAENSVAYSNNSIAIPTNFTISVTTEILPVSMTKTSVDCTMYICGDSTECSNLLLQYGSFCTQLNRALTGIAVEQDKNTQEVFAQVKQIYKTPPIKDFGGFNFSQILPDPSKPSKRSFIEDLLFNKVTLADAGFIKQYGDCLGDIAARDLICAQKFNGLTVLPPLLTDEMIAQYTSALLAGTITSGWTFGAGAALQIPFAMQMAYRFNGIGVTQNVLYENQKLIANQFNSAIGKIQDSLSSTASALGKLQDVVNQNAQALNTLVKQLSSNFGAISSVLNDILSRLDPPEAEVQIDRLITGRLQSLQTYVTQQLIRAAEIRASANLAATKMSECVLGQSKRVDFCGKGYHLMSFPQSAPHGVVFLHVTYVPAQEKNFTTAPAICHDGKAHFPREGVFVSNGTHWFVTQRNFYEPQIITTDNTFVSGNCDVVIGIVNNTVYDPLQPELDSGGSGYIPEAPRDGQAYVRKDGEWVLLSTFL

SEQ ID NO: 9757 - protein, 1177 aa, Artificial Sequence
  SARS-CoV-2/China/WF0004/2020__EPI_ISL_413694 spike protein (1-1147)(K986P_V987P) Foldon construct
MFVFLVLLPLVSSQCVNLTTRTQLPPAYTNSFTRGVYYPDKVFRSSVLHSTQDLFLPFFSNVTWFHAIHVSGTNGTKRFDNPVLPFNDGVYFASTEKSNIIRGWIFGTTLDSKTQSLLIVNNATNVVIKVCEFQFCNDPFLGVYYHKNNKSWTESEFRVYSSANNCTFEYVSQPFLMDLEGKQGNFKNLREFVFKNIDGYFKIYSKHTPINLVRDLPQGFSALEPLVDLPIGINITRFQTLLALHRSYLTPGDSSSGWTAGAAAYYVGYLQPRTFLLKYNENGTITDAVDCALDPLSETKCTLKSFTVEKGIYQTSNFRVQPTESIVRFPNITNLCPFGEVFNATRFASVYAWNRKRISNCVADYSVLYNSASFSTFKCYGVSPTKLNDLCFTNVYADSFVIRGDEVRQIAPGQTGKIADYNYKLPDDFTGCVIAWNSNNLDSKVGGNYNYLYRLFRKSNLKPFERDISTEIYQAGSTPCNGVEGFNCYFPLQSYGFQPTNGVGYQPYRVVVLSFELLHAPATVCGPKKSTNLVKNKCVNFNFNGLTGTGVLTESNKKFLPFQQFGRDIADTTDAVRDPQTLEILDITPCSFGGVSVITPGTNTSNQVAVLYQDVNCTEVPVAIHADQLTPTWRVYSTGSNVFQTRAGCLIGAEHVNNSYECDIPIGAGICASYQTQTNSPRRARSVASQSIIAYTMSLGAENSVAYSNNSIAIPTNFTISVTTEILPVSMTKTSVDCTMYICGDSTECSNLLLQYGSFCTQLNRALTGIAVEQDKNTQEVFAQVKQIYKTPPIKDFGGFNFSQILPDPSKPSKRSFIEDLLFNKVTLADAGFIKQYGDCLGDIAARDLICAQKFNGLTVLPPLLTDEMIAQYTSALLAGTITSGWTFGAGAALQIPFAMQMAYRFNGIGVTQNVLYENQKLIANQFNSAIGKIQDSLSSTASALGKLQDVVNQNAQALNTLVKQLSSNFGAISSVLNDILSRLDPPEAEVQIDRLITGRLQSLQTYVTQQLIRAAEIRASANLAATKMSECVLGQSKRFDFCGKGYHLMSFPQSAPHGVVFLHVTYVPAQEKNFTTAPAICHDGKAHFPREGVFVSNGTHWFVTQRNFYEPQIITTDNTFVSGNCDVVIGIVNNTVYDPLQPELDSGGSGYIPEAPRDGQAYVRKDGEWVLLSTFL

SEQ ID NO: 9758 - protein, 1177 aa, Artificial Sequence
  SARS-CoV-2/China/WF0028/2020__EPI_ISL_413791 spike protein (1-1147)(K986P_V987P) Foldon construct
MFVFLVLLPLVSSQCVNLTTRTQLPPAYTNSFTRGVYYPDKVFRSSVLHSTQDLFLPFFSNVTWFHAIHVSGTNGTKRFDNPVLPFNDGVYFASTEKSNIIRGWIFGTTLDSKTQSLLIVNNATNVVIKVCEFQFCNDPFLGVYYHKNNKSWMESEFRVYSSANNCTFEYVSQPFLMDLEGKQGNFKNLREFVFKNIDGYFKIYSKHTPINLVRDLPQGFSALEPLVDLPIGINITRFQTLLALHRSYLTPGDSSSGWTAGAAAYYVGYLQPRTFLLKYNENGTITDAVDCALDPLSETKCTLKSFTVEKGIYQTSNFRVQPTESIVRFPNITNLCPFGEVFNATRFASVYAWNRKRISNCVADYSVLYNSASFSTFKCYGVSPTKLNDLCFTNVYADSFVIRGDEVRQIAPGQTGKIADYNYKLPDDFTGCVIAWNSNNLDSKVGGNYNYLYRLFRKSNLKPFERDISTEIYQAGSTPCNGVEGFNCYFPLQSYGFQPTNGVGYQPYRVVVLSFELLHAPATVCGPKKSTNLVKNKCVNFNFNGLTGTGVLTESNKKFLPFQQFGRDIADTTDAVRDPQTLEILDITPCSFGGVSVITPGTNTSNQVAVLYQDVNCTEVPVAIHADQLTPTWRVYSTGSNVFQTRAGCLIGAEHVNNSYECDIPIGAGICASYQTQTNSPRRARSVASQSIIAYTMSLGAENSVAYSNNSIAIPTNFTISVTTEILPVSMTKTSVDCTMYICGDSTECSNLLLQYGSFCTQLNRALTGIAVEQDKNTQEVFAQVKQIYKTPPIKDFGGFNFSQILPDPSKPSKRSFIEDLLFNKVTLADAGFIKQYGDCLGDIAARDLICAQKFNGLTVLPPLLTDEMIAQYTSALLAGTITSGWTFGAGAALQIPFAMQMAYRFNGIGVTQNVLYENQKLIANQFNSAIGKIQDSLSSTASALGKLQDVVNQNAQALNTLVKQLSSNFGAISSVLNDILSRLDPPEAEVQIDRLITGRLQSLQTYVTQQLIRAAEIRASANLAATKMSECVLGQSKRVDFCGKGYHLMSFPQSAPHGVVFLHVTYVPAQEKNFTTAPAICHDGKAHFPREGVFVSNGTHWFVTQRNFYEPQIITTDNTFVSGNCDVVIGIVNNTVYDPLQPELESGGSGYIPEAPRDGQAYVRKDGEWVLLSTFL

SEQ ID NO: 9759 - protein, 1177 aa, Artificial Sequence
  SARS-CoV-2/2019-nCoV/USA-CruiseA-18/2020__MT159716.1 spike protein (1-1147)(K986P_V987P) Foldon construct
MFVFLVLLPLVSSQCVNLTTRTQLPPAYTNSFTRGVYYPDKVFRSSVLHSTQDLFLPFFSNVTWFHAIHVSGTNGTKRFDNPVLPFNDGVYFASTEKSNIIRGWIFGTTLDSKTQSLLIVNNATNVVIKVCEFQFCNDPFLGVYYHKNNKSWMESELRVYSSANNCTFEYVSQPFLMDLEGKQGNFKNLREFVFKNIDGYFKIYSKHTPINLVRDLPQGFSALEPLVDLPIGINITRFQTLLALHRSYLTPGDSSSGWTAGAAAYYVGYLQPRTFLLKYNENGTITDAVDCALDPLSETKCTLKSFTVEKGIYQTSNFRVQPTESIVRFPNITNLCPFGEVFNATRFASVYAWNRKRISNCVADYSVLYNSASFSTFKCYGVSPTKLNDLCFTNVYADSFVIRGDEVRQIAPGQTGKIADYNYKLPDDFTGCVIAWNSNNLDSKVGGNYNYLYRLFRKSNLKPFERDISTEIYQAGSTPCNGVEGFNCYFPLQSYGFQPTNGVGYQPYRVVVLSFELLHAPATVCGPKKSTNLVKNKCVNFNFNGLTGTGVLTESNKKFLPFQQFGRDIADTTDAVRDPQTLEILDITPCSFGGVSVITPGTNTSNQVAVLYQDVNCTEVPVAIHADQLTPTWRVYSTGSNVFQTRAGCLIGAEHVNNSYECDIPIGAGICASYQTQTNSPRRARSVASQSIIAYTMSLGAENSVAYSNNSIAIPTNFTISVTTEILPVSMTKTSVDCTMYICGDSTECSNLLLQYGSFCTQLNRALTGIAVEQDKNTQEVFAQVKQIYKTPPIKDFGGFNFSQILPDPSKPSKRSFIEDLLFNKVTLADAGFIKQYGDCLGDIAARDLICAQKFNGLTVLPPLLTDEMIAQYTSALLAGTITSGWTFGAGAALQIPFAMQMAYRFNGIGVTQNVLYENQKLIANQFNSAIGKIQDSLSSTASALGKLQDVVNQNAQALNTLVKQLSSNFGAISSVLNDILSRLDPPEAEVQIDRLITGRLQSLQTYVTQQLIRAAEIRASANLAATKMSECVLGQSKRVDFCGKGYHLMSFPQSAPHGVVFLHVTYVPAQEKNFTTAPAICHDGKAHFPREGVFVSNGTHWFVTQRNFYEPQIITTDNTFVSGNCDVVIGIVNNTVYDPLQPELDSGGSGYIPEAPRDGQAYVRKDGEWVLLSTFL

SEQ ID NO: 9760 - protein, 1177 aa, Artificial Sequence
  SARS-CoV-2/SARS-CoV-2/Yunnan-01/human/2020/CHN__MT049951.1 spike protein (1-1147)(K986P_V987P) Foldon construct
MFVFLVLLPLVSSQCVNLTTRTQLPPANTNSFTRGVYYPDKVFRSSVLHSTQDLFLPFFSNVTWFHAIHVSGTNGTKRFDNPVLPFNDGVYFASTEKSNIIRGWIFGTTLDSKTQSLLIVNNATNVVIKVCEFQFCNDPFLGVYYHKNNKSWMESEFRVYSSANNCTFEYVSQPFLMDLEGKQGNFKNLREFVFKNIDGYFKIYSKHTPINLVRDLPQGFSALEPLVDLPIGINITRFQTLLALHRSYLTPGDSSSGWTAGAAAYYVGYLQPRTFLLKYNENGTITDAVDCALDPLSETKCTLKSFTVEKGIYQTSNFRVQPTESIVRFPNITNLCPFGEVFNATRFASVYAWNRKRISNCVADYSVLYNSASFSTFKCYGVSPTKLNDLCFTNVYADSFVIRGDEVRQIAPGQTGKIADYNYKLPDDFTGCVIAWNSNNLDSKVGGNYNYLYRLFRKSNLKPFERDISTEIYQAGSTPCNGVEGFNCYFPLQSYGFQPTNGVGYQPYRVVVLSFELLHAPATVCGPKKSTNLVKNKCVNFNFNGLTGTGVLTESNKKFLPFQQFGRDIADTTDAVRDPQTLEILDITPCSFGGVSVITPGTNTSNQVAVLYQDVNCTEVPVAIHADQLTPTWRVYSTGSNVFQTRAGCLIGAEHVNNSYECDIPIGAGICASYQTQTNSPRRARSVASQSIIAYTMSLGAENSVAYSNNSIAIPTNFTISVTTEILPVSMTKTSVDCTMYICGDSTECSNLLLQYGSFCTQLNRALTGIAVEQDKNTQEVFAQVKQIYKTPPIKDFGGFNFSQILPDPSKPSKRSFIEDLLFNKVTLADAGFIKQYGDCLGDIAARDLICAQKFNGLTVLPPLLTDEMIAQYTSALLAGTITSGWTFGAGAALQIPFAMQMAYRFNGIGVTQNVLYENQKLIANQFNSAIGKIQDSLSSTASALGKLQDVVNQNAQALNTLVKQLSSNFGAISSVLNDILSRLDPPEAEVQIDRLITGRLQSLQTYVTQQLIRAAEIRASANLAATKMSECVLGQSKRVDFCGKGYHLMSFPQSAPHGVVFLHVTYVPAQEKNFTTAPAICHDGKAHFPREGVFVSNGTHWFVTQRNFYEPQIITTDNTFVSGNCDVVIGIVNNTVYDPLQPELDSGGSGYIPEAPRDGQAYVRKDGEWVLLSTFL

SEQ ID NO: 9761 - protein, 1177 aa, Artificial Sequence
  SARS-CoV-2/USA/WA-UW292/2020__EPI_ISL_418077 spike protein (1-1147)(K986P_V987P) Foldon construct
MFVFLVLLPLVSSQCVNLTTRTQLPPAYTNSFTRGVYYPDKVFRSSVLHSTQDLFLPFFSNVTWFHAIHVSGTNGTKRFDNPVLPFNDGVYFASTEKSNIIRGWIFGTTLDSKTQSLLIVNNATNVVIKVCEFQFCNDPFLGVYYHKNNKSWMESEFRVYSSANNCTFEYVSQPFLMDLEGKQGNFKNLREFVFKNIDGYFKIYSKHTPINLVRDLPQGFSALEPLVDLPIGINITRFQTLLALHRSYLTPGDSSSGWTAGAAAYYVGYLQPRTFLLKYNENGTITDAVDCALDPLSETKCTLKSFTVEKGIYQTSNFRVQPTESIVRFPNITNLCPFGEVFNATRFASVYAWNRKRISNCVADYSVLYNSASFSTFKCYGVSPTKLNDLCFTNVYADSFVIRGDEVRQIAPGQTGKIADYNYKLPDDFTGCVIAWNSNNLDSKVGGNYNYLYRLFRKSNLKPFERDISTEIYQASSTPCNGVEGFNCYFPLQSYGFQPTNGVGYQPYRVVVLSFELLHAPATVCGPKKSTNLVKNKCVNFNFNGLTGTGVLTESNKKFLPFQQFGRDIADTTDAVRDPQTLEILDITPCSFGGVSVITPGTNTSNQVAVLYQDVNCTEVPVAIHADQLTPTWRVYSTGSNVFQTRAGCLIGAEHVNNSYECDIPIGAGICASYQTQTNSPRRARSVASQSIIAYTMSLGAENSVAYSNNSIAIPTNFTISVTTEILPVSMTKTSVDCTMYICGDSTECSNLLLQYGSFCTQLNRALTGIAVEQDKNTQEVFAQVKQIYKTPPIKDFGGFNFSQILPDPSKPSKRSFIEDLLFNKVTLADAGFIKQYGDCLGDIAARDLICAQKFNGLTVLPPLLTDEMIAQYTSALLAGTITSGWTFGAGAALQIPFAMQMAYRFNGIGVTQNVLYENQKLIANQFNSAIGKIQDSLSSTASALGKLQDVVNQNAQALNTLVKQLSSNFGAISSVLNDILSRLDPPEAEVQIDRLITGRLQSLQTYVTQQLIRAAEIRASANLAATKMSECVLGQSKRVDFCGKGYHLMSFPQSAPHGVVFLHVTYVPAQEKNFTTAPAICHDGKAHFPREGVFVSNGTHWFVTQRNFYEPQIITTDNTFVSGNCDVVIGIVNNTVYDPLQPELDSGGSGYIPEAPRDGQAYVRKDGEWVLLSTFL

SEQ ID NO: 9762 - protein, 1177 aa, Artificial Sequence
  SARS-CoV-2/Iceland/192/2020__EPI_ISL_417819 spike protein (1-1147)(K986P_V987P) Foldon construct
MFVFFVLLPLVSSQCVNLTTRTQLPPAYTNSFTRGVYYPDKVFRSSVLHSTQDLFLPFFSNVTWFHAIHVSGTNGTKRFDNPVLPFNDGVYFASTEKSNIIRGWIFGTTLDSKTQSLLIVNNATNVVIKVCEFQFCNDPFLGVYYHKNNKSWMESEFRVYSSANNCTFEYVSQPFLMDLEGKQGNFKNLREFVFKNIDGYFKIYSKHTPINLVRDLPQGFSALEPLVDLPIGINITRFQTLLALHRSYLTPGDSSSGWTAGAAAYYVGYLQPRTFLLKYNENGTITDAVDCALDPLSETKCTLKSFTVEKGIYQTSNFRVQPTESIVRFPNITNLCPFGEVFNATRFASVYAWNRKRISNCVADYSVLYNSASFSTFKCYGVSPTKLNDLCFTNVYADSFVIRGDEVRQIAPGQTGKIADYNYKLPDDFTGCVIAWNSNNLDSKVGGNYNYLYRLFRKSNLKPFERDISTEIYQAGSTPCNGVEGFNCYFPLQSYGFQPTNGVGYQPYRVVVLSFELLHAPATVCGPKKSTNLVKNKCVNFNFNGLTGTGVLTESNKKFLPFQQFGRDIADTTDAVRDPQTLEILDITPCSFGGVSVITPGTNTSNQVAVLYQGVNCTEVPVAIHADQLTPTWRVYSTGSNVFQTRAGCLIGAEHVNNSYECDIPIGAGICASYQTQTNSPRRARSVASQSIIAYTMSLGAENSVAYSNNSIAIPTNFTISVTTEILPVSMTKTSVDCTMYICGDSTECSNLLLQYGSFCTQLNRALTGIAVEQDKNTQEVFAQVKQIYKTPPIKDFGGFNFSQILPDPSKPSKRSFIEDLLFNKVTLADAGFIKQYGDCLGDIAARDLICAQKFNGLTVLPPLLTDEMIAQYTSALLAGTITSGWTFGAGAALQIPFAMQMAYRFNGIGVTQNVLYENQKLIANQFNSAIGKIQDSLSSTASALGKLQDVVNQNAQALNTLVKQLSSNFGAISSVLNDILSRLDPPEAEVQIDRLITGRLQSLQTYVTQQLIRAAEIRASANLAATKMSECVLGQSKRVDFCGKGYHLMSFPQSAPHGVVFLHVTYVPAQEKNFTTAPAICHDGKAHFPREGVFVSNGTHWFVTQRNFYEPQIITTDNTFVSGNCDVVIGIVNNTVYDPLQPELDSGGSGYIPEAPRDGQAYVRKDGEWVLLSTFL

SEQ ID NO: 9763 - protein, 1177 aa, Artificial Sequence
  SARS-CoV-2/Belgium/ULG-6939/2020__EPI_ISL_417020 spike protein (1-1147)(K986P_V987P) Foldon construct
MFVFLVLLPLVSSQCVNLTTRTQLPPAYTNSFTRGVYYPDKVFRSSVLHSTQDLFLPFFSNVTWFHAIHVSGTNGTKRFDNPVLPFNDGVYFASTEKSNIIRGWIFGTTLDSKTQSLLIVNNATNVVIKVCEFQFCNDPFLGVYYHKNNKSWMESEFRVYSSANNCTFEYVSQPFLMDLEGKQGNFKNLREFVFKNIDGYFKIYSKHTPINLVRDLPQGFSALEPLVDLPIGINITRFQTLLALHRSYLTPGDSSSGWTAGAAAYYVGYLQPRTFLLKYNENGTITDAVDCALDPLSETKCTLKSFTVEKGIYQTSNFRVQPTESIVRFPNITNLCPFGEVFNATRFASVYAWNRKRISNCVADYSVLYNSASFSTFKCYGVSPTKLNDLCFTNVYADSFVIRGDEVRQIAPGQTGKIADYNYKLPDDFTGCVIAWNSNNLDSKVGGNYNYLYRLFRKSNLKPFERDISTEIYQAGSTPCNGVEGFNCYFPLQSYGFQPTNGVGYQPYRVVVLSFELLHAPATVCGPKKSTNLVKNKCVNFNFNGLTGTGVLTESNKKFLPFQQFGRDIADTTDAVRDPQTLEILDITPCSFGGVSVITPGTNTSNQVAVLYQGVNCTEVPVAIHADQLTPTWRVYSTGSNVFQTRAGCLIGAEHVNNSYECDIPIGAGICASYQTQTNSPRRARSVASQSIIAYTMSLGAENSVVYSNNSIAIPTNFTISVTTEILPVSMTKTSVDCTMYICGDSTECSNLLLQYGSFCTQLNRALTGIAVEQDKNTQEVFAQVKQIYKTPPIKDFGGFNFSQILPDPSKPSKRSFIEDLLFNKVTLADAGFIKQYGDCLGDIAARDLICAQKFNGLTVLPPLLTDEMIAQYTSALLAGTITSGWTFGAGAALQIPFAMQMAYRFNGIGVTQNVLYENQKLIANQFNSAIGKIQDSLSSTASALGKLQDVVNQNAQALNTLVKQLSSNFGAISSVLNDILSRLDPPEAEVQIDRLITGRLQSLQTYVTQQLIRAAEIRASANLAATKMSECVLGQSKRVDFCGKGYHLMSFPQSAPHGVVFLHVTYVPAQEKNFTTAPAICHDGKAHFPREGVFVSNGTHWFVTQRNFYEPQIITTDNTFVSGNCDVVIGIVNNTVYDPLQPELDSGGSGYIPEAPRDGQAYVRKDGEWVLLSTFL

SEQ ID NO: 9764 - protein, 1177 aa, Artificial Sequence
  SARS-CoV-2/France/HF2496/2020__EPI_ISL_418231 spike protein (1-1147)(K986P_V987P) Foldon construct
MFVFLVLLPLVSSQCVNLTTRTQLPPAYTNSFTRGVYYPDKVFRSSVLHSTQDLFLPFFSNVTWFHAIHVSGTNGTKRFDNPVLPFNDGVYFASTEKSNIIRGWIFGTTLDSKTQSLLIVNNATNVVIKVCEFQFCNDPFLGVYYHKNNKSWMESEFRVYSSANNCTFEYVSQPFLMDLEGKQGNFKNLREFVFKNIDGYFKIYSKHTPINLVRDLPQGFSALEPLVDLPIGINITRFQTLLALHRSYLTPGDSSSGWTAGAAAYYVGYLQPRTFLLKYNENGTITDAVDCALDPLSETKCTLKSFTVEKGIYQTSNFRVQPTESIVRFPNITNLCPFGEVFNATRFASVYAWNRKRISNCVADYSVLYNSASFSTFKCYGVSPTKLNDLCFTNVYADSFVIRGDEVRQIAPGQTGKIADYNYKLPDDFTGCVIAWNSNNLDSKVGGNYNYLYRLFRKSNLKPFERDISTEIYQAGSTPCNGVEGFNCYFPLQSYGFQPTNGVGYQPYRVVVLSFELLHAPATVCGPKKSTNLVKNKCVNFNFNGLTGTGVLTESNKKFLPFQQFGRDIADTTDAVRDPQTLEILDITPCSFGGVSVITPGTNTSNQVAVLYQGVNCTEVPVAIHADQLTPTWRVYSTGSNVFQTRAGCLIGAEHVNNSYECDIPIGAGICASYQTQTNSPRRARSVASQSIIAYTMSLGAENSVAYSNNSIAIPTNFTISVTTEILPVSMTKTSVDCTMYICGDSTECSNLLLQYGSFCTQLNRALTGIAVEQDKNTQEVFAQVKQIYKTPPIKDFGGFNFSQILPDPSKPSKRSFIEDLLFNKVTLADAGFIKQYGDCLGDIVARDLICAQKFNGLTVLPPLLTDEMIAQYTSALLAGTITSGWTFGAGAALQIPFAMQMAYRFNGIGVTQNVLYENQKLIANQFNSAIGKIQDSLSSTASALGKLQDVVNQNAQALNTLVKQLSSNFGAISSVLNDILSRLDPPEAEVQIDRLITGRLQSLQTYVTQQLIRAAEIRASANLAATKMSECVLGQSKRVDFCGKGYHLMSFPQSAPHGVVFLHVTYVPAQEKNFTTAPAICHDGKAHFPREGVFVSNGTHWFVTQRNFYEPQIITTDNTFVSGNCDVVIGIVNNTVYDPLQPELDSGGSGYIPEAPRDGQAYVRKDGEWVLLSTFL

SEQ ID NO: 9765 - protein, 1177 aa, Artificial Sequence
  SARS-CoV-2/USA/WA-UW291/2020__EPI_ISL_418076 spike protein (1-1147)(K986P_V987P) Foldon construct
MFVFLVLLPLVSSQCVNLTTRTQLPPAYTNSFTRGVYYPDKVFRSSVLHSTQDLFLPFFSNVTWFHAIHVSGTNGTKRFDNPVLPFNDGVYFASTEKSNIIRGWIFGTTLDSKTQSLLIVNNATNVVIKVCEFQFCNDPFLGVYYHKNNKSWMESEFRVYSSANNCTFEYVSQPFLMDLEGKQGNFKNLREFVFKNIDGYFKIYSKHTPINLVRDLPQGFSALEPLVDLPIGINITRFQTLLALHRSYLTPGDSSSGWTAGAAAYYVGYLQPRTFLLKYNENGTITDAVDCALDPLSETKCTLKSFTVEKGIYQTSNFRVQPTESIVRFPNITNLCPFGEVFNATRFASVYAWNRKRISNCVADYSVLYNSASFSTFKCYGVSPTKLNDLCFTNVYADSFVIRGDEVRQIAPGQTGKIADYNYKLPDDFTGCVIAWNSNNLDSKVGGNYNYLYRLFRKSNLKPFERDISTEIYQAGSTPCNGVEGFNCYFPLQSYGFQPTNGVGYQPYRVVVLSFELLHAPATVCGPKKSTNLVKNKCVNFNFNGLTGTGVLTESNKKFLPFQQFGRDIADTTDAVRDPQTLEILDITPCSFGGVSVITPGTNTSNQVAVLYQGVNCTEVPVAIHADQLTPTWRVYSTGSNVFQTRAGCLIGAEHVNNSYECDIPIGAGICASYQTQTNSPRRARSVASQSIIAYTMSLGAENSVAYSNNSIAIPTNFTISVTTEILPVSMTKTSVDCTMYICGDSTECSNLLLQYGSFCTQLNRALTGIAVEQDKNTQEVFAQVKQIYKTPPIKDFGGFNFSQILPDPSKPSKRSFIEDLLFNKVTLADAGFIKQYGDCLGDIAARDLICAQKFNGLTVLPPLLTDEMIAQYTSALLAGTITSGWTFGAGAALQIPFAMQMAYRFNGIGVTQNVLYENQKLIANQFNSAIGKIQYSLSSTASALGKLQDVVNQNAQALNTLVKQLSSNFGAISSVLNDILSRLDPPEAEVQIDRLITGRLQSLQTYVTQQLIRAAEIRASANLAATKMSECVLGQSKRVDFCGKGYHLMSFPQSAPHGVVFLHVTYVPAQEKNFTTAPAICHDGKAHFPREGVFVSNGTHWFVTQRNFYEPQIITTDNTFVSGNCDVVIGIVNNTVYDPLQPELDSGGSGYIPEAPRDGQAYVRKDGEWVLLSTFL

SEQ ID NO: 9766 - protein, 1177 aa, Artificial Sequence; identical to SEQ ID NO: 9729
  SARS-CoV-2/Portugal/PT0034/2020__EPI_ISL_418019 spike protein (1-1147)(K986P_V987P) Foldon construct

SEQ ID NO: 9767 - protein, 1177 aa, Artificial Sequence; identical to SEQ ID NO: 9721
  SARS-CoV-2/Iceland/202/2020__EPI_ISL_417750 spike protein (1-1147)(K986P_V987P) Foldon construct

SEQ ID NO: 9768 - protein, 1177 aa, Artificial Sequence
  SARS-CoV-2/USA/WA-UW261/2020__EPI_ISL_418046 spike protein (1-1147)(K986P_V987P) Foldon construct
MFVFLVLLPLVSSQCVNLTTRTQLPPAYTNSFTRGVYYPDKVFRSSVLHSTQDLFLPFFSNVTWFHAIHVSGTNGTKRFDNPVLPFNDGVYFASTEKSNIIRGWIFGTTLDSKTQSLLIVNNATNVVIKVCEFQFCNDPFLGVYYHKNNKSWMESEFRVYSSANNCTFEYVSQPFLMDLEGKQGNFKNLREFVFKNIDGYFKIYSKHTPINLVRDLPQGFSALEPLVDLPIGINITRFQTLLALHRSYLTPGDSSSGWTAGAAAYYVGYLQPRTFLLKYNENGTITDAVDCALDPLSETKCTLKSFTVEKGIYQTSNFRVQPTESIVRFPNITNLCPFGEVFNATRFTSVYAWNRKRISNCVADYSVLYNSASFSTFKCYGVSPTKLNDLCFTNVYADSFVIRGDEVRQIAPGQTGKIADYNYKLPDDFTGCVIAWNSNNLDSKVGGNYNYLYRLFRKSNLKPFERDISTEIYQAGSTPCNGVEGFNCYFPLQSYGFQPTNGVGYQPYRVVVLSFELLHAPATVCGPKKSTNLVKNKCVNFNFNGLTGTGVLTESNKKFLPFQQFGRDIADTTDAVRDPQTLEILDITPCSFGGVSVITPGTNTSNQVAVLYQDVNCTEVPVAIHADQLTPTWRVYSTGSNVFQTRAGCLIGAEHVNNSYECDIPIGAGICASYQTQTNSPRRARSVASQSIIAYTMSLGAENSVAYSNNSIAIPTNFTISVTTEILPVSMTKTSVDCTMYICGDSTECSNLLLQYGSFCTQLNRALTGIAVEQDKNTQEVFAQVKQIYKTPPIKDFGGFNFSQILPDPSKPSKRSFIEDLLFNKVTLADAGFIKQYGDCLGDIAARDLICAQKFNGLTVLPPLLTDEMIAQYTSALLAGTITSGWTFGAGAALQIPFAMQMAYRFNGIGVTQNVLYENQKLIANQFNSAIGKIQDSLSSTASALGKLQDVVNQNAQALNTLVKQLSSNFGAISSVLNDILSRLDPPEAEVQIDRLITGRLQSLQTYVTQQLIRAAEIRASANLAATKMSECVLGQSKRVDFCGKGYHLMSFPQSAPHGVVFLHVTYVPAQEKNFTTAPAICHDGKAHFPREGVFVSNGTHWFVTQRNFYEPQIITTDNTFVSGNCDVVIGIVNNTVYDPLQPELDSGGSGYIPEAPRDGQAYVRKDGEWVLLSTFL

SEQ ID NO: 9769 - protein, 1177 aa, Artificial Sequence
  SARS-CoV-2/Portugal/PT0035/2020__EPI_ISL_418020 spike protein (1-1147)(K986P_V987P) Foldon construct
MFVFLVLLPLVSSQCVNLTTRTQLPPAYTNSFTRGVYYPDKVFRSSVLHSTQDLFLPFFSNVTWFHAIHVSGTNGTKRFDNPVLPFNDGVYFASTEKSNIIRGWIFGTTLDSKTQSLLIVNNATNVVIKVCEFQFCNDPFLGVYYHKNNKSWMESEFRVYSSANNCTFEYVSQPFLMDLEGKQGNFKNLREFVFKNIDGYFKIYSKHTPINLVRDLPQGFSALEPLVDLPIGINITRFQTLLALHRSYLTPGDSSSGWTAGAAAYYVGYLQPRTFLLKYNENGTITDAVDCALDPLSETKCTLKSFTVEKGIYQTSNFRVQPTESIVRFPNITNLCPFGEVFNATRFASVYAWNRKRISNCVADYSVLYNSASFSTFKCYGVSPTKLNDLCFTNVYADSFVIRGDEVRQIAPGQTGKIADYNYKLPDDFTGCVIAWNSNNLDSKVGGNYNYLYRLFRKSNLKPFERDISTEIYQAGSTPCNGVEGFNCYFPLQSYGFQPTNGVGYQPYRVVVLSFELLHAPATVCGPKKSTNLVKNKCVNFNFNGLTGTGVLTESNKKFLPFQQFGRDIADTTDAVRDPQTLEILDITPCSFGGVSVITPGTNTSNQVAVLYQDVNCTEVPVAIHADQLTPTWRVYSTGSNVFQTRAGCLIGAEHVNNSYECDIPIGAGICASYQTQTNSPRRARSVASQSIIAYTMSLGAENSVAYSNNSIAIPTNFTISVTTEILPVSMTKTSVDCTMYICGDSTECSNLLLQYGSFCTQLNRALTGIAVEQDKNTQEVFAQVKQIYKTPPIKDFGGFNFSQILPDPSKPSKRSFIEDLLFNKVTLADAGFIKQYGDCLGDISARDLICAQKFNGLTVLPPLLTDEMIAQYTSALLAGTITSGWTFGAGAALQIPFAMQMAYRFNGIGVTQNVLYENQKLIANQFNSAIGKIQDSLSSTASALGKLQDVVNQNAQALNTLVKQLSSNFGAISSVLNDILSRLDPPEAEVQIDRLITGRLQSLQTYVTQQLIRAAEIRASANLAATKMSECVLGQSKRVDFCGKGYHLMSFPQSAPHGVVFLHVTYVPAQEKNFTTAPAICHDGKAHFPREGVFVSNGTHWFVTQRNFYEPQIITTDNTFVSGNCDVVIGIVNNTVYDPLQPELDSGGSGYIPEAPRDGQAYVRKDGEWVLLSTFL

SEQ ID NO: 9770 - protein, 1177 aa, Artificial Sequence
  SARS-CoV-2/USA/NY-NYUMC7/2020__EPI_ISL_418192 spike protein (1-1147)(K986P_V987P) Foldon construct
MFVFLVLLPLVSSQCVNLTTRTQLPPAYTNSFTRGVYYPDKVFRSSVLHSTQDLFLPFFSNVTWFHAIHVSGTNGTKRFDNPVLPFNDGVYFASTEKSNIIRGWIFGTTLDSKTQSLLIVNNATNVVIKVCEFQFCNDPFLGVYHHKNNKSWMESEFRVYSSANNCTFEYVSQPFLMDLEGKQGNFKNLREFVFKNIDGYFKIYSKHTPINLVRDLPQGFSALEPLVDLPIGINITRFQTLLALHRSYLTPGDSSSGWTAGAAAYYVGYLQPRTFLLKYNENGTITDAVDCALDPLSETKCTLKSFTVEKGIYQTSNFRVQPTESIVRFPNITNLCPFGEVFNATRFASVYAWNRKRISNCVADYSVLYNSASFSTFKCYGVSPTKLNDLCFTNVYADSFVIRGDEVRQIAPGQTGKIADYNYKLPDDFTGCVIAWNSNNLDSKVGGNYNYLYRLFRKSNLKPFERDISTEIYQAGSTPCNGVEGFNCYFPLQSYGFQPTNGVGYQPYRVVVLSFELLHAPATVCGPKKSTNLVKNKCVNFNFNGLTGTGVLTESNKKFLPFQQFGRDIADTTDAVRDPQTLEILDITPCSFGGVSVITPGTNTSNQVAVLYQGVNCTEVPVAIHADQLTPTWRVYSTGSNVFQTRAGCLIGAEHVNNSYECDIPIGAGICASYQTQTNSPRRARSVASQSIIAYTMSLGAENSVAYSNNSIAIPTNFTISVTTEILPVSMTKTSVDCTMYICGDSTECSNLLLQYGSFCTQLNRALTGIAVEQDKNTQEVFAQVKQIYKTPPIKDFGGFNFSQILPDPSKPSKRSFIEDLLFNKVTLADAGFIKQYGDCLGDIAARDLICAQKFNGLTVLPPLLTDEMIAQYTSALLAGTITSGWTFGAGAALQIPFAMQMAYRFNGIGVTQNVLYENQKLIANQFNSAIGKIQDSLSSTASALGKLQDVVNQNAQALNTLVKQLSSNFGAISSVLNDILSRLDPPEAEVQIDRLITGRLQSLQTYVTQQLIRAAEIRASANLAATKMSECVLGQSKRVDFCGKGYHLMSFPQSAPHGVVFLHVTYVPAQEKNFTTAPAICHDGKAHFPREGVFVSNGTHWFVTQRNFYEPQIITTDNTFVSGNCDVVIGIVNNTVYDPLQPELDSGGSGYIPEAPRDGQAYVRKDGEWVLLSTFL

SEQ ID NO: 9771 - protein, 1177 aa, Artificial Sequence
  SARS-CoV-2/Iceland/189/2020__EPI_ISL_417709 spike protein (1-1147)(K986P_V987P) Foldon construct
MFVFLVLLPLVSSQCVNLTTRTQLPPAYTNSFTRGVYYPDKVFRSSVLHSTQDLFLPFFSNVTWFHAIHVSGTNGTKRFDNPVLPFNDGVYFASTEKSNIIRGWIFGTTLDSKTQSLLIVNNATNVVIKVCEFQFCNDPFLGVYYHKNNKSWMESEFRVYSSANNCTFEYVSQPFLMDLEGKQGNFKNLREFVFKNIDGYFKIYSKHTPINLVRDLPQGFSALEPLVDLPIGINITRFQTLLALHRSYLTPGDSSSGWTAGAAAYYVGYLQPRTFLLKYNENGTITDAVDCALDPLSETKCTLKSFTVEKGIYQTSNFRVQPTESIVRFPNITNLCPFGEVFNATRFASVYAWNRKRISNCVADYSVLYNSASFSTFKCYGVSPTKLNDLCFTNVYADSFVIRGDEVRQIAPGQTGKIADYNYKLPDDFTGCVIAWNSNNLDSKVGGNYNYLYRLFRKSNLKPFERDISTEIYQAGSTPCNGVEGFNCYFPLQSYGFQPTNGVGYQPYRVVVLSFELLHAPATVCGPKKSTNLVKNKCVNFNFNGLTGTGVLTESNKKFLPFQQFGRDIADTTDAVRDPQTLEILDITPCSFGGVSVITPGTNTSNQVAVLYQGVNCTEVPVAIHADQLTPTWRVYSTGSNVFQTRAGCLIGAEHVNNSYECDIPIGAGICASYQTQTNSPRRARSVASQSIIAYTMSLGAENSVAYSNNSIAIPTNFTISVTTEILPVSMTKTSVDCTMYICGDSTECSNLLLQYGSFCTQLNRALTGIAVEQDKNTQEVFAQVKQIYKTPPIKDFGGFNFSQILPDPSKPSKRSFIEDLLFNKVTLADAGFTKQYGDCLGDIAARDLICAQKFNGLTVLPPLLTDEMIAQYTSALLAGTITSGWTFGAGAALQIPFAMQMAYRFNGIGVTQNVLYENQKLIANQFNSAIGKIQDSLSSTASALGKLQDVVNQNAQALNTLVKQLSSNFGAISSVLNDILSRLDPPEAEVQIDRLITGRLQSLQTYVTQQLIRAAEIRASANLAATKMSECVLGQSKRVDFCGKGYHLMSFPQSAPHGVVFLHVTYVPAQEKNFTTAPAICHDGKAHFPREGVFVSNGTHWFVTQRNFYEPQIITTDNTFVSGNCDVVIGIVNNTVYDPLQPELDSGGSGYIPEAPRDGQAYVRKDGEWVLLSTFL

SEQ ID NO: 9772 - protein, 1177 aa, Artificial Sequence
  SARS-CoV-2/Australia/NSW56/2020__EPI_ISL_417408 spike protein (1-1147)(K986P_V987P) Foldon construct
MFVFLVLLPLVSSQCVNLTTRTQLPPAYTNSFTRGVYYPDKVFRSSVLHSTQDLFLPFFSNVTWFHAIHVSGTNGTKRFDNPVLPFNDGVYFASTEKSNIIRGWIFGTTLDSKTQSLLIVNNATNVVIKVCEFQFCNDPFLGVYYHKNNKSWMESEFRVYSSANNCTFEYVSQPFLMDLEGKQGNFKNLREFVFKNIDGYFKIYSKHTPINLVRDLPQGFSALEPLVDLPIGINITRFQTLLALHRSYLTPGDSSSGWTAGAAAYYVGYLQPRTFLLKYNENGTITDAVDCALDPLSETKCTLKSFTVEKGIYQTSNFRVQPTESIVRFPNITNLCPFGEVFNATRFASVYAWNRKRISNCVADYSVLYNSASFSTFKCYGVSPTKLNDLCFTNVYADSFVIRGDEVRQIAPGQTGKIADYNYKLPDDFTGCVIAWNSNNLDSKVGGNYNYLYRLFRKSNLKPFERDISTEIYQAGSTPCNGVEGFNCYFPLQSYGFQPTNGVGYQPYRVVVLSFELLHAPATVCGPKKSTNLVKNKCVNFNFNGLTGTGVLTESNKKFLPFQQFGRDIADTTDAVRDPQTLEILDITPCSFGGVSVITPGTNTSNQVAVLYQDVNCTEVPVAIHADQLTPTWRVYSTGSNVFQTRAGCLIGAEHVNNSYECDIPIGAGICASYQTQTNSPRRARSVASQSIIAYTMSLGAENSVAYSNNSIAIPTNFTISVTTEILPVSMTKTSVDCTMYICGDSTECSNLLLQYGSFCTQLNRALTGIAVEQDKNTQEVFAQVKQIYKTPPIKDFGGFNFSQILPDSSKPSKRSFIEDLLFNKVTLADAGFIKQYGDCLGDIAARDLICAQKFNGLTVLPPLLTDEMIAQYTSALLAGTITSGWTFGAGAALQIPFAMQMAYRFNGIGVTQNVLYENQKLIANQFNSAIGKIQDSLSSTASALGKLQDVVNQNAQALNTLVKQLSSNFGAISSVLNDILSRLDPPEAEVQIDRLITGRLQSLQTYVTQQLIRAAEIRASANLAATKMSECVLGQSKRVDFCGKGYHLMSFPQSAPHGVVFLHVTYVPAQEKNFTTAPAICHDGKAHFPREGVFVSNGTHWFVTQRNFYEPQIITTDNTFVSGNCDVVIGIVNNTVYDPLQPELDSGGSGYIPEAPRDGQAYVRKDGEWVLLSTFL

SEQ ID NO: 9773 - protein, 1177 aa, Artificial Sequence
  SARS-CoV-2/Iceland/280/2020__EPI_ISL_417608 spike protein (1-1147)(K986P_V987P) Foldon construct
MFVFLVLLPLVSSQCVNLTTRTQLPPAYTNSFTRGVYYPDKVFRSSVLHSTQDLFLPFFSNVTWFHAIHVSGTNGTKRFDNPVLPFNDGVYFASTEKSNIIRGWIFGTTLDSKTQSLLIVNNATNVVIKVCEFQFCNDPFLGVYYHKNNKSWMESEFRVYSSANNCTFEYVSQPFLMDLEGKQGNFKNLREFVFKNIDGYFKIYSKHTPINLVRDLPQGFSALEPLVDLPIGINITRFQTLLALHRSYLTPGDSSSGWTAGAAAYYVGYLQPRTFLLKYNENGTITDAVDCALDPLSETKCTLKSFTVEKGIYQTSNFRVQPTESIVRFPNITNLCPFGEVFNATRFASVYAWNRKRISNCVADYSVLYNSASFSTFKCYGVSPTKLNDLCFTNVYADSFVIRGDEVRQIAPGQTGKIADYNYKLPDDFTGCVIAWNSNNLDSKVGGNYNYLYRLFRKSNLKPFERDISTEIYQAGSTPCNGVEGFNCYFPLQSYGFQPTNGVGYQPYRVVVLSFELLHAPATVCGPKKSTNLVKNKCVNFNFNGLTGTGVLTESNKKFLPFQQFGRDIADTTDAVRDPQTLEILDITPCSFGGVSVITPGTNTSNQVAVLYQGVNCTEVPVAIHADQLTPTWRVYSTGSNVFQTRAGCLIGAEHVNNSYECDIPIGAGICASYHTQTNSPRRARSVASQSIIAYTMSLGAENSVAYSNNSIAIPTNFTISVTTEILPVSMTKTSVDCTMYICGDSTECSNLLLQYGSFCTQLNRALTGIAVEQDKNTQEVFAQVKQIYKTPPIKDFGGFNFSQILPDPSKPSKRSFIEDLLFNKVTLADAGFIKQYGDCLGDIAARDLICAQKFNGLTVLPPLLTDEMIAQYTSALLAGTITSGWTFGAGAALQIPFAMQMAYRFNGIGVTQNVLYENQKLIANQFNSAIGKIQDSLSSTASALGKLQDVVNQNAQALNTLVKQLSSNFGAISSVLNDILSRLDPPEAEVQIDRLITGRLQSLQTYVTQQLIRAAEIRASANLAATKMSECVLGQSKRVDFCGKGYHLMSFPQSAPHGVVFLHVTYVPAQEKNFTTAPAICHDGKAHFPREGVFVSNGTHWFVTQRNFYEPQIITTDNTFVSGNCDVVIGIVNNTVYDPLQPELDSGGSGYIPEAPRDGQAYVRKDGEWVLLSTFL

SEQ ID NO: 9774 - protein, 1177 aa, Artificial Sequence; identical to SEQ ID NO: 9729
  SARS-CoV-2/Iceland/247/2020__EPI_ISL_417575 spike protein (1-1147)(K986P_V987P) Foldon construct

SEQ ID NO: 9775 - protein, 1177 aa, Artificial Sequence
  SARS-CoV-2/Iceland/238/2020__EPI_ISL_417566 spike protein (1-1147)(K986P_V987P) Foldon construct
MFVFLVLLPLVSSQCVNLTTRTQLPPAYTNSFTRGVYYPDKVFRSSVLHSTQDLFLPFFSNVTWFHAIHVSGTNGTKRFDNPVLPFNDGVYFASTEKSNIIRGWIFGTTLDSKTQSLLIVNNATNVVIKVCEFQFCNDPFLGVYYHKNNKSWMESEFRVYSSANNCTFEYVSQPFLMDLEGKQGNFKNLREFVFKNIDGYFKIYSKHTPINLVRDLPQGFSALEPLVDLPIGINITRFQTLLALHRSYLTPGDSSSGWTAGAAAYYVGYLQPRTFLLKYNENGTITDAVDCALDPLSETKCTLKSFTVEKGIYQTSNFRVQPTESIVRFPNITNLCPFGEVFNATRFASVYAWNRKRISNCVADYSVLYNSASFSTFKCYGVSPTKLNDLCFTNVYADSFVIRGDEVRQIAPGQTGKIADYNYKLPDDFTGCVIAWNSNNLDSKVGGNYNYLYRLFRKSNLKPFERDISTEIYQAGSTPCNGVEGFNCYFPLQSYGFQPTNGVGYQPYRVVVLSFELLHAPATVCGPKKSTNLVKNKCVNFNFNGLTGTGVLTESNKKFLPFQQFGRDIADTTDAVRDPQTLEILDITPCSFGGVSVITPGTNTSNQVAVLYQGVNCTEVPVAIHADQLTPTWRVYSTGSNVFQTRAGCLIGAEHVNNSYECDIPIGAGICASYQTQTNSPRRARSVASQSIIAYTMSLGAENSVAYSNNSIAIPTNFTISVTTEILPVSMTKTSVDCTMYICGDSTECSNLLLQYGSFCTQLNRALTGIAVEQDKNTQEVFAQVKQIYKTPPIKDFGGFNFSQILPDPSKPSKRSFIEDLLFNKVTLADVGFIKQYGDCLGDIAARDLICAQKFNGLTVLPPLLTDEMIAQYTSALLAGTITSGWTFGAGAALQIPFAMQMAYRFNGIGVTQNVLYENQKLIANQFNSAIGKIQDSLSSTASALGKLQDVVNQNAQALNTLVKQLSSNFGAISSVLNDILSRLDPPEAEVQIDRLITGRLQSLQTYVTQQLIRAAEIRASANLAATKMSECVLGQSKRVDFCGKGYHLMSFPQSAPHGVVFLHVTYVPAQEKNFTTAPAICHDGKAHFPREGVFVSNGTHWFVTQRNFYEPQIITTDNTFVSGNCDVVIGIVNNTVYDPLQPELDSGGSGYIPEAPRDGQAYVRKDGEWVLLSTFL

SEQ ID NO: 9776 - protein, 1177 aa, Artificial Sequence
  SARS-CoV-2/Greece/16/2020__EPI_ISL_418265 spike protein (1-1147)(K986P_V987P) Foldon construct
MFVFLVLLPLVSSQCVNLTTRTQLPPAYTNSFTRGVYYPDKVFRSSVLHSTQDLFLPFFSNVTWFHAIHVSGTNGTKRFDNPVLPFNDGVYFASTEKSNIIRGWIFGTTLDSKTQSLLIVNNATNVVIKVCEFQFCNDPFLGVYYHKNNKSWMESEFRVYSSANNCTFEYVSQPFLMDLEGKQGNFKNLREFVFKNVDGYFKIYSKHTPINLVRDLPQGFSALEPLVDLPIGINITRFQTLLALHRSYLTPGDSSSGWTAGAAAYYVGYLQPRTFLLKYNENGTITDAVDCALDPLSETKCTLKSFTVEKGIYQTSNFRVQPTESIVRFPNITNLCPFGEVFNATRFASVYAWNRKRISNCVADYSVLYNSASFSTFKCYGVSPTKLNDLCFTNVYADSFVIRGDEVRQIAPGQTGKIADYNYKLPDDFTGCVIAWNSNNLDSKVGGNYNYLYRLFRKSNLKPFERDISTEIYQAGSTPCNGVEGFNCYFPLQSYGFQPTNGVGYQPYRVVVLSFELLHAPATVCGPKKSTNLVKNKCVNFNFNGLTGTGVLTESNKKFLPFQQFGRDIADTTDAVRDPQTLEILDITPCSFGGVSVITPGTNTSNQVAVLYQDVNCTEVPVAIHADQLTPTWRVYSTGSNVFQTRAGCLIGAEHVNNSYECDIPIGAGICASYQTQTNSPRRARSVASQSIIAYTMSLGAENSVAYSNNSIAIPTNFTISVTTEILPVSMTKTSVDCTMYICGDSTECSNLLLQYGSFCTQLNRALTGIAVEQDKNTQEVFAQVKQIYKTPPIKDFGGFNFSQILPDPSKPSKRSFIEDLLFNKVTLADAGFIKQYGDCLGDIAARDLICAQKFNGLTVLPPLLTDEMIAQYTSALLAGTITSGWTFGAGAALQIPFAMQMAYRFNGIGVTQNVLYENQKLIANQFNSAIGKIQDSLSSTASALGKLQDVVNQNAQALNTLVKQLSSNFGAISSVLNDILSRLDPPEAEVQIDRLITGRLQSLQTYVTQQLIRAAEIRASANLAATKMSECVLGQSKRVDFCGKGYHLMSFPQSAPHGVVFLHVTYVPAQEKNFTTAPAICHDGKAHFPREGVFVSNGTHWFVTQRNFYEPQIITTDNTFVSGNCDVVIGIVNNTVYDPLQPELDSGGSGYIPEAPRDGQAYVRKDGEWVLLSTFL

SEQ ID NO: 9777 - protein, 1177 aa, Artificial Sequence
  SARS-CoV-2/Iceland/319/2020__EPI_ISL_417648 spike protein (1-1147)(K986P_V987P) Foldon construct
MFVFLVLLPLVSSQCVNLTTRTQLPPAYTNSFTRGVYYPDKVFRSSVLHSTQDLFLPFFSNVTWFHAIHVSGTNGTKRFDNPVLPFNDGVYFASTEKSNIIRGWIFGTTLDSKTQSLLIVNNATNVVIKVCEFQFCNDPFLGVYYHKNNKSWMESEFRVYSSANNCTFEYVSQPFLIDLEGKQGNFKNLREFVFKNIDGYFKIYSKHTPINLVRDLPQGFSALEPLVDLPIGINITRFQTLLALHRSYLTPGDSSSGWTAGAAAYYVGYLQPRTFLLKYNENGTITDAVDCALDPLSETKCTLKSFTVEKGIYQTSNFRVQPTESIVRFPNITNLCPFGEVFNATRFASVYAWNRKRISNCVADYSVLYNSASFSTFKCYGVSPTKLNDLCFTNVYADSFVIRGDEVRQIAPGQTGKIADYNYKLPDDFTGCVIAWNSNNLDSKVGGNYNYLYRLFRKSNLKPFERDISTEIYQAGSTPCNGVEGFNCYFPLQSYGFQPTNGVGYQPYRVVVLSFELLHAPATVCGPKKSTNLVKNKCVNFNFNGLTGTGVLTESNKKFLPFQQFGRDIADTTDAVRDPQTLEILDITPCSFGGVSVITPGTNTSNQVAVLYQGVNCTEVPVAIHADQLTPTWRVYSTGSNVFQTRAGCLIGAEHVNNSYECDIPIGAGICASYQTQTNSPRRARSVASQSIIAYTMSLGAENSVAYSNNSIAIPTNFTISVTTEILPVSMTKTSVDCTMYICGDSTECSNLLLQYGSFCTQLNRALTGIAVEQDKNTQEVFAQVKQIYKTPPIKDFGGFNFSQILPDPSKPSKRSFIEDLLFNKVTLADAGFIKQYGDCLGDIAARDLICAQKFNGLTVLPPLLTDEMIAQYTSALLAGTITSGWTFGAGAALQIPFAMQMAYRFNGIGVTQNVLYENQKLIANQFNSAIGKIQDSLSSTASALGKLQDVVNQNAQALNTLVKQLSSNFGAISSVLNDILSRLDPPEAEVQIDRLITGRLQSLQTYVTQQLIRAAEIRASANLAATKMSECVLGQSKRVDFCGKGYHLMSFPQSAPHGVVFLHVTYVPAQEKNFTTAPAICHDGKAHFPREGVFVSNGTHWFVTQRNFYEPQIITTDNTFVSGNCDVVIGIVNNTVYDPLQPELDSGGSGYIPEAPRDGQAYVRKDGEWVLLSTFL

SEQ ID NO: 9778 - protein, 1177 aa, Artificial Sequence
  SARS-CoV-2/Congo/94/2020__EPI_ISL_417947 spike protein (1-1147)(K986P_V987P) Foldon construct
MFVFLVLLPLVSSQCVNLTTRTQLPPAYTNSFTRGVYYPDKVFRSSVLHSTQDLFLPFFSNVTWFHAIHVSGTNGTKRFDNPVLPFNDGVYFASTEKSNIIRGWIFGTTLDSKTQSLLIVNNATNVVIKVCEFQFCNDPFLGVYYHKNNKSWMESEFRVYSSANNCTFEYVSQPFLMDLEGKQGNFKNLREFVFKNIDGYFKIYSKHTPINLVRDLPQGFSALEPLVDLPIGINITRFQTLLALHRSYLTPGDSSSGWTAGAAAYYVGYLQPRTFLLKYNENGTITDAVDCALDPLSETKCTLKSFTVEKGIYQTSNFRVQPTESIVRFPNITNLCPFGEVFNATRFASVYAWNRKRISNCVADYSVLYNSASFSTFKCYGVSPTKLNDLCFTNVYADSFVIRGDEVRQIAPGQTGKIADYNYKLPDDFTGCVIAWNSNNLDSKVGGNYNYLYRLFRKSNLKPFERDISTEIYQAGSTPCNGVEGFNCYFPLQSYGFQPTNGVGYQPYRVVVLSFELLHAPATVCGPKKSTNLVKNKCVNFNFNGLTGTGVLTESNKKFLPFQQFGRDIADTTDAVRDPQTLEILDITPCSFGGVSVITPGTNTSNQVAVLYQGVNCTEVPVAIHADQLTPTWRVYSTGSNVFQTRAGCLIGAEHVNNSYECDIPIGAGICASYQTQTNSPRRARSVASQSIIAYTMSLGAENSVAYSNNSIAIPTNFTISVTTEILPVSMTKTSVDCTMYICGDSTECSNLLLQYGSFCTQLNRALTGIAVEQDKNTQEVFAQVKQIYKTPPIKDFGGFNFSQILPDPSKPSKRSFIEDILFNKVTLADAGFIKQYGDCLGDIAARDLICAQKFNGLTVLPPLLTDEMIAQYTSALLAGTITSGWTFGAGAALQIPFAMQMAYRFNGIGVTQNVLYENQKLIANQFNSAIGKIQDSLSSTASALGKLQDVVNQNAQALNTLVKQLSSNFGAISSVLNDILSRLDPPEAEVQIDRLITGRLQSLQTYVTQQLIRAAEIRASANLAATKMSECVLGQSKRVDFCGKGYHLMSFPQSAPHGVVFLHVTYVPAQEKNFTTAPAICHDGKAHFPREGVFVSNGTHWFVTQRNFYEPQIITTDNTFVSGNCDVVIGIVNNTVYDPLQPELDSGGSGYIPEAPRDGQAYVRKDGEWVLLSTFL

SEQ ID NO: 9779 - protein, 1177 aa, Artificial Sequence
  SARS-CoV-2/Congo/158/2020__EPI_ISL_417950 spike protein (1-1147)(K986P_V987P) Foldon construct
MFVFLVLLPLVSSQCVNLTTRTQLPPAYTNSFTRGVYYPDKVFRSSVLHSTQDLFLPFFSNVTWFHAIHVSGTNGTKRFDNPVLPFNDGVYFASTEKSNIIRGWIFGTTLDSKTQSLLIVNNATNVVIKVCEFQFCNDPFLGVYYHKNNKSWMESEFRVYSSANNCTFEYVSQPFLMDLEGKQGNFKNLREFVFKNIDGYFKIYSKHTPINLVRDLPQGFSALEPLVDLPIGINITRFQTLLALHRSYLTPGDSSSGWTAGAAAYYVGYLQPRTFLLKYNENGTITDAVDCALDPLSETKCTLKSFTVEKGIYQTSNFRVQPTESIVRFPNITNLCPFGEVFNATRFASVYAWNRKRISNCVADYSVLYNSASFSTFKCYGVSPTKLNDLCFTNVYADSFVIRGDEVRQIAPGQTGKIADYNYKLPDDFTGCVIAWNSNNLDSKVGGNYNYLYRLFRKSNLKPFERDISTEIYQAGSTPCNGVEGFNCYFPLQSYGFQPTNGVGYQPYRVVVLSFELLHAPATVCGPKKSTNLVKNKCVNFNFNGLTGTGVLTESNKKFLPFQQFGRDIADTTDAVRDPQTLEILDITPCSFGGVSVITPGTNTSNQVAVLYQDVNCTEVPVAIHADQLTPTWRVYSTGSNVFQTRAGCLIGAEHVNNSYECDIPIGAGICASYQTQTNSPRRARSVASQSIIAYTMSLGAENSVAYSNNSIAIPTNFTISVTTEILPVSMTKTSVDCTMYICGDSTECSNLLLQYGSFCTQLNRALTGIAVEQDKNTQEVFAQVKQIYKTPPIKDFGGFNFSQILPDPSKPSKRSFIEDLLFNKVTLADAGFIKQYGDCLGDIAARDLICAQKFNGLTVLPPLLTDEMIAQYTSALLAGTITSGWTFGAGAALQIPFAMQMAYRFNGIGVTQNVLYENQKLIANQFNSAIGKIQDSLSSTASALGKLQDVVNQNAQALNTLVKQLSSNFGAISSVLNDILSRLDPPEAEVQIDRLITGRLQSLQTYVTQQLIRAAEIRASANLAATKMSECVLGQSKRVDFCGKGYHLMSFPQSAPHGVVFLHVTYVPAQEKNFTTAPAICHDGKAHFPREGVFVSNGTHWFVTQRNFYEPQIITTDNTFLSGNCDVVIGIVNNTVYDPLQPELDSGGSGYIPEAPRDGQAYVRKDGEWVLLSTFL

SEQ ID NO: 9780 - protein, 1177 aa, Artificial Sequence
  SARS-CoV-2/USA/UT-00034/2020__EPI_ISL_417977 spike protein (1-1147)(K986P_V987P) Foldon construct
MFVFLVLLPLVSSQCVNLTTRTQLPPAYTNSFTRGVYYPDKVFRSSVLHSTQDLFLPFFSNVTWFHAIHVSGTNGTKRFDNPVLPFNDGVYFASTEKSNIIRGWIFGTTLDSKTQSLLIVNNATNVVIKVCEFQFCNDPFLGVYYYKNNKSWMESEFRVYSSANNCTFEYVSQPFLMDLEGKQGNFKNLREFVFKNIDGYFKIYSKHTPINLVRDLPQGFSALEPLVDLPIGINITRFQTLLALHRSYLTPGDSSSGWTAGAAAYYVGYLQPRTFLLKYNENGTITDAVDCALDPLSETKCTLKSFTVEKGIYQTSNFRVQPTESIVRFPNITNLCPFGEVFNATRFASVYAWNRKRISNCVADYSVLYNSASFSTFKCYGVSPTKLNDLCFTNVYADSFVIRGDEVRQIAPGQTGKIADYNYKLPDDFTGCVIAWNSNNLDSKVGGNYNYLYRLFRKSNLKPFERDISTEIYQAGSTPCNGVEGFNCYFPLQSYGFQPTNGVGYQPYRVVVLSFELLHAPATVCGPKKSTNLVKNKCVNFNFNGLTGTGVLTESNKKFLPFQQFGRDIADTTDAVRDPQTLEILDITPCSFGGVSVITPGTNTSNQVAVLYQGVNCTEVPVAIHADQLTPTWRVYSTGSNVFQTRAGCLIGAEHVNNSYECDIPIGAGICASYQTQTNSPRRARSVASQSIIAYTMSLGAENSVAYSNNSIAIPTNFTISVTTEILPVSMTKTSVDCTMYICGDSTECSNLLLQYGSFCTQLNRALTGIAVEQDKNTQEVFAQVKQIYKTPPIKDFGGFNFSQILPDPSKPSKRSFIEDLLFNKVTLADAGFIKQYGDCLGDIAARDLICAQKFNGLTVLPPLLTDEMIAQYTSALLAGTITSGWTFGAGAALQIPFAMQMAYRFNGIGVTQNVLYENQKLIANQFNSAIGKIQDSLSSTASALGKLQDVVNQNAQALNTLVKQLSSNFGAISSVLNDILSRLDPPEAEVQIDRLITGRLQSLQTYVTQQLIRAAEIRASANLAATKMSECVLGQSKRVDFCGKGYHLMSFPQSAPHGVVFLHVTYVPAQEKNFTTAPAICHDGKAHFPREGVFVSNGTHWFVTQRNFYEPQIITTDNTFVSGNCDVVIGIVNNTVYDPLQPELDSGGSGYIPEAPRDGQAYVRKDGEWVLLSTFL

SEQ ID NO: 9781 - protein, 1177 aa, Artificial Sequence
  SARS-CoV-2/USA/UT-00033/2020__EPI_ISL_417976 spike protein (1-1147)(K986P_V987P) Foldon construct
MFVFLVLLPLVSSQCVNLTTRTQLPPAYTNSFTRGVYYPDKVFRSSVLHSTQDLFLPFFSNVTWFHAIHVSGTNGTKRFDNPVLPFNDGVYFASTEKSNIIRGWIFGTTLDSKTQSLLIVNNATNVVIKVCEFQFCNDPFLGVYYHKNNKSWMESEFRVYSSANNCTFEYVSQPFLMDLEGKQGNFKNLREFVFKNIDGYFKIYSKHTPINLVRDLPQGFSALEPLVDLPIGINITRFQTLLALHRSYLTPGDSSSGLTAGAAAYYVGYLQPRTFLLKYNENGTITDAVDCALDPLSETKCTLKSFTVEKGIYQTSNFRVQPTESIVRFPNITNLCPFGEVFNATRFASVYAWNRKRISNCVADYSVLYNSASFSTFKCYGVSPTKLNDLCFTNVYADSFVIRGDEVRQIAPGQTGKIADYNYKLPDDFTGCVIAWNSNNLDSKVGGNYNYLYRLFRKSNLKPFERDISTEIYQAGSTPCNGVEGFNCYFPLQSYGFQPTNGVGYQPYRVVVLSFELLHAPATVCGPKKSTNLVKNKCVNFNFNGLTGTGVLTESNKKFLPFQQFGRDIADTTDAVRDPQTLEILDITPCSFGGVSVITPGTNTSNQVAVLYQGVNCTEVPVAIHADQLTPTWRVYSTGSNVFQTRAGCLIGAEHVNNSYECDIPIGAGICASYQTQTNSPRRARSVASQSIIAYTMSLGAENSVAYSNNSIAIPTNFTISVTTEILPVSMTKTSVDCTMYICGDSTECSNLLLQYGSFCTQLNRALTGIAVEQDKNTQEVFAQVKQIYKTPPIKDFGGFNFSQILPDPSKPSKRSFIEDLLFNKVTLADAGFIKQYGDCLGDIAARDLICAQKFNGLTVLPPLLTDEMIAQYTSALLAGTITSGWTFGAGAALQIPFAMQMAYRFNGIGVTQNVLYENQKLIANQFNSAIGKIQDSLSSTASALGKLQDVVNQNAQALNTLVKQLSSNFGAISSVLNDILSRLDPPEAEVQIDRLITGRLQSLQTYVTQQLIRAAEIRASANLAATKMSECVLGQSKRVDFCGKGYHLMSFPQSAPHGVVFLHVTYVPAQEKNFTTAPAICHDGKAHFPREGVFVSNGTHWFVTQRNFYEPQIITTDNTFVSGNCDVVIGIVNNTVYDPLQPELDSGGSGYIPEAPRDGQAYVRKDGEWVLLSTFL

SEQ ID NO: 9782 - protein, 1177 aa, Artificial Sequence
  SARS-CoV-2/USA/WI-13/2020__EPI_ISL_417516 spike protein (1-1147)(K986P_V987P) Foldon construct
MFVFLVLLPLVSSQCVNLTTRTQLPPAYTNSFTRGVYYPDKVFRSSVLHSTQDLFLPFFSNVTWFHAIHVSGTNGTKRFDNPVLPFNDGVYFASTEKSNIIRGWIFGTTLDSKTQSLLIVNNATNVVIKVCEFQFCNDPFLGVYYHKNNKSWMESEFRVYSSANNCTFEYVSQPFLMDLEGKQGNFKNLREFVFKNIDGYFKIYSKHTPINLVRDLPQGFSALEPLVDLPIGINITRFQTLLALHRSYLTPGDSSSGWTAGAAAYYVGYLQPRTFLLKYNENGTITDAVDCALDPLSETKCTLKSFTVEKGIYQTSNFRVLPTESIVRFPNITNLCPFGEVFNATRFASVYAWNRKRISNCVADYSVLYNSASFSTFKCYGVSPTKLNDLCFTNVYADSFVIRGDEVRQIAPGQTGKIADYNYKLPDDFTGCVIAWNSNNLDSKVGGNYNYLYRLFRKSNLKPFERDISTEIYQAGSTPCNGVEGFNCYFPLQSYGFQPTNGVGYQPYRVVVLSFELLHAPATVCGPKKSTNLVKNKCVNFNFNGLTGTGVLTESNKKFLPFQQFGRDIADTTDAVRDPQTLEILDITPCSFGGVSVITPGTNTSNQVAVLYQGVNCTEVPVAIHADQLTPTWRVYSTGSNVFQTRAGCLIGAEHVNNSYECDIPIGAGICASYQTQTNSPRRARSVASQSIIAYTMSLGAENSVAYSNNSIAIPTNFTISVTTEILPVSMTKTSVDCTMYICGDSTECSNLLLQYGSFCTQLNRALTGIAVEQDKNTQEVFAQVKQIYKTPPIKDFGGFNFSQILPDPSKPSKRSFIEDLLFNKVTLADAGFIKQYGDCLGDIAARDLICAQKFNGLTVLPPLLTDEMIAQYTSALLAGTITSGWTFGAGAALQIPFAMQMAYRFNGIGVTQNVLYENQKLIANQFNSAIGKIQDSLSSTASALGKLQDVVNQNAQALNTLVKQLSSNFGAISSVLNDILSRLDPPEAEVQIDRLITGRLQSLQTYVTQQLIRAAEIRASANLAATKMSECVLGQSKRVDFCGKGYHLMSFPQSAPHGVVFLHVTYVPAQEKNFTTAPAICHDGKAHFPREGVFVSNGTHWFVTQRNFYEPQIITTDNTFVSGNCDVVIGIVNNTVYDPLQPELDSGGSGYIPEAPRDGQAYVRKDGEWVLLSTFL

SEQ ID NO: 9783 - protein, 1176 aa, Artificial Sequence
  SARS-CoV-2/India/1-27/2020__EPI_ISL_413522 spike protein (1-1146)(K985P_V986P) Foldon construct
MFVFLVLLPLVSSQCVNLTTRTQLPPAYTNSFTRGVYYPDKVFRSSVLHSTQDLFLPFFSNVTWFHAIHVSGTNGTKRFDNPVLPFNDGVYFASTEKSNIIRGWIFGTTLDSKTQSLLIVNNATNVVIKVCEFQFCNDPFLGVYHKNNKSWMESEFRVYSSANNCTFEYVSQPFLMDLEGKQGNFKNLREFVFKNIDGYFKIYSKHTPINLVRDLPQGFSALEPLVDLPIGINITRFQTLLALHRSYLTPGDSSSGWTAGAAAYYVGYLQPRTFLLKYNENGTITDAVDCALDPLSETKCTLKSFTVEKGIYQTSNFRVQPTESIVRFPNITNLCPFGEVFNATRFASVYAWNRKRISNCVADYSVLYNSASFSTFKCYGVSPTKLNDLCFTNVYADSFVIRGDEVIQIAPGQTGKIADYNYKLPDDFTGCVIAWNSNNLDSKVGGNYNYLYRLFRKSNLKPFERDISTEIYQAGSTPCNGVEGFNCYFPLQSYGFQPTNGVGYQPYRVVVLSFELLHAPATVCGPKKSTNLVKNKCVNFNFNGLTGTGVLTESNKKFLPFQQFGRDIADTTDAVRDPQTLEILDITPCSFGGVSVITPGTNTSNQVAVLYQDVNCTEVPVAIHADQLTPTWRVYSTGSNVFQTRAGCLIGAEHVNNSYECDIPIGAGICASYQTQTNSPRRARSVASQSIIAYTMSLGAENSVAYSNNSIAIPTNFTISVTTEILPVSMTKTSVDCTMYICGDSTECSNLLLQYGSFCTQLNRALTGIAVEQDKNTQEVFAQVKQIYKTPPIKDFGGFNFSQILPDPSKPSKRSFIEDLLFNKVTLADAGFIKQYGDCLGDIAARDLICAQKFNGLTVLPPLLTDEMIAQYTSALLAGTITSGWTFGAGAALQIPFAMQMAYRFNGIGVTQNVLYENQKLIANQFNSAIGKIQDSLSSTASALGKLQDVVNQNAQALNTLVKQLSSNFGAISSVLNDILSRLDPPEAEVQIDRLITGRLQSLQTYVTQQLIRAAEIRASANLAATKMSECVLGQSKRVDFCGKGYHLMSFPQSAPHGVVFLHVTYVPAQEKNFTTAPAICHDGKAHFPREGVFVSNGTHWFVTQRNFYEPQIITTDNTFVSGNCDVVIGIVNNTVYDPLQPELDSGGSGYIPEAPRDGQAYVRKDGEWVLLSTFL

SEQ ID NO: 9784 - protein, 1171 aa, Artificial Sequence
  SARS-CoV-2/pangolin/Guangxi/P4L/2017__EPI_ISL_410538 spike protein (1-1141)(K980P_V981P) Foldon construct
MFVFLFVLPLVSSQCVNLTTRTGIPPGYTNSSTRGVYYPDKVFRSSILHLTQDLFLPFFSNVTWFNTINYQGGFKKFDNPVLPFNDGVYFASTEKSNIIRGWIFGTTLDARTQSLLIVNNATNVVIKVCEFQFCTDPFLGVYYHNNNKTWVENEFRVYSSANNCTFEYISQPFLMDLEGKQGNFKNLREFVFKNVDGYFKIYSKHTPIDLVRDLPRGFAALEPLVDLPIGINITRFQTLLALHRSYLTPGNLESGWTTGAAAYYVGYLQQRTFLLSYNQNGTITDAVDCSLDPLSETKCTLKSLTVEKGIYQTSNFRVQPTISIVRFPNITNLCPFGEVFNASKFASVYAWNRKRISNCVADYSVLYNSTSFSTFKCYGVSPTKLNDLCFTNVYADSFVVKGDEVRQIAPGQTGVIADYNYKLPDDFTGCVIAWNSVKQDALTGGNYGYLYRLFRKSKLKPFERDISTEIYQAGSTPCNGQVGLNCYYPLERYGFHPTTGVNYQPFRVVVLSFELLNGPATVCGPKLSTTLVKDKCVNFNFNGLTGTGVLTTSKKQFLPFQQFGRDISDTTDAVRDPQTLEILDITPCSFGGVSVITPGTNTSNQVAVLYQDVNCTEVPMAIHAEQLTPAWRVYSAGANVFQTRAGCLVGAEHVNNSYECDIPVGAGICASYHSMSSLRSVNQRSIIAYTMSLGAENSVAYSNNSIAIPTNFTISVTTEILPVSMTKTSVDCTMYICGDSIECSNLLLQYGSFCTQLNRALTGIAVEQDKNTQEVFAQVKQIYKTPPIKDFGGFNFSQILPDPSKPSKRSFIEDLLFNKVTLADAGFIKQYGDCLGDIAARDLICAQKFNGLTVLPPLLTDEMIAQYTSALLAGTITSGWTFGAGAALQIPFAMQMAYRFNGIGVTQNVLYENQKLIANQFNSAIGKIQDSLSSTASALGKLQDVVNQNAQALNTLVKQLSSNFGAISSVLNDILSRLDPPEAEVQIDRLITGRLQSLQTYVTQQLIRAAEIRASANLAATKMSECVLGQSKRVDFCGKGYHLMSFPQSAPHGVVFLHVTYVPAQEKNFTTAPAICHEGKAHFPREGVFVSNGTHWFITQRNFYEPQIITTDNTFVSGSCDVVIGIVNNTVYDPLQPELDSGGSGYIPEAPRDGQAYVRKDGEWVLLSTFL

SEQ ID NO: 9785 - protein, 1171 aa, Artificial Sequence
  SARS-CoV-2/pangolin/Guangxi/P5L/2017__EPI_ISL_410540 spike protein (1-1141)(K980P_V981P) Foldon construct
MFVFLFVLPLVSSQCVNLTTRTGIPPGYTNSSTRGVYYPDKVFRSSILHLTQDLFLPFFSNVTWFNTINYQGGFKKFDNPVLPFNDGVYFASTEKSNIIRGWIFGTTLDARTQSLLIVNNATNVVIKVCEFQFCTDPFLGVYYHNNNKTWVENEFRVYSSANNCTFEYISQPFLMDLEGKQGNFKNLREFVFKNVDGYFKIYSKHTPIDLVRDLPRGFAALEPLVDLPIGINITRFQTLLALHRSYLTPGKLESGWTTGAAAYYVGYLQQRTFLLSYNQNGTITDAVDCSLDPLSETKCTLKSLTVEKGIYQTSNFRVQPTISIVRFPNITNLCPFGEVFNASKFASVYAWNRKRISNCVADYSVLYNSTSFSTFKCYGVSPTKLNDLCFTNVYADSFVVKGDEVRQIAPGQTGVIADYNYKLPDDFTGCVIAWNSVKQDALTGGNYGYLYRLFRKSKLKPFERDISTEIYQAGSTPCNGQVGLNCYYPLERYGFHPTTGVNYQPFRVVVLSFELLNGPATVCGPKLSTTLVKDKCVNFNFNGLTGTGVLTTSKKQFLPFQQFGRDISDTTDAVRDPQTLEILDITPCSFGGVSVITPGTNTSNQVAVLYQDVNCTEVPMAIHAEQLTPAWRVYSAGANVFQTRAGCLVGAEHVNNSYECDIPVGAGICASYHSMSSFRSVNQRSIIAYTMSLGAENSVAYSNNSIAIPTNFTISVTTEILPVSMTKTSVDCTMYICGDSIECSNLLLQYGSFCTQLNRALTGIAVEQDKNTQEVFAQVKQIYKTPPIKDFGGFNFSQILPDPSKPSKRSFIEDLLFNKVTLADAGFIKQYGDCLGDIAARDLICAQKFNGLTVLPPLLTDEMIAQYTSALLAGTITSGWTFGAGAALQIPFAMQMAYRFNGIGVTQNVLYENQKLIANQFNSAIGKIQDSLSSTASALGKLQDVVNQNAQALNTLVKQLSSNFGAISSVLNDILSRLDPPEAEVQIDRLITGRLQSLQTYVTQQLIRAAEIRASANLAATKMSECVLGQSKRVDFCGKGYHLMSFPQSAPHGVVFLHVTYVPAQEKNFTTAPAICHEGKAHFPREGVFVSNGTHWFITQRNFYEPQIITTDNTFVSGSCDVVIGIVNNTVYDPLQPELDSGGSGYIPEAPRDGQAYVRKDGEWVLLSTFL

SEQ ID NO: 9786 - protein, 1171 aa, Artificial Sequence
  SARS-CoV-2/pangolin/Guangxi/P5E/2017__EPI_ISL_410541 spike protein (1-1141)(K980P_V981P) Foldon construct
MFVFLFVLPLVSSQCVNLTTRTGIPPGYTNSSTRGVYYPDKVFRSSILHLTQDLFLPFFSNVTWFNTITYQGGSKKFDNPVLPFNDGVYFASTEKSNIIRGWIFGTTLDARTQSLLIVNNATNVVIKVCEFQFCTDPFLGVYYHNNNKTWVENEFRVYSSANNCTFEYISQPFLMDLEGKQGNFKNLREFVFKNVDGYFKIYSKHTPIDLVRDLPRGFAALEPLVDLPIGINITRFQTLLALHRSYLTPGKLESGWTTGAAAYYVGYLQQRTFLLSYNQNGTITDAVDCSLDPLSETKCTLKSLTVEKGIYQTSNFRVQPTISIVRFPNITNLCPFGEVFNASKFASVYAWNRKRISNCVADYSVLYNSTSFSTFKCYGVSPTKLNDLCFTNVYADSFVVKGDEVRQIAPGQTGVIADYNYKLPDDFTGCVIAWNSVKQDALTGDNYGYLYRLFRKSKLKPFERDISTEIYQAGSTPCNGQVGLNCYYPLERYGFHPTTGVNYQPFRVVVLSFELLNGPATVCGPKLSTTLVKDKCVNFNFNGLTGTGVLTTSKKQFLPFQQFGRDISDTTDAVRDPQTLEILDITPCSFGGVSVITPGTNTSNQVAVLYQDVNCTEVPMAIHAEQLTPAWRVYSAGANVFQTRAGCLVGAEHVNNSYECDIPVGAGICASYHSMSSFRSVNQRSIIAYTMSLGAENSVAYSNNSIAIPTNFTISVTTEILPVSMTKTSVDCTMYICGDSIECSNLLLQYGSFCTQLNRALTGIAVEQDKNTQEVFAQVKQIYKTPPIKDFGGFNFSQILPDPSKPSKRSFIEDLLFNKVTLADAGFIKQYGDCLGDIAARDLICAQKFNGLTVLPPLLTDEMIAQYTSALLAGTITSGWTFGAGAALQIPFAMQMAYRFNGIGVTQNVLYENQKLIANQFNSAIGKIQDSLSSTASALGKLQDVVNQNAQALNTLVKQLSSNFGAISSVLNDILSRLDPPEAEVQIDRLITGRLQSLQTYVTQQLIRAAEIRASANLAATKMSECVLGQSKRVDFCGKGYHLMSFPQSAPHGVVFLHVTYVPAQEKNFTTAPAICHEGKAHFPREGVFVSNGTHWFITQRNFYEPQIITTDNTFVSGSCDVVIGIVNNTVYDPLQPELDSGGSGYIPEAPRDGQAYVRKDGEWVLLSTFL

SEQ ID NO: 9787 - protein, 1169 aa, Artificial Sequence
  SARS-CoV-2/pangolin/Guangxi/P1E/2017__EPI_ISL_410539 spike protein (1-1139)(K978P_V979P) Foldon construct
MFVFLFVLPLVSSQCVNLTTRTGIQPGYTNSSTRGVYYPDKVFRSSILHLTQDLFLPFFSNVTWFNTINYQGGFKKFDNPVLPFNDGVYFASTEKSNIIRGWIFGTTLDARTQSLLIVNNATNVVIKVCEFQFCTDPFLGVYYHNNNKTWVENEFRVYSSANNCTFEYISQPFLMDLEGKQGNFKNLREFVFKNVDGYFKIYSKHTPIDLVRDLPRGFAALEPLVDLPIGINITRFQTLLALHRSYLTPGKLESGWTTGAAAYYVGYLQQRTFLLSYNQNGTITDAVDCSLDPLSETKCTLKSLTVEKGIYQTSNFRVQPTISIVRFPNITNLCPFGEVFNASKFASVYAWNRKRISNCVADYSVLYNSTSFSTFKCYGVSPTKLNDLCFTNVYADSFVVKGDEVRQIAPGQTGVIADYNYKLPDDFTGCVIAWNSVKQDALTGGNYLYRLFRKSKLKPFERDISTEIYQAGSTPCNGQVGLNCYYPLERYGFHPTTGVNYQPFRVVVLSFELLNGPATVCGPKLSTTLVKDKCVNFNFNGLTGTGVLTTSKKQFLPFQQFGRDISDTTDAVRDPQTLEILDITPCSFGGVSVITPGTNTSNQVAVLYQDVNCTEVPMAIHAEQLTPAWRVYSAGANVFQTRAGCLVGAEHVNNSYECDIPVGAGICASYHSMSSLRSVNQRSIIAYTMSLGAENSVAYSNNSIAIPTNFTISVTTEILPVSMTKTSVDCTMYICGDSIECSNLLLQYGSFCTQLNRALTGIAVEQDKNTQEVFAQVKQIYKTPPIKDFGGFNFSQILPDPSKPSKRSFIEDLLFNKVTLADAGFIKQYGDCLGDIAARDLICAQKFNGLTVLPPLLTDEMIAQYTSALLAGTITSGWTFGAGAALQIPFAMQMAYRFNGIGVTQNVLYENQKLIANQFNSAIGKIQDSLSSTASALGKLQDVVNQNAQALNTLVKQLSSNFGAISSVLNDILSRLDPPEAEVQIDRLITGRLQSLQTYVTQQLIRAAEIRASANLAATKMSECVLGQSKRVDFCGKGYHLMSFPQSAPHGVVFLHVTYVPAQEKNFTTAPAICHEGKAHFPREGVFVSNGTHWFITQRNFYEPQIITTDNTFVSGSCDVVIGIVNNTVYDPLQPELDSGGSGYIPEAPRDGQAYVRKDGEWVLLSTFL

SEQ ID NO: 9788 - protein, 1177 aa, Artificial Sequence
  SARS-CoV-2/Wuhan/WIV05/2019__EPI_ISL_402128 spike protein (1-1147)(K986P_V987P_T887W_A1020W) Foldon construct
MFVFLVLLPLVSSQCVNLTTRTQLPPAYTNSFTRGVYYPDKVFRSSVLHSTQDLFLPFFSNVTWFHAIHVSGTNGTKRFDNPVLPFNDGVYFASTEKSNIIRGWIFGTTLDSKTQSLLIVNNATNVVIKVCEFQFCNDPFLGVYYHKNNKSWMESEFRVYSSANNCTFEYVSQPFLMDLEGKQGNFKNLREFVFKNIDGYFKIYSKHTPINLVRDLPQGFSALEPLVDLPIGINITRFQTLLALHRSYLTPGDSSSGWTAGAAAYYVGYLQPRTFLLKYNENGTITDAVDCALDPLSETKCTLKSFTVEKGIYQTSNFRVQPTESIVRFPNITNLCPFGEVFNATRFASVYAWNRKRISNCVADYSVLYNSASFSTFKCYGVSPTKLNDLCFTNVYADSFVIRGDEVRQIAPGQTGKIADYNYKLPDDFTGCVIAWNSNNLDSKVGGNYNYLYRLFRKSNLKPFERDISTEIYQAGSTPCNGVEGFNCYFPLQSYGFQPTNGVGYQPYRVVVLSFELLHAPATVCGPKKSTNLVKNKCVNFNFNGLTGTGVLTESNKKFLPFQQFGRDIADTTDAVRDPQTLEILDITPCSFGGVSVITPGTNTSNQVAVLYQDVNCTEVPVAIHADQLTPTWRVYSTGSNVFQTRAGCLIGAEHVNNSYECDIPIGAGICASYQTQTNSPRRARSVASQSIIAYTMSLGAENSVAYSNNSIAIPTNFTISVTTEILPVSMTKTSVDCTMYICGDSTECSNLLLQYGSFCTQLNRALTGIAVEQDKNTQEVFAQVKQIYKTPPIKDFGGFNFSQILPDPSKPSKRSFIEDLLFNKVTLADAGFIKQYGDCLGDIAARDLICAQKFNGLTVLPPLLTDEMIAQYTSALLAGTITSGWWFGAGAALQIPFAMQMAYRFNGIGVTQNVLYENQKLIANQFNSAIGKIQDSLSSTASALGKLQDVVNQNAQALNTLVKQLSSNFGAISSVLNDILSRLDPPEAEVQIDRLITGRLQSLQTYVTQQLIRAAEIRWSANLAATKMSECVLGQSKRVDFCGKGYHLMSFPQSAPHGVVFLHVTYVPAQEKNFTTAPAICHDGKAHFPREGVFVSNGTHWFVTQRNFYEPQIITTDNTFVSGNCDVVIGIVNNTVYDPLQPELDSGGSGYIPEAPRDGQAYVRKDGEWVLLSTFL

SEQ ID NO: 9789 - protein, 1173 aa, Artificial Sequence
  SARS-CoV-2/bat/Yunnan/RaTG13/2013__EPI_ISL_402131 spike protein (1-1143)(K982P_V983P_T883W_A1016W) Foldon construct
MFVFLVLLPLVSSQCVNLTTRTQLPPAYTNSSTRGVYYPDKVFRSSVLHLTQDLFLPFFSNVTWFHAIHVSGTNGIKRFDNPVLPFNDGVYFASTEKSNIIRGWIFGTTLDSKTQSLLIVNNATNVVIKVCEFQFCNDPFLGVYYHKNNKSWMESEFRVYSSANNCTFEYVSQPFLMDLEGKQGNFKNLREFVFKNIDGYFKIYSKHTPINLVRDLPPGFSALEPLVDLPIGINITRFQTLLALHRSYLTPGDSSSGWTAGAAAYYVGYLQPRTFLLKYNENGTITDAVDCALDPLSETKCTLKSFTVEKGIYQTSNFRVQPTDSIVRFPNITNLCPFGEVFNATTFASVYAWNRKRISNCVADYSVLYNSTSFSTFKCYGVSPTKLNDLCFTNVYADSFVITGDEVRQIAPGQTGKIADYNYKLPDDFTGCVIAWNSKHIDAKEGGNFNYLYRLFRKANLKPFERDISTEIYQAGSKPCNGQTGLNCYYPLYRYGFYPTDGVGHQPYRVVVLSFELLNAPATVCGPKKSTNLVKNKCVNFNFNGLTGTGVLTESNKKFLPFQQFGRDIADTTDAVRDPQTLEILDITPCSFGGVSVITPGTNASNQVAVLYQDVNCTEVPVAIHADQLTPTWRVYSTGSNVFQTRAGCLIGAEHVNNSYECDIPIGAGICASYQTQTNSRSVASQSIIAYTMSLGAENSVAYSNNSIAIPTNFTISVTTEILPVSMTKTSVDCTMYICGDSTECSNLLLQYGSFCTQLNRALTGIAVEQDKNTQEVFAQVKQIYKTPPIKDFGGFNFSQILPDPSKPSKRSFIEDLLFNKVTLADAGFIKQYGDCLGDIAARDLICAQKFNGLTVLPPLLTDEMIAQYTSALLAGTITSGWWFGAGAALQIPFAMQMAYRFNGIGVTQNVLYENQKLIANQFNSAIGKIQDSLSSTASALGKLQDVVNQNAQALNTLVKQLSSNFGAISSVLNDILSRLDPPEAEVQIDRLITGRLQSLQTYVTQQLIRAAEIRWSANLAATKMSECVLGQSKRVDFCGKGYHLMSFPQSAPHGVVFLHVTYVPAQEKNFTTAPAICHDGKAHFPREGVFVSNGTHWFVTQRNFYEPQIITTDNTFVSGSCDVVIGIVNNTVYDPLQPELDSGGSGYIPEAPRDGQAYVRKDGEWVLLSTFL

SEQ ID NO: 9790 - protein, 1177 aa, Artificial Sequence
  SARS-CoV-2/Wuhan/HBCDC-HB-01/2019__EPI_ISL_402132 spike protein (1-1147)(K986P_V987P_T887W_A1020W) Foldon construct
MFVFLVLLPLVSSQCVNLTTRTQLPPAYTNSITRGVYYPDKVFRSSVLHSTQDLFLPFFSNVTWFHAIHVSGTNGTKRFDNPVLPFNDGVYFASTEKSNIIRGWIFGTTLDSKTQSLLIVNNATNVVIKVCEFQFCNDPFLGVYYHKNNKSWMESEFRVYSSANNCTFEYVSQPFLMDLEGKQGNFKNLREFVFKNIDGYFKIYSKHTPINLVRDLPQGFSALEPLVDLPIGINITRFQTLLALHRSYLTPGDSSSGWTAGAAAYYVGYLQPRTFLLKYNENGTITDAVDCALDPLSETKCTLKSFTVEKGIYQTSNFRVQPTESIVRFPNITNLCPFGEVFNATRFASVYAWNRKRISNCVADYSVLYNSASFSTFKCYGVSPTKLNDLCFTNVYADSFVIRGDEVRQIAPGQTGKIADYNYKLPDDFTGCVIAWNSNNLDSKVGGNYNYLYRLFRKSNLKPFERDISTEIYQAGSTPCNGVEGFNCYFPLQSYGFQPTNGVGYQPYRVVVLSFELLHAPATVCGPKKSTNLVKNKCVNFNFNGLTGTGVLTESNKKFLPFQQFGRDIADTTDAVRDPQTLEILDITPCSFGGVSVITPGTNTSNQVAVLYQDVNCTEVPVAIHADQLTPTWRVYSTGSNVFQTRAGCLIGAEHVNNSYECDIPIGAGICASYQTQTNSPRRARSVASQSIIAYTMSLGAENSVAYSNNSIAIPTNFTISVTTEILPVSMTKTSVDCTMYICGDSTECSNLLLQYGSFCTQLNRALTGIAVEQDKNTQEVFAQVKQIYKTPPIKDFGGFNFSQILPDPSKPSKRSFIEDLLFNKVTLADAGFIKQYGDCLGDIAARDLICAQKFNGLTVLPPLLTDEMIAQYTSALLAGTITSGWWFGAGAALQIPFAMQMAYRFNGIGVTQNVLYENQKLIANQFNSAIGKIQDSLSSTASALGKLQDVVNQNAQALNTLVKQLSSNFGAISSVLNDILSRLDPPEAEVQIDRLITGRLQSLQTYVTQQLIRAAEIRWSANLAATKMSECVLGQSKRVDFCGKGYHLMSFPQSAPHGVVFLHVTYVPAQEKNFTTAPAICHDGKAHFPREGVFVSNGTHWFVTQRNFYEPQIITTDNTFVSGNCDVVIGIVNNTVYDPLQPELDSGGSGYIPEAPRDGQAYVRKDGEWVLLSTFL

SEQ ID NO: 9791 - protein, 1177 aa, Artificial Sequence
  SARS-CoV-2/Guangdong/20SF028/2020__EPI_ISL_403936 spike protein (1-1147)(K986P_V987P_T887W_A1020W) Foldon construct
MFVFLVLLPLVSSQCVNLTTRTQLPPAYTNSFTRGVYYPDKVFRSSVLYSTQDLFLPFFSNVTWFHAIHVSGTNGTKRFDNPVLPFNDGVYFASTEKSNIIRGWIFGTTLDSKTQSLLIVNNATNVVIKVCEFQFCNDPFLGVYYHKNNKSWMESEFRVYSSANNCTFEYVSQPFLMDLEGKQGNFKNLREFVFKNIDGYFKIYSKHTPINLVRDLPQGFSALEPLVDLPIGINITRFQTLLALHRSYLTPGDSSSGWTAGAAAYYVGYLQPRTFLLKYNENGTITDAVDCALDPLSETKCTLKSFTVEKGIYQTSNFRVQPTESIVRFPNITNLCPFGEVFNATRFASVYAWNRKRISNCVADYSVLYNSASFSTFKCYGVSPTKLNDLCFTNVYADSFVIRGDEVRQIAPGQTGKIADYNYKLPDDFTGCVIAWNSNNLDSKVGGNYNYLYRLFRKSNLKPFERDISTEIYQAGSTPCNGVEGFNCYFPLQSYGFQPTNGVGYQPYRVVVLSFELLHAPATVCGPKKSTNLVKNKCVNFNFNGLTGTGVLTESNKKFLPFQQFGRDIADTTDAVRDPQTLEILDITPCSFGGVSVITPGTNTSNQVAVLYQDVNCTEVPVAIHADQLTPTWRVYSTGSNVFQTRAGCLIGAEHVNNSYECDIPIGAGICASYQTQTNSPRRARSVASQSIIAYTMSLGAENSVAYSNNSIAIPTNFTISVTTEILPVSMTKTSVDCTMYICGDSTECSNLLLQYGSFCTQLNRALTGIAVEQDKNTQEVFAQVKQIYKTPPIKDFGGFNFSQILPDPSKPSKRSFIEDLLFNKVTLADAGFIKQYGDCLGDIAARDLICAQKFNGLTVLPPLLTDEMIAQYTSALLAGTITSGWWFGAGAALQIPFAMQMAYRFNGIGVTQNVLYENQKLIANQFNSAIGKIQDSLSSTASALGKLQDVVNQNAQALNTLVKQLSSNFGAISSVLNDILSRLDPPEAEVQIDRLITGRLQSLQTYVTQQLIRAAEIRWSANLAATKMSECVLGQSKRVDFCGKGYHLMSFPQSAPHGVVFLHVTYVPAQEKNFTTAPAICHDGKAHFPREGVFVSNGTHWFVTQRNFYEPQIITTDNTFVSGNCDVVIGIVNNTVYDPLQPELDSGGSGYIPEAPRDGQAYVRKDGEWVLLSTFL

SEQ ID NO: 9792 - protein, 1177 aa, Artificial Sequence
  SARS-CoV-2/Shenzhen/SZTH-001/2020__EPI_ISL_406592 spike protein (1-1147)(K986P_V987P_T887W_A1020W) Foldon construct
MFVFLVLLPLVSSQCVNLTTRTQLPPAYTNSFTRGVYYPDKVFRSSVLHSTQDLFLPFFSNVTWFHAIHVSGTNGTKRFDNPVLPFNDGVYFASTEKSNIIRGWIFGTTLDSKTQSLLIVNNATNVVIKVCEFQFCNDPFLGVYYHKNNKSWMESEFRVYSSANNCTFEYVSQPFLMDLEGKQGNFKNLREFVFKNIDGYFKIYSKHTPINLVRDLPQGFSALEPLVDLPIGINITRFQTLLALHRSYLTPGDSSSGWTAGAAAYYVGYLQPRTFLLKYNENGTITDAVDCALDPLSETKCTLKSFTVEKGIYQTSNFRVQPTESIVRFPNITNLCPFGEVFNATRFASVYAWNRKRISNCVADYSVLYNSASFSTFKCYGVSPTKLNDLCFTNVYADSFVIRGDEVRQIAPGQTGKIADYNYKLPDDFTGCVIAWNSNNLDSKVGGNYNYLYRLFRKSNLKPFERDISTEIYQAGSTPCNGVEGFNCYFPLQSYGFQPTNGVGYQPYRVVVLSFELLHAPATVCGPKKSTNLVKNKCVNFNFNGLTGTGVLTESNKKFLPFQQFGRDIADTTDAVRDPQTLEILDITPCSFGGVSVITPGTNTSNQVAVLYQDVNCTEVPVAIHADQLTPTWRVYSTGSNVFQTRAGCLIGAEHVNNSYECDIPIGAGICASYQTQTNSPRRARSVASQSIIAYTMSLGAENSVAYSNNSIAIPTNFTISVTTEILPVSMTKTSVDCTMYICGDSTECSNLLLQYGSFCTQLNRALTGIAVEQDKNTQEVFAQVKQIYKTPPIKDFGGFNFSQILPDPSKPSKRSFIEDLLFNKVTLADAGFIKQYGDCLGDIAARDLICAQKFNGLTVLPPLLTDEMIAQYTSALLAGTITSGWWFGAGAALQIPFAMQMAYRFNGIGVTQNVLYENQKLIANQFNSAIGKIQDSLSSTASALGKLQDVVNQNAQALNTLVKQLSSNFGAISSVLNDILSRLDPPEAEVQIDRLITGRLQSLQTYVTQQLIRAAEIRWSANLAATKMSECVLGQSKRVDFCGKGYHLMSFPQSAPHGVVFLHVTYVPAQEKNFTTAPAICHDGKAHFPREGVFVSNGTHWFVTQRNFYEPQIITTDNTFVSGNCDVLIGIVNNTVYDPLQPELDSGGSGYIPEAPRDGQAYVRKDGEWVLLSTFL

SEQ ID NO: 9793 - protein, 1177 aa, Artificial Sequence
  SARS-CoV-2/Shenzhen/SZTH-004/2020__EPI_ISL_406595 spike protein (1-1147)(K986P_V987P_T887W_A1020W) Foldon construct
MFVFLVLLPLVSSQCVNLTTRTQLPPAYTNSFTRGVYYPDKVFRSSVLHSTQDLFLPFFSNVTWFHAIHVSGTNGTKRFDNPVLPFNDGVYFASTEKSNIIRGWIFGTTLDSKTQSLLIVNNATNVVIKVCEFQFCNDPFLGVYYHKNNKSWMESEFRVYSSANNCTFEYVSQPFLMDLEGKQGNFKNLREFVFKNIDGYFKIYSKHTPINLVRDLPQGFSALEPLVDLPIGINITRFQTLLALHRSYLTPGDSSSGWTAGAAAYYVGYLQPRTFLLKYNENGTITDAVDCALDPLSETKCTLKSFTVEKGIYQTSNFRVQPTESIVRFPNITNLCPFGEVFNATRFASVYAWDRKRISNCVAYYSVLYNSASFSTFKCYGVSPTKLNDLCFTNVYADSFVIRGDEVRQIAPGQTGKIADYNYKLPDDFTGCVIAWNSNNLDSKVGGNYNYLYRLFRKSNLKPFERDISTEIYQAGSTPCNGVEGFNCYFPLQSYGFQPTNGVGYQPYRVVVLSFELLHAPATVCGPKKSTNLVKNKCVNFNFNGLTGTGVLTESNKKFLPFQQFGRDIADTTDAVRDPQTLEILDITPCSFGGVSVITPGTNTSNQVAVLYQDVNCTEVPVAIHADQLTPTWRVYSTGSNVFQTRAGCLIGAEHVNNSYECDIPIGAGICASYQTQTNSPRRARSVASQSIIAYTMSLGAENSVAYSNNSIAIPTNFTISVTTEILPVSMTKTSVDCTMYICGDSTECSNLLLQYGSFCTQLNRALTGIAVEQDKNTQEVFAQVKQIYKTPPIKDFGGFNFSQILPDPSKPSKRSFIEDLLFNKVTLADAGFIKQYGDCLGDIAARDLICAQKFNGLTVLPPLLTDEMIAQYTSALLAGTITSGWWFGAGAALQIPFAMQMAYRFNGIGVTQNVLYENQKLIANQFNSAIGKIQDSLSSTASALGKLQDVVNQNAQALNTLVKQLSSNFGAISSVLNDILSRLDPPEAEVQIDRLITGRLQSLQTYVTQQLIRAAEIRWSANLAATKMSECVLGQSKRVDFCGKGYHLMSFPQSAPHGVVFLHVTYVPAQEKNFTTAPAICHDGKAHFPREGVFVSNGTHWFVTQRNFYEPQIITTDNTFVSGNCDVVIGIVNNTVYDPLQPELDSGGSGYIPEAPRDGQAYVRKDGEWVLLSTFL

SEQ ID NO: 9794 - protein, 1177 aa, Artificial Sequence
  SARS-CoV-2/France/IDF0372/2020__EPI_ISL_406596 spike protein (1-1147)(K986P_V987P_T887W_A1020W) Foldon construct
MFVFLVLLPLVSSQCVNLTTRTQLPPAYTNSFTRGVYYPDKVFRSSVLHSTQDLFLPFFSNVTWFHAIHVSGTNGTKRFDNPVLPFNDGVYFASTEKSNIIRGWIFGTTLDSKTQSLLIVNNATNVVIKVCEFQFCNDPFLGVYYHKNNKSWMESEFRVYSSANNCTFEYVSQPFLMDLEGKQGNFKNLREFVFKNIDGYFKIYSKHTPINLVRDLPQGFSALEPLVDLPIGINITRFQTLLALHRSYLTPGDSSSGWTAGAAAYYVGYLQPRTFLLKYNENGTITDAVDCALDPLSETKCTLKSFTVEKGIYQTSNFRVQPTESIVRFPNITNLCPFGEVFNATRFASVYAWNRKRISNCVADYSFLYNSASFSTFKCYGVSPTKLNDLCFTNVYADSFVIRGDEVRQIAPGQTGKIADYNYKLPDDFTGCVIAWNSNNLDSKVGGNYNYLYRLFRKSNLKPFERDISTEIYQAGSTPCNGVEGFNCYFPLQSYGFQPTNGVGYQPYRVVVLSFELLHAPATVCGPKKSTNLVKNKCVNFNFNGLTGTGVLTESNKKFLPFQQFGRDIADTTDAVRDPQTLEILDITPCSFGGVSVITPGTNTSNQVAVLYQDVNCTEVPVAIHADQLTPTWRVYSTGSNVFQTRAGCLIGAEHVNNSYECDIPIGAGICASYQTQTNSPRRARSVASQSIIAYTMSLGAENSVAYSNNSIAIPTNFTISVTTEILPVSMTKTSVDCTMYICGDSTECSNLLLQYGSFCTQLNRALTGIAVEQDKNTQEVFAQVKQIYKTPPIKDFGGFNFSQILPDPSKPSKRSFIEDLLFNKVTLADAGFIKQYGDCLGDIAARDLICAQKFNGLTVLPPLLTDEMIAQYTSALLAGTITSGWWFGAGAALQIPFAMQMAYRFNGIGVTQNVLYENQKLIANQFNSAIGKIQDSLSSTASALGKLQDVVNQNAQALNTLVKQLSSNFGAISSVLNDILSRLDPPEAEVQIDRLITGRLQSLQTYVTQQLIRAAEIRWSANLAATKMSECVLGQSKRVDFCGKGYHLMSFPQSAPHGVVFLHVTYVPAQEKNFTTAPAICHDGKAHFPREGVFVSNGTHWFVTQRNFYEPQIITTDNTFVSGNCDVVIGIVNNTVYDPLQPELDSGGSGYIPEAPRDGQAYVRKDGEWVLLSTFL

SEQ ID NO: 9795 - protein, 1177 aa, Artificial Sequence
  SARS-CoV-2/Australia/VIC01/2020__EPI_ISL_406844 spike protein (1-1147)(K986P_V987P_T887W_A1020W) Foldon construct
MFVFLVLLPLVSSQCVNLTTRTQLPPAYTNSFTRGVYYPDKVFRSSVLHSTQDLFLPFFSNVTWFHAIHVSGTNGTKRFDNPVLPFNDGVYFASTEKSNIIRGWIFGTTLDSKTQSLLIVNNATNVVIKVCEFQFCNDPFLGVYYHKNNKSWMESEFRVYSSANNCTFEYVSQPFLMDLEGKQGNFKNLREFVFKNIDGYFKIYSKHTPINLVRDLPQGFSALEPLVDLPIGINITRFQTLLALHRRYLTPGDSSSGWTAGAAAYYVGYLQPRTFLLKYNENGTITDAVDCALDPLSETKCTLKSFTVEKGIYQTSNFRVQPTESIVRFPNITNLCPFGEVFNATRFASVYAWNRKRISNCVADYSVLYNSASFSTFKCYGVSPTKLNDLCFTNVYADSFVIRGDEVRQIAPGQTGKIADYNYKLPDDFTGCVIAWNSNNLDSKVGGNYNYLYRLFRKSNLKPFERDISTEIYQAGSTPCNGVEGFNCYFPLQSYGFQPTNGVGYQPYRVVVLSFELLHAPATVCGPKKSTNLVKNKCVNFNFNGLTGTGVLTESNKKFLPFQQFGRDIADTTDAVRDPQTLEILDITPCSFGGVSVITPGTNTSNQVAVLYQDVNCTEVPVAIHADQLTPTWRVYSTGSNVFQTRAGCLIGAEHVNNSYECDIPIGAGICASYQTQTNSPRRARSVASQSIIAYTMSLGAENSVAYSNNSIAIPTNFTISVTTEILPVSMTKTSVDCTMYICGDSTECSNLLLQYGSFCTQLNRALTGIAVEQDKNTQEVFAQVKQIYKTPPIKDFGGFNFSQILPDPSKPSKRSFIEDLLFNKVTLADAGFIKQYGDCLGDIAARDLICAQKFNGLTVLPPLLTDEMIAQYTSALLAGTITSGWWFGAGAALQIPFAMQMAYRFNGIGVTQNVLYENQKLIANQFNSAIGKIQDSLSSTASALGKLQDVVNQNAQALNTLVKQLSSNFGAISSVLNDILSRLDPPEAEVQIDRLITGRLQSLQTYVTQQLIRAAEIRWSANLAATKMSECVLGQSKRVDFCGKGYHLMSFPQSAPHGVVFLHVTYVPAQEKNFTTAPAICHDGKAHFPREGVFVSNGTHWFVTQRNFYEPQIITTDNTFVSGNCDVVIGIVNNTVYDPLQPELDSGGSGYIPEAPRDGQAYVRKDGEWVLLSTFL

SEQ ID NO: 9796 - protein, 1177 aa, Artificial Sequence
  SARS-CoV-2/Germany/BavPat1/2020__EPI_ISL_406862 spike protein (1-1147)(K986P_V987P_T887W_A1020W) Foldon construct
MFVFLVLLPLVSSQCVNLTTRTQLPPAYTNSFTRGVYYPDKVFRSSVLHSTQDLFLPFFSNVTWFHAIHVSGTNGTKRFDNPVLPFNDGVYFASTEKSNIIRGWIFGTTLDSKTQSLLIVNNATNVVIKVCEFQFCNDPFLGVYYHKNNKSWMESEFRVYSSANNCTFEYVSQPFLMDLEGKQGNFKNLREFVFKNIDGYFKIYSKHTPINLVRDLPQGFSALEPLVDLPIGINITRFQTLLALHRSYLTPGDSSSGWTAGAAAYYVGYLQPRTFLLKYNENGTITDAVDCALDPLSETKCTLKSFTVEKGIYQTSNFRVQPTESIVRFPNITNLCPFGEVFNATRFASVYAWNRKRISNCVADYSVLYNSASFSTFKCYGVSPTKLNDLCFTNVYADSFVIRGDEVRQIAPGQTGKIADYNYKLPDDFTGCVIAWNSNNLDSKVGGNYNYLYRLFRKSNLKPFERDISTEIYQAGSTPCNGVEGFNCYFPLQSYGFQPTNGVGYQPYRVVVLSFELLHAPATVCGPKKSTNLVKNKCVNFNFNGLTGTGVLTESNKKFLPFQQFGRDIADTTDAVRDPQTLEILDITPCSFGGVSVITPGTNTSNQVAVLYQGVNCTEVPVAIHADQLTPTWRVYSTGSNVFQTRAGCLIGAEHVNNSYECDIPIGAGICASYQTQTNSPRRARSVASQSIIAYTMSLGAENSVAYSNNSIAIPTNFTISVTTEILPVSMTKTSVDCTMYICGDSTECSNLLLQYGSFCTQLNRALTGIAVEQDKNTQEVFAQVKQIYKTPPIKDFGGFNFSQILPDPSKPSKRSFIEDLLFNKVTLADAGFIKQYGDCLGDIAARDLICAQKFNGLTVLPPLLTDEMIAQYTSALLAGTITSGWWFGAGAALQIPFAMQMAYRFNGIGVTQNVLYENQKLIANQFNSAIGKIQDSLSSTASALGKLQDVVNQNAQALNTLVKQLSSNFGAISSVLNDILSRLDPPEAEVQIDRLITGRLQSLQTYVTQQLIRAAEIRWSANLAATKMSECVLGQSKRVDFCGKGYHLMSFPQSAPHGVVFLHVTYVPAQEKNFTTAPAICHDGKAHFPREGVFVSNGTHWFVTQRNFYEPQIITTDNTFVSGNCDVVIGIVNNTVYDPLQPELDSGGSGYIPEAPRDGQAYVRKDGEWVLLSTFL

SEQ ID NO: 9797 - protein, 1177 aa, Artificial Sequence
  SARS-CoV-2/Wuhan/HBCDC-HB-02/2020__EPI_ISL_412978 spike protein (1-1147)(K986P_V987P_T887W_A1020W) Foldon construct
MFVFLVLLPLVSSQCVNLTTRTQLPPAYTNSFTRGVYYPDKVFRSSVLHSTQDLFLPFFSNVTWFHAIHVSGTNGTKRFDNPVLPFNDGVYFASTEKSNIIRGWIFGTTLDSKTQSLLIVNNATNVVIKVCEFQFCNDPFLGVYYHKNNKSWMESEFRVYSSANNCTFEYVSQPFLMDLEGKQGNFKNLREFVFKNIDGYFKIYSKHTPINLVRDLPQGFSALEPLVDLPIGINITRFQTLLALHRSYLTPGDSSSGWTAGAAAYYVGYLQPRTFLLKYNENGTITDAVDCALDPLSETKCTLKSFTVEKGIYQTSNFRVQPTESIVRFPNITNLCPFGEVFNATRFASVYAWNRKRISNCVADYSVLYNSASFSTFKCYGVSPTKLNDLCFTNVYADSFVIRGDEVRQIAPGQTGKIADYNYKLPDDFTGCVIAWNSNNLDSKVGGNYNYLYRLFRKSNLKPFERDISTEIYQAGSTPCNGVEGFNCYFPLQSYGFQPTNGVGYQPYRVVVLSFELLHAPATVCGPKKSTNLVKNKCVNFNFNGLTGTGVLTESNKKFLPFQQFGRDIADTTDAVRDPQTLEILDITPCSFGGVSVITPGTNTSNQVAVLYQDVNCTEVPVAIHADQLTPTWRVYSTGSNVFQTRAGCLIGAEHVNNSYECDIPIGAGICASYQTQTNSPRRARSVASQSIIAYTMSLGAENSVAYSNNSIAIPTNFTISVTTEILPVSMTKTSVDCTMYICGDSTECSNFLLQYGSFCTQLNRALTGIAVEQDKNTQEVFAQVKQIYKTPPIKDFGGFNFSQILPDPSKPSKRSFIEDLLFNKVTLADAGFIKQYGDCLGDIAARDLICAQKFNGLTVLPPLLTDEMIAQYTSALLAGTITSGWWFGAGAALQIPFAMQMAYRFNGIGVTQNVLYENQKLIANQFNSAIGKIQDSLSSTASALGKLQDVVNQNAQALNTLVKQLSSNFGAISSVLNDILSRLDPPEAEVQIDRLITGRLQSLQTYVTQQLIRAAEIRWSANLAATKMSECVLGQSKRVDFCGKGYHLMSFPQSAPHGVVFLHVTYVPAQEKNFTTAPAICHDGKAHFPREGVFVSNGTHWFVTQRNFYEPQIITTDNTFVSGNCDVVIGIVNNTVYDPLQPELDSGGSGYIPEAPRDGQAYVRKDGEWVLLSTFL

SEQ ID NO: 9798 - protein, 1177 aa, Artificial Sequence
  SARS-CoV-2/Australia/QLD02/2020__EPI_ISL_407896 spike protein (1-1147)(K986P_V987P_T887W_A1020W) Foldon construct
MFVFLVLLPLVSSQCVNLTTRTQLPPAYTNSFTRGVYYPDKVFRSSVLHSTQDLFLPFFSNVTWFHAIHVSGTNGTKRFDNPVLPFNDGVYFASTEKSNIIRGWIFGTTLDSKTQSLLIVNNATNVVIKVCEFQFCNDPFLGVYYHKNNKSWMESEFRVYSSANNCTFEYVSQPFLMDLEGKQGNFKNLREFVFKNIDGYFKIYSKHTPINLVRDLPQGFSALEPLVDLPIGINITRFQTLLALHRSYLTPGDSSSGWTAGAAAYYVGYLQPRTFLLKYNENGTITDAVDCALDPLSETKCTLKSFTVEKGIYQTSNFRVQPTESIVRFPNITNLCPFGEVFNATRFASVYAWNRKRISNCVADYSVLYNSASFSTFKCYGVSPTKLNDLCFTNVYADSFVIRGDEVRQIAPGQTGKIADYNYKLPDDFTGCVIAWNSNNLDSKVGGNYNYLYRLFRKSNLKPFERDISTEIYQAGSTPCNGVEGFNCYFPLQSYGFQPTNGVGYQPYRVVVLSFELLHAPATVCGPKKSTNLVKNKCVNFNFNGLTGTGVLTESNKKFLPFQQFGRDIADTTDAVRDPQTLEILDITPCSFGGVSVITPGTNTSNQVAVLYQDVNCTEVPVAIHADQLTPTWRVYSTGSNVFQTRAGCLIGAEHVNNSYECDIPIGAGICASYQTQTNSPRRARSVASQSIIAYTMSLGAENSVAYSNNSIAIPTNFTISVTTEILPVSMTKTSVDCTMYICGDSTECSNLLLQYGSFCTQLNRALTGIAVEQDKNTQEVFAQVKQIYKTPPIKDFGGFNFSQILPDPSKPSKRSFIEDLLFNKVTLADAGFIKQYGDCLGDIAARDLICAQKFNGLTVLPPLLTDEMIAQYTSALLAGTITSGWWFGAGAALQIPFAMQMAYRFNGIGVTQNVLYENQKLIANQFNSAIGKIQDSLSSTASALGKLQDVVNQNAQALNTLVKQLSSNFGAISSVLNDILSRLDPPEAEVQIDRLITGRLQSLQTYVTQQLIRAAEIRWSANLAATKMSECVLGQSKRVDFCGKGYHLMSFPQSAPHGVVFLHVTYVPAQEKNFTTAPAICHDGKAHFPREGVFVSNGTHWFVTQRNFYEPQIITTDNTFVSGNCDVVIGIVNNTVYDPLQLELDSGGSGYIPEAPRDGQAYVRKDGEWVLLSTFL

SEQ ID NO: 9799 - protein, 1177 aa, Artificial Sequence
  SARS-CoV-2/India/1-31/2020__EPI_ISL_413523 spike protein (1-1147)(K986P_V987P_T887W_A1020W) Foldon construct
MFVFLVLLPLVSSQCVNLTTRTQLPPAYTNSFTRGVYYPDKVFRSSVLHSTQDLFLPFFSNVTWFHAIHVSGTNGTKRFDNPVLPFNDGVYFASTEKSNIIRGWIFGTTLDSKTQSLLIVNNATNVVIKVCEFQFCNDPFLGVYYHKNNKSWMESEFRVYSSANNCTFEYVSQPFLMDLEGKQGNFKNLREFVFKNIDGYFKIYSKHTPINLVRDLPQGFSALEPLVDLPIGINITRFQTLLALHRSYLTPGDSSSGWTAGAAAYYVGYLQPRTFLLKYNENGTITDAVDCALDPLSETKCTLKSFTVEKGIYQTSNFRVQPTESIVRFPNITNLCPFGEVFNATRFASVYAWNRKRISNCVADYSVLYNSASFSTFKCYGVSPTKLNDLCFTNVYADSFVIRGDEVRQIAPGQTGKIADYNYKLPDDFTGCVIAWNSNNLDSKVGGNYNYLYRLFRKSNLKPFERDISTEIYQAGSTPCNGVEGFNCYFPLQSYGFQPTNGVGYQPYRVVVLSFELLHAPATVCGPKKSTNLVKNKCVNFNFNGLTGTGVLTESNKKFLPFQQFGRDIADTTDAVRDPQTLEILDITPCSFGGVSVITPGTNTSNQVAVLYQDVNCTEVPVAIHADQLTPTWRVYSTGSNVFQTRAGCLIGAEHVNNSYECDIPIGAGICASYQTQTNSPRRARSVASQSIIAYTMSLGAENSVAYSNNSIAIPTNFTISVTTEILPVSMTKTSVDCTMYICGDSTECSNLLLQYGSFCTQLNRALTGIAVEQDKNTQEVFAQVKQIYKTPPIKDFGGFNFSQILPDPSKPSKRSFIEDLLFNKVTLADAGFIKQYGDCLGDIAARDLICAQKFNGLTVLPPLLTDEMIAQYTSALLAGTITSGWWFGAGAALQIPFAMQMAYRFNGIGVTQNVLYENQKLIANQFNSVIGKIQDSLSSTASALGKLQDVVNQNAQALNTLVKQLSSNFGAISSVLNDILSRLDPPEAEVQIDRLITGRLQSLQTYVTQQLIRAAEIRWSANLAATKMSECVLGQSKRVDFCGKGYHLMSFPQSAPHGVVFLHVTYVPAQEKNFTTAPAICHDGKAHFPREGVFVSNGTHWFVTQRNFYEPQIITTDNTFVSGNCDVVIGIVNNTVYDPLQPELDSGGSGYIPEAPRDGQAYVRKDGEWVLLSTFL

SEQ ID NO: 9800 - protein, 1177 aa, Artificial Sequence
  SARS-CoV-2/Guangdong/GD2020087-P0008/2020__EPI_ISL_413863 spike protein (1-1147)(K986P_V987P_T887W_A1020W) Foldon construct
MFVFLVLLPLVSSQCVNLTTRTQLPPAYTNSFTRGVYYPDKVFRSSVLHSTQDLFLPFFSNVTWFHAIHVSGTNGTKRFDNPVLPFNDGVYFASTEKSNIIRGWIFGTTLDSKTQSLLIVNNATNVVIKVCEFQFCNDPFLGVYYHKNNKSWMESEFRVYSSANNCTFEYVSQPFLMDLEGKQGNFKNLREFVFKNIDGYFKIYSKHTPINLVRDLPQGFSALEPLVDLPIGINITRFQTLLALHRSYLTPGDSSSGWTAGAAAYYVGYLQPRTFLLKYNENGTITDAVDCALDPLSETKCTLKSFTVEKGIYQTSNFRVQPTESIVRFPNITNLCPFGEVFNATRFASVYAWNRKRISNCVADYSVLYNSASFSTFKCYGVSPTKLNDLCFTNVYADSFVIRGDEVREIAPGQTGKIADYNYKLPDDFTGCVIAWNSNNLDSKVGGNYNYLYRLFRKSNLKPFERDISTEIYQAGSTPCNGVEGFNCYFPLQSYGFQPTNGVGYQPYRVVVLSFELLHAPATVCGPKKSTNLVKNKCVNFNFNGLTGTGVLTESNKKFLPFQQFGRDIADTTDAVRDPQTLEILDITPCSFGGVSVITPGTNTSNQVAVLYQDVNCTEVPVAIHADQLTPTWRVYSTGSNVFQTRAGCLIGAEHVNNSYECDIPIGAGICASYQTQTNSPRRARSVASQSIIAYTMSLGAENSVAYSNNSIAIPTNFTISVTTEILPVSMTKTSVDCTMYICGDSTECSNLLLQYGSFCTQLNRALTGIAVEQDKNTQEVFAQVKQIYKTPPIKDFGGFNFSQILPDPSKPSKRSFIEDLLFNKVTLADAGFIKQYGDCLGDIAARDLICAQKFNGLTVLPPLLTDEMIAQYTSALLAGTITSGWWFGAGAALQIPFAMQMAYRFNGIGVTQNVLYENQKLIANQFNSAIGKIQDSLSSTASALGKLQDVVNQNAQALNTLVKQLSSNFGAISSVLNDILSRLDPPEAEVQIDRLITGRLQSLQTYVTQQLIRAAEIRWSANLAATKMSECVLGQSKRVDFCGKGYHLMSFPQSAPHGVVFLHVTYVPAQEKNFTTAPAICHDGKAHFPREGVFVSNGTHWFVTQRNFYEPQIITTDNTFVSGNCDVVIGIVNNTVYDPLQPELDSGGSGYIPEAPRDGQAYVRKDGEWVLLSTFL

SEQ ID NO: 9801 - protein, 1177 aa, Artificial Sequence
  SARS-CoV-2/Sweden/01/2020__EPI_ISL_411951 spike protein (1-1147)(K986P_V987P_T887W_A1020W) Foldon construct
MFVFLVLLPLVSSQCVNLTTRTQLPPAYTNSFTRGVYYPDKVFRSSVLHSTQDLFLPFFSNVTWFHAIHVSGTNGTKRFDNPVLPFNDGVYFASTEKSNIIRGWIFGTTLDSKTQSLLIVNNATNVVIKVCEFQFCNDPFLGVYYHKNNKSWMESEFRVYSSANNCTFEYVSQPFLMDLEGKQGNFKNLREFVFKNIDGYFKIYSKHTPINLVRDLPQGFSALEPLVDLPIGINITRFQTLLALHRSYLTPGDSSSGWTAGAAAYYVGYLQPRTFLLKYNENGTITDAVDCALDPLSETKCTLKSFTVEKGIYQTSNFRVQPTESIVRFPNITNLCPFGEVFNATRFASVYAWNRKRISNCVADYSVLYNSASFSTFKCYGVSPTKLNDLCFTNVYADSFVIRGDEVRQIAPGQTGKIADYNYKLPDDFTGCVIAWNSNNLDSKVGGNYNYLYRLFRKSNLKPFERDISTEIYQAGSTPCNGVEGFNCYFPLQSYGFQPTNGVGYQPYRVVVLSFELLHAPATVCGPKKSTNLVKNKCVNFNFNGLTGTGVLTESNKKFLPFQQFGRDIADTTDAVRDPQTLEILDITPCSFGGVSVITPGTNTSNQVAVLYQDVNCTEVPVAIHADQLTPTWRVYSTGSNVFQTRAGCLIGAEHVNNSYECDIPIGAGICASYQTQTNSPRRARSVASQSIIAYTMSLGAENSVAYSNNSIAIPTNFTISVTTEILPVSMTKTSVDCTMYICGDSTECSNLLLQYGSFCTQLNRALTGIAVEQDKNTQEVFAQVKQIYKTPPIKDCGGFNFSQILPDPSKPSKRSFIEDLLFNKVTLADAGFIKQYGDCLGDIAARDLICAQKFNGLTVLPPLLTDEMIAQYTSALLAGTITSGWWFGAGAALQIPFAMQMAYRFNGIGVTQNVLYENQKLIANQFNSAIGKIQDSLSSTASALGKLQDVVNQNAQALNTLVKQLSSNFGAISSVLNDILSRLDPPEAEVQIDRLITGRLQSLQTYVTQQLIRAAEIRWSANLAATKMSECVLGQSKRVDFCGKGYHLMSFPQSAPHGVVFLHVTYVPAQEKNFTTAPAICHDGKAHFPREGVFVSNGTHWFVTQRNFYEPQIITTDNTFVSGNCDVVIGIVNNTVYDPLQPELDSGGSGYIPEAPRDGQAYVRKDGEWVLLSTFL

SEQ ID NO: 9802 - protein, 1177 aa, Artificial Sequence
  SARS-CoV-2/Tianmen/HBCDC-HB-07/2020__EPI_ISL_412983 spike protein (1-1147)(K986P_V987P_T887W_A1020W) Foldon construct
MFVFLVLLPLVSSQCVNLTTRTQLPPAYTNSFTRGVYYPDKVFRSSVLHSTQDLFLPFFSNVTWFHAIHVSGTNGTKRFDNPVLPFNDGVYFASTEKSNIIRGWIFGTTLDSKTQSLLIVNNATNVVIKVCEFQFCNDPFLGVYYHKNNKSWMESEFRVYSSANNCTFEYVSQPFLMDLEGKQGNFKNLREFVFKNIDGYFKIYSKHTPINLVRDLPQGFSALEPLVDLPIGINITRFQTLLALHRSYLTPGDSSSGWTAGAAAYYVGYLQPRTFLLKYNENGTITDAVDCALDPLSETKCTLKSFTVEKGIYQTSNFRVQPTESIVRFPNITNLCPFGEVFNATRFASVYAWNRKRISNCVADYSVLYNSASFSTFKCYGVSPTKLNDLCFTNVYADSFVIRGDEVRQIAPGQTGKIADYNYKLPDDFTGCVIAWNSNNLDSKVGGNYNYLYRLFRKSNLKPFERDISTEIYQAGSTPCNGVEGFNCYFPLQSYGFQPTNGVGYQPYRVVVLSFELLHAPATVCGPKKSTNLVKNKCVNFNFNGLTGTGVLTESNKKFLPFQQFGRDIADTTDAVRDPQTLEILDITPCSFGGVSVITPGTNTSNQVAVLYQDLNCTEVPVAIHADQLTPTWRVYSTGSNVFQTRAGCLIGAEHVNNSYECDIPIGAGICASYQTQTNSPRRARSVASQSIIAYTMSLGAENSVAYSNNSIAIPTNFTISVTTEILPVSMTKTSVDCTMYICGDSTECSNLLLQYGSFCTQLNRALTGIAVEQDKNTQEVFAQVKQIYKTPPIKDFGGFNFSQILPDPSKPSKRSFIEDLLFNKVTLADAGFIKQYGDCLGDIAARDLICAQKFNGLTVLPPLLTDEMIAQYTSALLAGTITSGWWFGAGAALQIPFAMQMAYRFNGIGVTQNVLYENQKLIANQFNSAIGKIQDSLSSTASALGKLQDVVNQNAQALNTLVKQLSSNFGAISSVLNDILSRLDPPEAEVQIDRLITGRLQSLQTYVTQQLIRAAEIRWSANLAATKMSECVLGQSKRVDFCGKGYHLMSFPQSAPHGVVFLHVTYVPAQEKNFTTAPAICHDGKAHFPREGVFVSNGTHWFVTQRNFYEPQIITTDNTFVSGNCDVVIGIVNNTVYDPLQPELDSGGSGYIPEAPRDGQAYVRKDGEWVLLSTFL

SEQ ID NO: 9803 - protein, 1177 aa, Artificial Sequence
  SARS-CoV-2/Hong Kong/case42_VM20002493/2020__EPI_ISL_414527 spike protein (1-1147)(K986P_V987P_T887W_A1020W) Foldon construct
MFVFLVLLPLVSSQCVNLTTRTQLPPAYTNSFTRGVYYPDKVFRSSVLHSTQDLFLPFFSNVTWFHAIHVSGTNGTKRFDNPVLPFNDGVYFASTEKSNIIRGWIFGTTLDSKTQSLLIVNNATNVVIKVCEFQFCNDPFLGVYYHKNNKSWMESEFRVYSSANNCTFEYVSQPFLMDLEGKQGNFKNLREFVFKNIDGYFKIYSKHTPINLVRDLPQGFSALEPLVDLPIGINITRFQTLLALHRSYLTPGDSSSGWTAGAAAYYVGYLQPRTFLLKYNENGTITDAVDCALDPLSETKCTLKSFTVEKGIYQTSNFRVQPTESIVRFPNITNLCPFGEVFNATRFASVYAWNRKRISNCVADYSVLYNSASFSTFKCYGVSPTKLNDLCFTNVYADSFVIRGDEVRQIAPGQTGKIADYNYKLPDDFTGCVIAWNSNNLDSKVGGNYNYLYRLFRKSNLKPFERDISTEIYQAGSTPCNGVEGFNCYFPLQSYGFQPTNGVGYQPYRVVVLSFELLHAPATVCGPKKSTNLVKNKCVNFNFNGLTGTGVLTESNKKFLPFQQFGRDIADTTDAVRDPQTLEILDITPCSFGGVSVITPGTNTSNQVAVLYQDVNCTEVPVAIHADQLTPTWRVYSTGSNVFQTRAGCLIGAEHVNNSYECDIPIGAGICASYQTQTNSPRRARSVASQSIIAYTMSLGAENSVAYSNNSIAIPTNFAISVTTEILPVSMTKTSVDCTMYICGDSTECSNLLLQYGSFCTQLNRALTGIAVEQDKNTQEVFAQVKQIYKTPPIKDFGGFNFSQILPDPSKPSKRSFIEDLLFNKVTLADAGFIKQYGDCLGDIAARDLICAQKFNGLTVLPPLLTDEMIAQYTSALLAGTITSGWWFGAGAALQIPFAMQMAYRFNGIGVTQNVLYENQKLIANQFNSAIGKIQDSLSSTASALGKLQDVVNQNAQALNTLVKQLSSNFGAISSVLNDILSRLDPPEAEVQIDRLITGRLQSLQTYVTQQLIRAAEIRWSANLAATKMSECVLGQSKRVDFCGKGYHLMSFPQSAPHGVVFLHVTYVPAQEKNFTTAPAICHDGKAHFPREGVFVSNGTHWFVTQRNFYEPQIITTDNTFVSGNCDVVIGIVNNTVYDPLQPELDSGGSGYIPEAPRDGQAYVRKDGEWVLLSTFL

SEQ ID NO: 9804 - protein, 1177 aa, Artificial Sequence
  SARS-CoV-2/USA/CruiseA-23/2020__EPI_ISL_414482 spike protein (1-1147)(K986P_V987P_T887W_A1020W) Foldon construct
MFVFLVLLPLVSSQCVNLTTRTQLPPAYTNSFTRGVYYPDKVFRSSVLHSTQDLFLPFFSNVTWFHAIHVSGTNGTKRFDNPVLPFNDGVYFASTEKSNIIRGWIFGTTLDSKTQSLLIVNNATNVVIKVCEFQFCNDPFLGVYYHKNNKSWMESEFRVYSSANNCTFEYVSQPFLMDLEVKQGNFKNLREFVFKNIDGYFKIYSKHTPINLVRDLPQGFSALEPLVDLPIGINITRFQTLLALHRSYLTPGDSSSGWTAGAAAYYVGYLQPRTFLLKYNENGTITDAVDCALDPLSETKCTLKSFTVEKGIYQTSNFRVQPTESIVRFPNITNLCPFGEVFNATRFASVYAWNRKRISNCVADYSVLYNSASFSTFKCYGVSPTKLNDLCFTNVYADSFVIRGDEVRQIAPGQTGKIADYNYKLPDDFTGCVIAWNSNNLDSKVGGNYNYLYRLFRKSNLKPFERDISTEIYQAGSTPCNGVEGFNCYFPLQSYGFQPTNGVGYQPYRVVVLSFELLHAPATVCGPKKSTNLVKNKCVNFNFNGLTGTGVLTESNKKFLPFQQFGRDIADTTDAVRDPQTLEILDITPCSFGGVSVITPGTNTSNQVAVLYQDVNCTEVPVAIHADQLTPTWRVYSTGSNVFQTRAGCLIGAEHVNNSYECDIPIGAGICASYQTQTNSPRRARSVASQSIIAYTMSLGAENSVAYSNNSIAIPTNFTISVTTEILPVSMTKTSVDCTMYICGDSTECSNLLLQYGSFCTQLNRALTGIAVEQDKNTQEVFAQVKQIYKTPPIKDFGGFNFSQILPDPSKPSKRSFIEDLLFNKVTLADAGFIKQYGDCLGDIAARDLICAQKFNGLTVLPPLLTDEMIAQYTSALLAGTITSGWWFGAGAALQIPFAMQMAYRFNGIGVTQNVLYENQKLIANQFNSAIGKIQDSLSSTASALGKLQDVVNQNAQALNTLVKQLSSNFGAISSVLNDILSRLDPPEAEVQIDRLITGRLQSLQTYVTQQLIRAAEIRWSANLAATKMSECVLGQSKRVDFCGKGYHLMSFPQSAPHGVVFLHVTYVPAQEKNFTTAPAICHDGKAHFPREGVFVSNGTHWFVTQRNFYEPQIITTDNTFVSGNCDVVIGIVNNTVYDPLQPELDSGGSGYIPEAPRDGQAYVRKDGEWVLLSTFL

SEQ ID NO: 9805 - protein, 1177 aa, Artificial Sequence
  SARS-CoV-2/Hong Kong/case85_VM20002868/2020__EPI_ISL_414519 spike protein (1-1147)(K986P_V987P_T887W_A1020W) Foldon construct
MFVFLVLVPLVSSQCVNLTTRTQLPPAYTNSFTRGVYYPDKVFRSSVLHSTQDLFLPFFSNVTWFHAIHVSGTNGTKRFDNPVLPFNDGVYFASTEKSNIIRGWIFGTTLDSKTQSLLIVNNATNVVIKVCEFQFCNDPFLGVYYHKNNKSWMESEFRVYSSANNCTFEYVSQPFLMDLEGKQGNFKNLREFVFKNIDGYFKIYSKHTPINLVRDLPQGFSALEPLVDLPIGINITRFQTLLALHRSYLTPGDSSSGWTAGAAAYYVGYLQPRTFLLKYNENGTITDAVDCALDPLSETKCTLKSFTVEKGIYQTSNFRVQPTESIVRFPNITNLCPFGEVFNATRFASVYAWNRKRISNCVADYSVLYNSASFSTFKCYGVSPTKLNDLCFTNVYADSFVIRGDEVRQIAPGQTGKIADYNYKLPDDFTGCVIAWNSNNLDSKVGGNYNYLYRLFRKSNLKPFERDISTEIYQAGSTPCNGVEGFNCYFPLQSYGFQPTNGVGYQPYRVVVLSFELLHAPATVCGPKKSTNLVKNKCVNFNFNGLTGTGVLTESNKKFLPFQQFGRDIADTTDAVRDPQTLEILDITPCSFGGVSVITPGTNTSNQVAVLYQDVNCTEVPVAIHADQLTPTWRVYSTGSNVFQTRAGCLIGAEHVNNSYECDIPIGAGICASYQTQTNSPRRARSVASQSIIAYTMSLGAENSVAYSNNSIAIPTNFTISVTTEILPVSMTKTSVDCTMYICGDSTECSNLLLQYGSFCTQLNRALTGIAVEQDKNTQEVFAQVKQIYKTPPIKDFGGFNFSQILPDPSKPSKRSFIEDLLFNKVTLADAGFIKQYGDCLGDIAARDLICAQKFNGLTVLPPLLTDEMIAQYTSALLAGTITSGWWFGAGAALQIPFAMQMAYRFNGIGVTQNVLYENQKLIANQFNSAIGKIQDSLSSTASALGKLQDVVNQNAQALNTLVKQLSSNFGAISSVLNDILSRLDPPEAEVQIDRLITGRLQSLQTYVTQQLIRAAEIRWSANLAATKMSECVLGQSKRVDFCGKGYHLMSFPQSAPHGVVFLHVTYVPAQEKNFTTAPAICHDGKAHFPREGVFVSNGTHWFVTQRNFYEPQIITTDNTFVSGNCDVVIGIVNNTVYDPLQPELDSGGSGYIPEAPRDGQAYVRKDGEWVLLSTFL

SEQ ID NO: 9806 - protein, 1177 aa, Artificial Sequence; identical to SEQ ID NO: 9796
  SARS-CoV-2/England/200990660/2020__EPI_ISL_414523 spike protein (1-1147)(K986P_V987P_T887W_A1020W) Foldon construct

SEQ ID NO: 9807 - protein, 1177 aa, Artificial Sequence
  SARS-CoV-2/Australia/NSW09/2020__EPI_ISL_413595 spike protein (1-1147)(K986P_V987P_T887W_A1020W) Foldon construct
MFVFLVLLPLVSSQCVNLTTRTQLPPAYTNSFTRGVYYPDKVFRSSVLHSTQDLFLPFFSNVTWFHAIHVSGTNGTKRFDNPVLPFNDGVYFASTEKSNIIRGWIFGTTLDSKTQSLLIVNNATNVVIKVCEFQFCNDPFLGVYYHKNNKSWMESEFRVYSSANNCTFEYVSQPFLMDLEGKQGNFKNLREFVFKNIDGYFKIYSKHTPINLVRDLPQGFSALEPLVDLPIGINITRFQTLLALHRSYLTPGDSSSGWTAGAAAYYVGYLQPRTFLLKYNENGTITDAVDCALDPLSETKCTLKSFTVEKGIYQTSNFRVQPTESIVRFPNITNLCPFGEVFNATRFASVYAWNRKRISNCVADYSVLYNSASFSTFKCYGVSPTKLNDLCFTNVYADSFVIRGDEVRQIAPGQTGKIADYNYKLPDDFTGCVIAWNSNNLDSKVGGNYNYLYRLFRKSNLKPFERDISTEIYQAGSTPCNGVEGFNCYFPLQSYGFQPTNGVGYQPYRVVVLSFELLHAPATVCGPKKSTNLVKNKCVNFNFNGLTGTGVLTESNKKFLPFQQFGRDIADTTDAVRDPQTLEILDITPCSFGGVSVITPGTNTSNQVAVLYQDVNCTEVPVAIHADQLTPTWRVYSTGSNVFQTRAGCLIGAEHVNNSYECDIPIGAGICASYQTQTNSPRRARSVASQSIIAYTMSLGAENSVAYSNNSIAIPTNFTISVTTEILPVSMTKTSVDCTMYICGDSTECSNLLLQYGSFCTQLNRALTGIAVEQDKNTQEVFAQVKQIYKTPPIKDFGGFNFSQILPDPSKPSKRSFIEDLLFNKVTLADAGFIKQYGDCLGDIAARDLICAQKFNGLTVLPPLLTDEMIAQYTSALLAGTITSGWWFGAGAALQIPFAMQMAYRFNGIGVTQNVLYENQKLIANQFNSAIGKIQDSLSFTASALGKLQDVVNQNAQALNTLVKQLSSNFGAISSVLNDILSRLDPPEAEVQIDRLITGRLQSLQTYVTQQLIRAAEIRWSANLAATKMSECVLGQSKRVDFCGKGYHLMSFPQSAPHGVVFLHVTYVPAQEKNFTTAPAICHDGKAHFPREGVFVSNGTHWFVTQRNFYEPQIITTDNTFVSGNCDVVIGIVNNTVYDPLQPELDSGGSGYIPEAPRDGQAYVRKDGEWVLLSTFL

SEQ ID NO: 9808 - protein, 1177 aa, Artificial Sequence; identical to SEQ ID NO: 9788
  SARS-CoV-2/Australia/NSW10/2020__EPI_ISL_413596 spike protein (1-1147)(K986P_V987P_T887W_A1020W) Foldon construct

SEQ ID NO: 9809 - protein, 1177 aa, Artificial Sequence
  SARS-CoV-2/Switzerland/1000477797/2020__EPI_ISL_413023 spike protein (1-1147)(K986P_V987P_T887W_A1020W) Foldon construct
MFVFLVLLPLVSSQCVNLTTRTQLPPAYTNSFTRGVYYPDKVFRSSVLHSTQDLFLPFFSNVTWFHAIHVSGTNGTKRFDNPVLPFNDGVYFASTEKSNIIRGWIFGTTLDSKTQSLLIVNNATNVVIKVCEFQFCNDPFLGVYYHKNNKSWMESEFRVYSSANNCTFEYVSQPFLMDLEGKQGNFKNLREFVFKNIDGYFNIYSKHTPINLVRDLPQGFSALEPLVDLPIGINITRFQTLLALHRSYLTPGDSSSGWTAGAAAYYVGYLQPRTFLLKYNENGTITDAVDCALDPLSETKCTLKSFTVEKGIYQTSNFRVQPTESIVRFPNITNLCPFGEVFNATRFASVYAWNRKRISNCVADYSVLYNSASFSTFKCYGVSPTKLNDLCFTNVYADSFVIRGDEVRQIAPGQTGKIADYNYKLPDDFTGCVIAWNSNNLDSKVGGNYNYLYRLFRKSNLKPFERDISTEIYQAGSTPCNGVEGFNCYFPLQSYGFQPTNGVGYQPYRVVVLSFELLHAPATVCGPKKSTNLVKNKCVNFNFNGLTGTGVLTESNKKFLPFQQFGRDIADTTDAVRDPQTLEILDITPCSFGGVSVITPGTNTSNQVAVLYQGVNCTEVPVAIHADQLTPTWRVYSTGSNVFQTRAGCLIGAEHVNNSYECDIPIGAGICASYQTQTNSPRRARSVASQSIIAYTMSLGAENSVAYSNNSIAIPTNFTISVTTEILPVSMTKTSVDCTMYICGDSTECSNLLLQYGSFCTQLNRALTGIAVEQDKNTQEVFAQVKQIYKTPPIKDFGGFNFSQILPDPSKPSKRSFIEDLLFNKVTLADAGFIKQYGDCLGDIAARDLICAQKFNGLTVLPPLLTDEMIAQYTSALLAGTITSGWWFGAGAALQIPFAMQMAYRFNGIGVTQNVLYENQKLIANQFNSAIGKIQDSLSSTASALGKLQDVVNQNAQALNTLVKQLSSNFGAISSVLNDILSRLDPPEAEVQIDRLITGRLQSLQTYVTQQLIRAAEIRWSANLAATKMSECVLGQSKRVDFCGKGYHLMSFPQSAPHGVVFLHVTYVPAQEKNFTTAPAICHDGKAHFPREGVFVSNGTHWFVTQRNFYEPQIITTDNTFVSGNCDVVIGIVNNTVYDPLQPELDSGGSGYIPEAPRDGQAYVRKDGEWVLLSTFL

SEQ ID NO: 9810 - protein, 1177 aa, Artificial Sequence
  SARS-CoV-2/Belgium/BA-02291/2020__EPI_ISL_415159 spike protein (1-1147)(K986P_V987P_T887W_A1020W) Foldon construct
MFVFLVLLPLVSSQCVNLTTRTQLPPAYTNSFTRGVYYPDKVFRSSVLHSTQDLFLPFFSNVTWFHAIHVSGTNGTKRFDNPVLPFNDGVYFASTEKSNIIRGWIFGTTLDSKTQSLLIVNNATNVVIKVCEFQFCNDPFLGVYYHKNNKSWMESEFRVYSSANNCTFEYVSQPFLMDLEGKQGNFKNLREFVFKNIDGYFKIYSKHTPINLVRDLPQGFSALEPLVDLPIGINITRFQTLLALHRSYLTPGDSSSGWTAGAAAYYVGYLQPRTFLLKYNENGTITDAVDCALDPLSETKCTLKSFTVEKGIYQTSNFRVQPTESIVRFPNITNLCPFGEVFNATRFASVYAWNRKRISNCVADYSVLYNSASFSTFKCYGVSPTKLNDLCFTNVYADSFVIRGDEVRQIAPGQTGKIADYNYKLPDDFTGCVIAWNSNNLDSKVGGNYNYLYRLFRRSNLKPFERDISTEIYQAGSTPCNGVEGFNCYFPLQSYGFQPTNGVGYQPYRVVVLSFELLPAPATVCGPKKSTNLVKNKCVNFNFNGLTGTGVLTESNKKFLPFQQFGRDIADTTDAVRDPQTLEILDITPCSFGGVSVITPGTNTSNQVAVLYQGVNCTEVPVAIHADQLTPTWRVYSTGSNVFQTRAGCLIGAEHVNNSYECDIPIGAGICASYQTQTNSPRRARSVASQSIIAYTMSLGAENSVAYSNNSIAIPTNFTISVTTEILPVSMTKTSVDCTMYICGDSTECSNLLLQYGSFCTQLNRALTGIAVEQDKNTQEVFAQVKQIYKTPPIKDFGGFNFSQILPDPSKPSKRSFIEDLLFNKVTLADAGFIKQYGDCLGDIAARDLICAQKFNGLTVLPPLLTDEMIAQYTSALLAGTITSGWWFGAGAALQIPFAMQMAYRFNGIGVTQNVLYENQKLIANQFNSAIGKIQDSLSSAAPALGKLQDVVNQNAQALNTLVKQLSSNFGAISSVLNDILSRLDPPEAEVQIDRLITGRLQSLQTYVTQQLIRAAEIRWSANLAATKMSECVLGQSKRVDFCGKGYHLMSFPQSAPHGVVFLHVTYVPAQEKNFTTAPAICHDGKAHFPREGVFVSNGTHWFVTQRNFYEPQIITTDNTFVSGNCDVVIGIVNNTVYDPLQPELDSGGSGYIPEAPRDGQAYVRKDGEWVLLSTFL

SEQ ID NO: 9811 - protein, 1177 aa, Artificial Sequence
  SARS-CoV-2/USA/WA8-UW5/2020__EPI_ISL_413486 spike protein (1-1147)(K986P_V987P_T887W_A1020W) Foldon construct
MFVFLVLLPLVSSQCVNLTTRTQLPPAYTNSFTRGVYYPDKVFRSSVLHSTQDLFLPFFSNVTWFHAIHVSGTNGTKRFDNPVLPFNDGVYFASTEKSNIIRGWIFGTTLDSKTQSLLIVNNATNVVIKVCEFQFCNDPFLGVYYHKNNKSWMESEFRVYSSANNCTFEYVSQPFLMDLEGKQGNFKNLREFVFKNIDGYFKIYSKHTPINLVRDLPQGFSALEPLVDLPIGINITRFQTLLALHRSYLTPGDSSSGWTAGAAAYYVGYLQPRTFLLKYNENGTITDAVDCALDPLSETKCTLKSFTVEKGIYQTSNFRVQPTESIVRFPNITNLCPFGEVFNATRFASVYAWNRKRISNCVADYSVLYNSASFSTFKCYGVSPTKLNDLCFTNVYADSFVIRGDEVRQIAPGQTGKIADYNYKLPDDFTGCVIAWNSNNLDSKVGGNYNYLYRLFRKSNLKPFERDISTEIYQAGSTPCNGVEGFNCYFPLQSYGFQPTNGVGYQPYRVVVLSFELLHAPATVCGPKKSTNLVKNKCVNFNFNGLTGTGVLTESNKKFLPFQQFGRDIADTTDAVRDPQTLEILDITPCSFGGVSVITPGTNTSNQVAVLYQDVNCTEVPVAIHADQLTPTWRVYSTGSNVFQTRAGCLIGAEYVNNSYECDIPIGAGICASYQTQTNSPRRARSVASQSIIAYTMSLGAENSVAYSNNSIAIPTNFTISVTTEILPVSMTKTSVDCTMYICGDSTECSNLLLQYGSFCTQLNRALTGIAVEQDKNTQEVFAQVKQIYKTPPIKDFGGFNFSQILPDPSKPSKRSFIEDLLFNKVTLADAGFIKQYGDCLGDIAARDLICAQKFNGLTVLPPLLTDEMIAQYTSALLAGTITSGWWFGAGAALQIPFAMQMAYRFNGIGVTQNVLYENQKLIANQFNSAIGKIQDSLSSTASALGKLQDVVNQNAQALNTLVKQLSSNFGAISSVLNDILSRLDPPEAEVQIDRLITGRLQSLQTYVTQQLIRAAEIRWSANLAATKMSECVLGQSKRVDFCGKGYHLMSFPQSAPHGVVFLHVTYVPAQEKNFTTAPAICHDGKAHFPREGVFVSNGTHWFVTQRNFYEPQIITTDNTFVSGNCDVVIGIVNNTVYDPLQPELDSGGSGYIPEAPRDGQAYVRKDGEWVLLSTFL

SEQ ID NO: 9812 - protein, 1177 aa, Artificial Sequence
  SARS-CoV-2/England/20102000506/2020__EPI_ISL_415147 spike protein (1-1147)(K986P_V987P_T887W_A1020W) Foldon construct
MFVFLVLLPLVSSQCVNLTTRTQLPPAYTNSFTRGVYYPDKVFRSSVLHSTQDLFLPFFSNVTWFHAIHVSGTNGTKRFDNPVLPFNDGVYFASTEKSNIIRGWIFGTTLDSKTQSLLIVNNATNVVIKVCEFQFCNDPFLGVYYHKNNKSWMESEFRVYSSANNCTFEYVSQPFLMDLEGKQGNFKNLREFVFKNIDGYFKIYSKHTPINLVRDLPQGFSALEPLVDLPIGINITRFQTLLALHRSYLTPGDSSSGWTAGAAAYYVGYLQPRTFLLKYNENGTITDAVDCALDPLSETKCTLKSFTVEKGIYQTSNFRVQPTESIVRFPNITNLCPFGEVFNATRFASVYAWNRKRISNCVADYSVLYNSASFSTFKCYGVSPTKLNDLCFTNVYADSFVIRGDEVRQIAPGQTGKIADYNYKLPDDFTGCVIAWNSNNLDSKVGGNYNYLYRLFRKSNLKPFERDISTEIYQAGSTPCNGVEGFNCYFPLQSYGFQPTNGVGYQPYRVVVLSFELLHAPATVCGPKKSTNLVKNKCVNFNFNGLTGTGVLTESNKKFLPFQQFGRDIADTTDAVRDPQTLEILDITPCSFGGVSVITPGTNTSNQVAVLYQGVNCTEVPVAIHADQLTPTWRVYSTGSNVFQTRAGCLIGAEHVNNSYECDIPIGAGICASYQTQTNSPRRARSVASQSIIAYTMSLGAENSVAYSNNSIAIPTNFTISVTTEILPVSMTKTSVDCTMYICGDSTECSNLLLQYGSFCTQLNRALTGIAVEQDKNTQEVFAQVKQIYKTPPIKDFGGFNFSQILPDPSKPSKRSFIEDLLFNKVTLADAGFIKQYGYCLGDIAARDLICAQKFNGLTVLPPLLTDEMIAQYTSALLAGTITSGWWFGAGAALQIPFAMQMAYRFNGIGVTQNVLYENQKLIANQFNSAIGKIQDSLSSTASALGKLQDVVNQNAQALNTLVKQLSSNFGAISSVLNDILSRLDPPEAEVQIDRLITGRLQSLQTYVTQQLIRAAEIRWSANLAATKMSECVLGQSKRVDFCGKGYHLMSFPQSAPHGVVFLHVTYVPAQEKNFTTAPAICHDGKAHFPREGVFVSNGTHWFVTQRNFYEPQIITTDNTFVSGNCDVVIGIVNNTVYDPLQPELDSGGSGYIPEAPRDGQAYVRKDGEWVLLSTFL

SEQ ID NO: 9813 - protein, 1177 aa, Artificial Sequence
  SARS-CoV-2/Belgium/VAG-03013/2020__EPI_ISL_415155 spike protein (1-1147)(K986P_V987P_T887W_A1020W) Foldon construct
MFVFLVLLPLVSSQCVNLTTRTQLPPAYTNSFTRGVYYPDKVFRSSVLHSTQDLFLPFFSNVTWFHAIHVSGTNGTKRFDNPVLPFNDGVYFASTEKSNIIRGWIFGTTLDSKTQSLLIVNNATNVVIKVCEFQFCNDPFLGVYYHKNNKSWMESEFRVYSSANNCTFEYVSQPFLMDLEGKQGNFKNLREFVFKNIDGYFKIYSKHTPINLVRDLPQGFSALEPLVDLPIGINITRFQTLLALHRSYLTPGDSSSGWTAGAAAYYVGYLQPRTFLLKYNENGTITDAVDCALDPLSETKCTLKSFTVEKGIYQTSNFRVQPTESIVRFPNITNLCPFGEVFNATRFASVYAWNRKRISNCVADYSVLYNSASFSTFKCYGVSPTKLNDLCFTNVYADSFVIRGDEVRQIAPGQTGKIADYNYKLPDDFTGCVIAWNSNNLDSKVGGNYNYLYRLFRKSNLKPFERDISTEIYQAGSTPCNGVEGFNCYFPLQSYGFQPTNGVGYQPYRVVVLSFELLHAPATVCGPKKSTNLVKNKCVNFNFNGLTGTGVLTESNKKFLPFQQFGRDIADTTDAVRDPQTLEILDITPCSFGGVSVITPGTNTSNQVAVLYQGVNCTEVPVAIHADQLTPTWRVYSTGSNVFQTRAGCLIGAEHVNNSYECDIPIGAGICASYQTQTNSPRRARSVASQSIIAYTMSLGAENSVAYSNNSIAIPTNFTISVTTEILPVSMTKTSVDCTMYICGDSTECSNLLLQYGSFCTQLNRALTGIAVEQDKNTQEVFAQVKQIYKTPPIKDFGGFNFSQILPDPSKPSKRSFIEDLLFNKVTLADAGFIKQYGDCLGDIAARDLICAQKFNGLTVLPPLLTDEMIAQYTSALLAGTITSGWWFGAGAALQIPFAMQMAYRFNGIGVTQNVLYENQKLIANQFNSAIGKIQDSLSSTATALGKLQDVVNQNAQALNTLVKQLSSNFGAISSVLNDILSRLDPPEAEVQIDRLITGRLQSLQTYVTQQLIRAAEIRWSANLAATKMSECVLGQSKRVDFCGKGYHLMSFPQSAPHGVVFLHVTYVPAQEKNFTTAPAICHDGKAHFPREGVFVSNGTHWFVTQRNFYEPQIITTDNTFVSGNCDVVIGIVNNTVYDPLQPELDSGGSGYIPEAPRDGQAYVRKDGEWVLLSTFL

SEQ ID NO: 9814 - protein, 1177 aa, Artificial Sequence
  SARS-CoV-2/Belgium/BC-03016/2020__EPI_ISL_415157 spike protein (1-1147)(K986P_V987P_T887W_A1020W) Foldon construct
MFVFLVLLPLVSSQCVNLTTRTQLPPAYTNSFTRGVYYPDKVFRSSVLHSTQDLFLPFFSNVTWFHAIHVSGTNGTKRFDNPVLPFNDGVYFASTEKSNIIRGWIFGTTLDSKTQSLLIVNNATNVVIKVCEFQFCNDPFLGVYYHKNNKSWMESEFRVYSSANNCTFEYVSQPFLMDLEGKQGNFKNLREFVFKNIDGYFKIYSKHTPINLVRDLPQGFSALEPLVDLPIGINITRFQTLLALHRSYLTPGDSSSGWTAGAAAYYVGYLQPRTFLLKYNENGTITDAVDCALDPLSETKCTLKSFTVEKGIYQTSNFRVQPTESIVRFPNITNLCPFGEVFNATRFASVYAWNRKRISNCVADYSVLYNSASFSTFKCYGVSPTKLNDLCFTNVYADSFVIRGDEVRQIAPGQTGKIADYNYKLPDDFTGCVIAWNSNNLDSKVGGNYNYLYRLFRKSNLKPFERDISTEIYQAGSTPCNGVEGFNCYFPLQSYGFQPTNGVGYQPYRVVVLSFELLHAPATVCGPKKSTNLVKNKCVNFNFNGLTGTGVLTESNKKFLPFQQFGRDIADTTDAVRDPQTLEILDITPCSFGGVSVITPGTNTSNQVAVLYQGVNCTEVPVAIHADQLTPTWRVYSTGSNVFQTRAGCLIGAEHVNNSYECDIPIGAGICASYQTQTNSPRRARSVASQSIIAYTMSLGAENSVAYSNNSIAIPTNFTISVTTEILPVSMTKTSVDCTMYICGDSTECSNLLLQYGSFCTQLNRALTGIAVEQDKNTQEVFAQVKQIYKTPPIKDFGGFNFSQILPDPSKPSKRSFIEDLLFNKVTLADAGFIKQYGDCLGDIAARDLICAQKFNGLTVLPPLLTDEMIAQYTSALLAGTITSGWWFGAGAALQIPFAMQMAYRFNGIGVTQNVLYENQKLIANQFNSAIGKIQDSLSSTAPALGKLQDVVNQNAQALNTLVKQLSSNFGAISSVLNDILSRLDPPEAEVQIDRLITGRLQSLQTYVTQQLIRAAEIRWSANLAATKMSECVLGQSKRVDFCGKGYHLMSFPQSAPHGVVFLHVTYVPAQEKNFTTAPAICHDGKAHFPREGVFVSNGTHWFVTQRNFYEPQIITTDNTFVSGNCDVVIGIVNNTVYDPLQPELDSGGSGYIPEAPRDGQAYVRKDGEWVLLSTFL

SEQ ID NO: 9815 - protein, 1177 aa, Artificial Sequence
  SARS-CoV-2/Germany/BavPat3/2020__EPI_ISL_414521 spike protein (1-1147)(K986P_V987P_T887W_A1020W) Foldon construct
MFVFLVLLPLVSSQCVNLTTRTQLPPAYTNSFTRGVYYPDKVFRSSVLHSTQDLFLPFFSNVTWFHAIHVSGTNGTKRFDNPVLPFNDGVYFASTEKSNIIRGWIFGTTLDSKTQSLLIVNNATNVVIKVCEFQFCNDPFLGVYYHKNNKSWMESEFRVYSSANNCTFEYVSQPFLMDLEGKQGNFKNLREFVFKNIDGYFKIYSKHTPINLVRDLPQGFSALEPLVDLPIGINITRFQTLLALHRSYLTPGDSSSGWTAGAAAYYVGYLQPRTFLLKYNENGTITDAVDCALDPLSETKCTLKSFTVEKGIYQTSNFRVQPTESIVRFPNITNLCPFGEVFNATRFASVYAWNRKRISNCVADYSVLYNSASFSTFKCYGVSPTKLNDLCFTNVYADSFVIRGDEVRQIAPGQTGKIADYNYKLPDDFTGCVIAWNSNNLDSKVGGNYNYLYRLFRKSNLKPFERDISTEIYQAGSTPCNGVEGFNCYFPLQSYGFQPTNGVGYQPYRVVVLSFELLHAPATVCGPKKSTNLVKNKCVNFNFNGLTGTGVLTESNKKFLPFQQFGRDIADTTDAVRDPQTLEILDITPCSFGGVSVITPGTNTSNQVAVLYQDVNCTEVPVAIHADQLTPTWRVYSTGSNVFQTRAGCLIGAEHVNNSYECDIPIGAGICASYQTQTNSPRRARSVASQSIIAYTMSLGAENSVAYSNNSIAIPTNFTISVTTEILPVSMTKTSVDCTMYICGDSTECSNLLLQYGSFCTQLNRALTGIAVEQDKNTQQVFAQVKQIYKTPPIKDFGGFNFSQILPDPSKPSKRSFIEDLLFNKVTLADAGFIKQYGDCLGDIAARDLICAQKFNGLTVLPPLLTDEMIAQYTSALLAGTITSGWWFGAGAALQIPFAMQMAYRFNGIGVTQNVLYENQKLIANQFNSAIGKIQDSLSSTASALGKLQDVVNQNAQALNTLVKQLSSNFGAISSVLNDILSRLDPPEAEVQIDRLITGRLQSLQTYVTQQLIRAAEIRWSANLAATKMSECVLGQSKRVDFCGKGYHLMSFPQSAPHGVVFLHVTYVPAQEKNFTTAPAICHDGKAHFPREGVFVSNGTHWFVTQRNFYEPQIITTDNTFVSGNCDVVIGIVNNTVYDPLQPELDSGGSGYIPEAPRDGQAYVRKDGEWVLLSTFL

SEQ ID NO: 9816 - protein, 1177 aa, Artificial Sequence
  SARS-CoV-2/France/HF1805/2020__EPI_ISL_414628 spike protein (1-1147)(K986P_V987P_T887W_A1020W) Foldon construct
MFVFLVLLPLVSSQCVNLTTRTQLPPAYTNSFTRGVYYPDKVFRSSVLHSTQDLFLPFFSNVTWFHAIHVSGTNGTKRFDNPVLPFNDGVYFASTEKSNIIRGWIFGTTLDSKTQSLLIVNNATNVVIKVCEFQFCNDPFLGVYYHKNNKSWMESEFRVYSSANNCTFEYVSQPFLMDLEGKQGNFKNLREFVFKNIDGYFKIYSKHTPINLVRDLPQGFSALEPLVDLPIGINITRFQTLLALHRSYLTPGDSSSGWTAGAAAYYVGYLQPRTFLLKYNENGTITDAVDCALDPLSETKCTLKSFTVEKGIYQTSNFRVQPTESIVRFPNITNLCPFGEVFNATRFASVYAWNRKRISNCVADYSVLYNSASFSTFKCYGVSPTKLNDLCFTNVYADSFVIRGDEVRQIAPGQTGKIADYNYKLPDDFTGCVIAWNSNNLDSKVGGNYNYLYRLFRKSNLKPFERDISTEIYQAGSTPCNGVEGFNCYFPLQSYGFQPTNGVGYQPYRVVVLSFELLHAPATVCGPKKSTNLVKNKCVNFNFNGLTGTGVLTESNKKFLPFQQFGRDIADTTDAVRDPQTLEILDITPCSFGGVSVITPGTNTSNQVAVLYQGVNCTEVPVAIHADQLTPTWRVYSTGSNVFQTRAGCLIGAEHVNNSYECDIPIGAGICASYQTQTNSPRRARSVASQSIIAYTMSLGAENSVAYSNNSIAIPTNFTISVTTEILPVSMTKTSVDCTMYICGDSTECSNLLLQYGSFCTQLNRALTGIAVEQDKNTQEVFAQVKQIYKTPPIKDFGGFNFSQILPDPSKPSKRSFIEDLLFNKVTLADAGFIKQYGDCLGDIAARDLICAQKFNGLTVLPPLLTDEMIAQYTSALLAGTITSGWWFGAGAALQIPFAMQMAYRFNGIGVTQNVLYENQKLIANQFNSAIGKIQDSLSSTASALGKLQDVVNQNAQALNTLVKQLSSNFGAISSVLNDILSRLDPPEAEVQIDRLITGRLQSLQTYVTQQLIRAAEIRWSANLAATKMSECVLGQSKRVDFCGKGYHLMSFPQSAPHGVVFLHVTYVPAQEKNFTTAPAICHDGKAHFPREGVFVSNGTHWFVTQRNFYEPQIITTDNTFVSGNCDVVIGVVNNTVYDPLQPELDSGGSGYIPEAPRDGQAYVRKDGEWVLLSTFL

SEQ ID NO: 9817 - protein, 1177 aa, Artificial Sequence
  SARS-CoV-2/Netherlands/ZuidHolland_9/2020__EPI_ISL_414445 spike protein (1-1147)(K986P_V987P_T887W_A1020W) Foldon construct
MFVFLVLLPLVSSQCVNLTTRTQLPPAYTNSFTRGVYYPDKVFRSSVLHSTQDLFLPFFSNVTWFHAIHVSGTNGTKRFDNPVLPFNDGVYFASTEKSNIIRGWIFGTTLDSKTQSLLIVNNATNVVIKVCEFQFCNDPFLGVYYHKNNKSWMESEFRVYSSANNCTFEYVSQPFLMDLEGKQGNFKNLREFVFKNIDGYFKIYSKHTPINLVRDLPQGFSALEPLVDLPIGINITRFQTLLALHRSYLTPGDSSSGWTAGAAAYYVGYLQPRTFLLKYNENGTITDAVDCALDPLSETKCTLKSFTVEKGIYQTSNFRVQPTESIVRFPNITNLCPFGEVFNATRFASVYAWNRKRISNCVADYSVLYNSASFSTFKCYGVSPTKLNDLCFTNVYADSFVIRGDEVRQIAPGQTGKIADYNYKLPDDFTGCVIAWNSNNLDSKVGGNYNYLYRLFRKSNLKPFERDISTEIYQAGSTPCNGVEGFNCYFPLQSYGFQPTNGVGYQPYRVVVLSFELLHAPATVCGPKKSTNLVKNKCVNFNFNGLTGTGVLTESNKKFLPFQQFGRDIADTTDAVRDPQTLEILDITPCSFGGVSVITPGTNTSNQVAVLYQGVNCTEVPVAIHADQLTPTWRVYSTGSNVFQTRAGCLIGAEHVNNSYECDIPIGAGICASYQTQTNSPRRARSVASQSIIAYTMSLGAENSVAYSNNSIAIPTNFTISVTTEILPVSMTKTSVDCTMYICGDSTECSNLLLQYGSFCTQLNRALTGIAVEQDKNTQEVFAQVKQIYKTPPIKDFGGFNFSQILPDPSKPSKRSFIEDLLFNKVTLADAGFIKQYGDCLGDIAARDLICVQKFNGLTVLPPLLTDEMIAQYTSALLAGTITSGWWFGAGAALQIPFAMQMAYRFNGIGVTQNVLYENQKLIANQFNSAIGKIQDSLSSTASALGKLQDVVNQNAQALNTLVKQLSSNFGAISSVLNDILSRLDPPEAEVQIDRLITGRLQSLQTYVTQQLIRAAEIRWSANLAATKMSECVLGQSKRVDFCGKGYHLMSFPQSAPHGVVFLHVTYVPAQEKNFTTAPAICHDGKAHFPREGVFVSNGTHWFVTQRNFYEPQIITTDNTFVSGNCDVVIGIVNNTVYDPLQPELDSGGSGYIPEAPRDGQAYVRKDGEWVLLSTFL

SEQ ID NO: 9818 - protein, 1177 aa, Artificial Sequence
  SARS-CoV-2/Finland/FIN03032020A/2020__EPI_ISL_413602 spike protein (1-1147)(K986P_V987P_T887W_A1020W) Foldon construct
MFVFLVLLPLVSSQCVNLTTRTQLPPAYTNSFTRGVYYPDKVFRSSVLHSTQDLFLPFFSNVTWFHAIHVSGTNGTKRFDNPVLPFNDGVYFASTEKSNIIRGWIFGTTLDSKTQSLLIVNNATNVVIKVCEFQFCNDPFLGVYYHKNNKSWMESEFRVYSSANNCTFEYVSQPFLMDLEGKQGNFKNLREFVFKNIDGYFKIYSKHTPINLVRDLPQGFSALEPLVDLPIGINITRFQTLLALHRSYLTPGDSSSGWTAGAAAYYVGYLQPRTFLLKYNENGTITDAVDCALDPLSETKCTLKSFTVEKGIYQTSNFRVQPTESIVRFPNITNLCPFGEVFNATRFASVYAWNRKRISNCVADYSVLYNSASFSTFKCYGVSPTKLNDLCFTNVYADSFVIRGDEVRQIAPGQTGKIADYNYKLPDDFTGCVISWNSNNLDSKVGGNYNYLYRLFRKSNLKPFERDISTEIYQAGSTPCNGVEGFNCYFPLQSYGFQPTNGVGYQPYRVVVLSFELLHAPATVCGPKKSTNLVKNKCVNFNFNGLTGTGVLTESNKKFLPFQQFGRDIADTTDAVRDPQTLEILDITPCSFGGVSVITPGTNTSNQVAVLYQGVNCTEVPVAIHADQLTPTWRVYSTGSNVFQTRAGCLIGAEHVNNSYECDIPIGAGICASYQTQTNSPRRARSVASQSIIAYTMSLGAENSVAYSNNSIAIPTNFTISVTTEILPVSMTKTSVDCTMYICGDSTECSNLLLQYGSFCTQLNRALTGIAVEQDKNTQEVFAQVKQIYKTPPIKDFGGFNFSQILPDPSKPSKRSFIEDLLFNKVTLADAGFIKQYGDCLGDIAARDLICAQKFNGLTVLPPLLTDEMIAQYTSALLAGTITSGWWFGAGAALQIPFAMQMAYRFNGIGVTQNVLYENQKLIANQFNSAIGKIQDSLSSTASALGKLQDVVNQNAQALNTLVKQLSSNFGAISSVLNDILSRLDPPEAEVQIDRLITGRLQSLQTYVTQQLIRAAEIRWSANLAATKMSECVLGQSKRVDFCGKGYHLMSFPQSAPHGVVFLHVTYVPAQEKNFTTAPAICHDGKAHFPREGVFVSNGTHWFVTQRNFYEPQIITTDNTFVSGNCDVVIGIVNNTVYDPLQPELDSGGSGYIPEAPRDGQAYVRKDGEWVLLSTFL

SEQ ID NO: 9819 - protein, 1177 aa, Artificial Sequence
  SARS-CoV-2/France/GE1977/2020__EPI_ISL_414632 spike protein (1-1147)(K986P_V987P_T887W_A1020W) Foldon construct
MFVFLVLLPLVSSQCVNLTTRTQLPPAYTNSFTRGVYYPDKVFRSSVLHSTQDLFLPFFSNVTWFHAIHVSGTNGTKRFDNPVLPFNDGVYFASTEKSNIIRGWIFGTTLDSKTQSLLIVNNATNVVIKVCEFQFCNDPFLGVYYHKNNKSWMESEFRVYSSANNCTFEYVSQPFLMDLEGKQGNFKNLREFVFKNIDGYFKIYSKHTPINLVRDLPQGFSALEPLVDLPIGINITRFQTLLALHRSYLTPGDSSSGWTAGAAAYYVGYLQPRTFLLKYNENGTITDAVDCALDPLSETKCTLKSFTVEKGIYQTSNFRVQPTESIVRFPNITNLCPFGEVFNATRFASVYAWNRKRISNCVADYSVLYNSASFSTFKCYGVSPTKLNDLCFTNVYADSFVIRGDEVRQIAPGQTGKIADYNYKLPDDFTGCVIAWNSNNLDSKVGGNYNYLYRLFRKSNLKPFERDISTEIYQAGSTPCNGVEGFNCYFPLQSYGFQPTNGVGYQPYRVVVLSFELLHAPATVCGPKKSTNLVKNKCVNFNFNGLTGTGVLTESNKKFLPFQQFGRDIADTTDAVRDPQTLEILDITPCSFGGVSVITPGTNTSNQVAVLYQGVNCTEVPVAIHADQLTPTWRVYSTGSNVFQTRAGCLIGAEHVNNSYECDIPIGAGICASYQTQTNSPRRARSVASQSIIAYTMSLGAENSVAYSNNSIAIPTNFTISVTTEILPVSMTKTSVDCTMYICGDSTECSNLLLQYGSFCTQLNRALTGIAVEQDKNTQEVFAQVKQIYKTPPIKDFGGFNFSQILPDPSKPSKRSFIEDLLFNKVTLADAGFIKQYGDCLGDIAARDLICAQKFNGLTVLPPLLTDEMIAQYTSALLAGTITSGWWFGAGAALQIPFAMQMAYRFNGIGVTQNVLYENQKLIANQFNSAIGKIQDSLFSTASALGKLQDVVNQNAQALNTLVKQLSSNFGAISSVLNDILSRLDPPEAEVQIDRLITGRLQSLQTYVTQQLIRAAEIRWSANLAATKMSECVLGQSKRVDFCGKGYHLMSFPQSAPHGVVFLHVTYVPAQEKNFTTAPAICHDGKAHFPREGVFVSNGTHWFVTQRNFYEPQIITTDNTFVSGNCDVVIGIVNNTVYDPLQPELDSGGSGYIPEAPRDGQAYVRKDGEWVLLSTFL

SEQ ID NO: 9820 - protein, 1177 aa, Artificial Sequence
  SARS-CoV-2/Finland/FIN-313/2020__EPI_ISL_414641 spike protein (1-1147)(K986P_V987P_T887W_A1020W) Foldon construct
MFVFLVLLPLVSSQCVNLTTRTQLPPAYTNSFTRGVYYPDKVFRSSVLHSTQDLFLPFFSNVTWFHAIHVSGTNGTKRFDNPVLPFNDGVYFASTEKSNIIRGWIFGTTLDSKTQSLLIVNNATNVVIKVCEFQFCNDPFLGVYYHKNNKSWMESEFRVYSSANNCTFEYVSQPFLMDLEGKQGNFKNLREFVFKNIDGYFKIYSKHTPINLVRDLPQGFSALEPLVDLPIGINITRFKTLLALHRSYLTPGDSSSGWTAGAAAYYVGYLQPRTFLLKYNENGTITDAVDCALDPLSETKCTLKSFTVEKGIYQTSNFRVQPTESIVRFPNITNLCPFGEVFNATRFASVYAWNRKRISNCVADYSVLYNSASFSTFKCYGVSPTKLNDLCFTNVYADSFVIRGDEVRQIAPGQTGKIADYNYKLPDDFTGCVIAWNSNNLDSKVGGNYNYLYRLFRKSNLKPFERDISTEIYQAGSTPCNGVEGFNCYFPLQSYGFQPTNGVGYQPYRVVVLSFELLHAPATVCGPKKSTNLVKNKCVNFNFNGLTGTGVLTESNKKFLPFQQFGRDIADTTDAVRDPQTLEILDITPCSFGGVSVITPGTNTSNQVAVLYQGVNCTEVPVAIHADQLTPTWRVYSTGSNVFQTRAGCLIGAEHVNNSYECDIPIGAGICASYQTQTNSPRRARSVASQSIIAYTMSLGAENSVAYSNNSIAIPTNFTISVTTEILPVSMTKTSVDCTMYICGDSTECSNLLLQYGSFCTQLNRALTGIAVEQDKNTQEVFAQVKQIYKTPPIKDFGGFNFSQILPDPSKPSKRSFIEDLLFNKVTLADAGFIKQYGDCLGDIAARDLICAQKFNGLTVLPPLLTDEMIAQYTSALLAGTITSGWWFGAGAALQIPFAMQMAYRFNGIGVTQNVLYENQKLIANQFNSAIGKIQDSLSSTASALGKLQDVVNQNAQALNTLVKQLSSNFGAISSVLNDILSRLDPPEAEVQIDRLITGRLQSLQTYVTQQLIRAAEIRWSANLAATKMSECVLGQSKRVDFCGKGYHLMSFPQSAPHGVVFLHVTYVPAQEKNFTTAPAICHDGKAHFPREGVFVSNGTHWFVTQRNFYEPQIITTDNTFVSGNCDVVIGIVNNTVYDPLQPELDSGGSGYIPEAPRDGQAYVRKDGEWVLLSTFL

SEQ ID NO: 9821 - protein, 1177 aa, Artificial Sequence
  SARS-CoV-2/Netherlands/ZuidHolland_2/2020__EPI_ISL_414556 spike protein (1-1147)(K986P_V987P_T887W_A1020W) Foldon construct
MFVFLVLLPLVSSQCVNLTTRTQLPPAYTNSFTRGVYYPDKVFRSSVLHSTQDLFLPFFSNVTWFHAIHVSGTNGTKRFDNPVLPFNDGVYFASTEKSNIIRGWIFGTTLDSKTQSLLIVNNATNVVIKVCEFQFCNDPFLGVYYHKNNKSWMESEFRVYSSANNCTFEYVSQPFLMDLEGKQGNFKNLREFVFKNIDGYFKIYSKHTPINLVRDLPQGFSALEPLVDLPIGINITRFQTLLALHRSYLTPGDSSSGWTAGAAAYYVGYLQPRTFLLKYNENGTITDAVDCALDPLSETKCTLKSFTVEKGIYQTSNFRVQPTESIVRFPNITNLCPFGEVFNATRFASVYAWNRKRISNCVADYSVLYNSASFSTFKCYGVSPTKLNDLCFTNVYADSFVIRGDEVRQIAPGQTGKIADYNYKLPDDFTGCVIAWNSNNLDSKVGGNYNYLYRLFRKSNLKPFERDISTEIYQAGSTPCNGVEGFNCYFPLQSYGFQPTNGVGYQPYRVVVLSFELLHAPATVCGPKKSTNLVKNKCVNFNFNGLTGTGVLTESNKKFLPFQQFGRDIADTTDAVRDPQTLEILDITPCSFGGVSVITPGTNTSNQVAVLYQGVNCTEVPVAIHADQLTPTWRVYSTGSNVFQTRAGCLIGAEHVNNSYECDIPIGAGICASYQTQTNSPRRARSVASQSIIAYTMSLGAENSVAYSNNSIAIPTNFTISVTTEILPVSMTKTSVDCTMYICGDSTECSNLLLQYGSFCTQLNRALTGIALEQDKNTQEVFAQVKQIYKTPPIKDFGGFNFSQILPDPSKPSKRSFIEDLLFNKVTLADAGFIKQYGDCLGDIAARDLICAQKFNGLTVLPPLLTDEMIAQYTSALLAGTITSGWWFGAGAALQIPFAMQMAYRFNGIGVTQNVLYENQKLIANQFNSAIGKIQDSLSSTASALGKLQDVVNQNAQALNTLVKQLSSNFGAISSVLNDILSRLDPPEAEVQIDRLITGRLQSLQTYVTQQLIRAAEIRWSANLAATKMSECVLGQSKRVDFCGKGYHLMSFPQSAPHGVVFLHVTYVPAQEKNFTTAPAICHDGKAHFPREGVFVSNGTHWFVTQRNFYEPQIITTDNTFVSGNCDVVIGIVNNTVYDPLQPELDSGGSGYIPEAPRDGQAYVRKDGEWVLLSTFL

SEQ ID NO: 9822 - protein, 1177 aa, Artificial Sequence
  SARS-CoV-2/USA/WA-UW31/2020__EPI_ISL_414618 spike protein (1-1147)(K986P_V987P_T887W_A1020W) Foldon construct
MFVFLVLLPLVSSQCVNLTTRTQLPPAYTNSFTRGVYYPDKVFRSSVLHSTQDLFLPFFSNVTWFHAIHVSGTNGTKRFDNPVLPFNDGVYFASTEKSNIIRGWIFGTTLDSKTQSLLIVNNATNVVIKVCEFQFCNDPFLGVYYHKNNKSWMESEFRVYSSANNCTFEYVSQPFLMDLEGKQGNFKNLREFVFKNIDGYFKIYSKHTPINLVRDLPQGFSALEPLVDLPIGINITRFQTLLALHRSYLTPGDSSSGWTAGAAAYYVGYLQPRTFLLKYNENGTITDAVDCALDPLSETKCTLKSFTVEKGIYQTSNFRVQPTESIVRFPNITNLCPFGEVFNATRFASVYAWNRKRISNCVADYSVLYNSASFSTFKCYGVSPTKLNDLCFTNVYADSFVIRGDEVRQIAPGQTGKIADYNYKLPDDFTGCVIAWNSNNLDSKVGGNYNYLYRLFRKSNLKPFERDISTEIYQAGSTPCNGAEGFNCYFPLQSYGFQPTNGVGYQPYRVVVLSFELLHAPATVCGPKKSTNLVKNKCVNFNFNGLTGTGVLTESNKKFLPFQQFGRDIADTTDAVRDPQTLEILDITPCSFGGVSVITPGTNTSNQVAVLYQDVNCTEVPVAIHADQLTPTWRVYSTGSNVFQTRAGCLIGAEHVNNSYECDIPIGAGICASYQTQTNSPRRARSVASQSIIAYTMSLGAENSVAYSNNSIAIPTNFTISVTTEILPVSMTKTSVDCTMYICGDSTECSNLLLQYGSFCTQLNRALTGIAVEQDKNTQEVFAQVKQIYKTPPIKDFGGFNFSQILPDPSKPSKRSFIEDLLFNKVTLADAGFIKQYGDCLGDIAARDLICAQKFNGLTVLPPLLTDEMIAQYTSALLAGTITSGWWFGAGAALQIPFAMQMAYRFNGIGVTQNVLYENQKLIANQFNSAIGKIQDSLSSTASALGKLQDVVNQNAQALNTLVKQLSSNFGAISSVLNDILSRLDPPEAEVQIDRLITGRLQSLQTYVTQQLIRAAEIRWSANLAATKMSECVLGQSKRVDFCGKGYHLMSFPQSAPHGVVFLHVTYVPAQEKNFTTAPAICHDGKAHFPREGVFVSNGTHWFVTQRNFYEPQIITTDNTFVSGNCDVVIGIVNNTVYDPLQPELDSGGSGYIPEAPRDGQAYVRKDGEWVLLSTFL

SEQ ID NO: 9823 - protein, 1177 aa, Artificial Sequence
  SARS-CoV-2/South Korea/SNU01/2020__EPI_ISL_411929 spike protein (1-1147)(K986P_V987P_T887W_A1020W) Foldon construct
MFVFLVLLPLVSSQCVNLTTRTQLPPAYTNSFTRGVYYPDKVFRSSVLHSTQDLFLPFFSNVTWFHAIHVSGTNGTKRFDNPVLPFNDGVYFASTEKSNIIRGWIFGTTLDSKTQSLLIVNNATNVVIKVCEFQFCNDPFLGVYYHKNNKSWMESEFRVYSSANNCTFEYVSQPFLMDLEGKQGNFKNLREFVFKNIDGYFKIYSKHTPINLVRDLPQGFWALEPLVDLPIGINITRFQTLLALHRSYLTPGDSSSGWTAGAAAYYVGYLQPRTFLLKYNENGTITDAVDCALDPLSETKCTLKSFTVEKGIYQTSNFRVQPTESIVRFPNITNLCPFGEVFNATRFASVYAWNRKRISNCVADYSVLYNSASFSTFKCYGVSPTKLNDLCFTNVYADSFVIRGDEVRQIAPGQTGKIADYNYKLPDDFTGCVIAWNSNNLDSKVGGNYNYLYRLFRKSNLKPFERDISTEIYQAGSTPCNGVEGFNCYFPLQSYGFQPTNGVGYQPYRVVVLSFELLHAPATVCGPKKSTNLVKNKCVNFNFNGLTGTGVLTESNKKFLPFQQFGRDIADTTDAVRDPQTLEILDITPCSFGGVSVITPGTNTSNQVAVLYQDVNCTEVPVAIHADQLTPTWRVYSTGSNVFQTRAGCLIGAEHVNNSYECDIPIGAGICASYQTQTNSPRRARSVASQSIIAYTMSLGAENSVAYSNNSIAIPTNFTISVTTEILPVSMTKTSVDCTMYICGDSTECSNLLLQYGSFCTQLNRALTGIAVEQDKNTQEVFAQVKQIYKTPPIKDFGGFNFSQILPDPSKPSKRSFIEDLLFNKVTLADAGFIKQYGDCLGDIAARDLICAQKFNGLTVLPPLLTDEMIAQYTSALLAGTITSGWWFGAGAALQIPFAMQMAYRFNGIGVTQNVLYENQKLIANQFNSAIGKIQDSLSSTASALGKLQDVVNQNAQALNTLVKQLSSNFGAISSVLNDILSRLDPPEAEVQIDRLITGRLQSLQTYVTQQLIRAAEIRWSANLAATKMSECVLGQSKRVDFCGKGYHLMSFPQSAPHGVVFLHVTYVPAQEKNFTTAPAICHDGKAHFPREGVFVSNGTHWFVTQRNFYEPQIITTDNTFVSGNCDVVIGIVNNTVYDPLQPELDSGGSGYIPEAPRDGQAYVRKDGEWVLLSTFL

SEQ ID NO: 9824 - protein, 1177 aa, Artificial Sequence
  SARS-CoV-2/China/WF0004/2020__EPI_ISL_413694 spike protein (1-1147)(K986P_V987P_T887W_A1020W) Foldon construct
MFVFLVLLPLVSSQCVNLTTRTQLPPAYTNSFTRGVYYPDKVFRSSVLHSTQDLFLPFFSNVTWFHAIHVSGTNGTKRFDNPVLPFNDGVYFASTEKSNIIRGWIFGTTLDSKTQSLLIVNNATNVVIKVCEFQFCNDPFLGVYYHKNNKSWTESEFRVYSSANNCTFEYVSQPFLMDLEGKQGNFKNLREFVFKNIDGYFKIYSKHTPINLVRDLPQGFSALEPLVDLPIGINITRFQTLLALHRSYLTPGDSSSGWTAGAAAYYVGYLQPRTFLLKYNENGTITDAVDCALDPLSETKCTLKSFTVEKGIYQTSNFRVQPTESIVRFPNITNLCPFGEVFNATRFASVYAWNRKRISNCVADYSVLYNSASFSTFKCYGVSPTKLNDLCFTNVYADSFVIRGDEVRQIAPGQTGKIADYNYKLPDDFTGCVIAWNSNNLDSKVGGNYNYLYRLFRKSNLKPFERDISTEIYQAGSTPCNGVEGFNCYFPLQSYGFQPTNGVGYQPYRVVVLSFELLHAPATVCGPKKSTNLVKNKCVNFNFNGLTGTGVLTESNKKFLPFQQFGRDIADTTDAVRDPQTLEILDITPCSFGGVSVITPGTNTSNQVAVLYQDVNCTEVPVAIHADQLTPTWRVYSTGSNVFQTRAGCLIGAEHVNNSYECDIPIGAGICASYQTQTNSPRRARSVASQSIIAYTMSLGAENSVAYSNNSIAIPTNFTISVTTEILPVSMTKTSVDCTMYICGDSTECSNLLLQYGSFCTQLNRALTGIAVEQDKNTQEVFAQVKQIYKTPPIKDFGGFNFSQILPDPSKPSKRSFIEDLLFNKVTLADAGFIKQYGDCLGDIAARDLICAQKFNGLTVLPPLLTDEMIAQYTSALLAGTITSGWWFGAGAALQIPFAMQMAYRFNGIGVTQNVLYENQKLIANQFNSAIGKIQDSLSSTASALGKLQDVVNQNAQALNTLVKQLSSNFGAISSVLNDILSRLDPPEAEVQIDRLITGRLQSLQTYVTQQLIRAAEIRWSANLAATKMSECVLGQSKRFDFCGKGYHLMSFPQSAPHGVVFLHVTYVPAQEKNFTTAPAICHDGKAHFPREGVFVSNGTHWFVTQRNFYEPQIITTDNTFVSGNCDVVIGIVNNTVYDPLQPELDSGGSGYIPEAPRDGQAYVRKDGEWVLLSTFL

SEQ ID NO: 9825 - protein, 1177 aa, Artificial Sequence
  SARS-CoV-2/China/WF0028/2020__EPI_ISL_413791 spike protein (1-1147)(K986P_V987P_T887W_A1020W) Foldon construct
MFVFLVLLPLVSSQCVNLTTRTQLPPAYTNSFTRGVYYPDKVFRSSVLHSTQDLFLPFFSNVTWFHAIHVSGTNGTKRFDNPVLPFNDGVYFASTEKSNIIRGWIFGTTLDSKTQSLLIVNNATNVVIKVCEFQFCNDPFLGVYYHKNNKSWMESEFRVYSSANNCTFEYVSQPFLMDLEGKQGNFKNLREFVFKNIDGYFKIYSKHTPINLVRDLPQGFSALEPLVDLPIGINITRFQTLLALHRSYLTPGDSSSGWTAGAAAYYVGYLQPRTFLLKYNENGTITDAVDCALDPLSETKCTLKSFTVEKGIYQTSNFRVQPTESIVRFPNITNLCPFGEVFNATRFASVYAWNRKRISNCVADYSVLYNSASFSTFKCYGVSPTKLNDLCFTNVYADSFVIRGDEVRQIAPGQTGKIADYNYKLPDDFTGCVIAWNSNNLDSKVGGNYNYLYRLFRKSNLKPFERDISTEIYQAGSTPCNGVEGFNCYFPLQSYGFQPTNGVGYQPYRVVVLSFELLHAPATVCGPKKSTNLVKNKCVNFNFNGLTGTGVLTESNKKFLPFQQFGRDIADTTDAVRDPQTLEILDITPCSFGGVSVITPGTNTSNQVAVLYQDVNCTEVPVAIHADQLTPTWRVYSTGSNVFQTRAGCLIGAEHVNNSYECDIPIGAGICASYQTQTNSPRRARSVASQSIIAYTMSLGAENSVAYSNNSIAIPTNFTISVTTEILPVSMTKTSVDCTMYICGDSTECSNLLLQYGSFCTQLNRALTGIAVEQDKNTQEVFAQVKQIYKTPPIKDFGGFNFSQILPDPSKPSKRSFIEDLLFNKVTLADAGFIKQYGDCLGDIAARDLICAQKFNGLTVLPPLLTDEMIAQYTSALLAGTITSGWWFGAGAALQIPFAMQMAYRFNGIGVTQNVLYENQKLIANQFNSAIGKIQDSLSSTASALGKLQDVVNQNAQALNTLVKQLSSNFGAISSVLNDILSRLDPPEAEVQIDRLITGRLQSLQTYVTQQLIRAAEIRWSANLAATKMSECVLGQSKRVDFCGKGYHLMSFPQSAPHGVVFLHVTYVPAQEKNFTTAPAICHDGKAHFPREGVFVSNGTHWFVTQRNFYEPQIITTDNTFVSGNCDVVIGIVNNTVYDPLQPELESGGSGYIPEAPRDGQAYVRKDGEWVLLSTFL

SEQ ID NO: 9826 - protein, 1177 aa, Artificial Sequence
  SARS-CoV-2/2019-nCoV/USA-CruiseA-18/2020__MT159716.1 spike protein (1-1147)(K986P_V987P_T887W_A1020W) Foldon construct
MFVFLVLLPLVSSQCVNLTTRTQLPPAYTNSFTRGVYYPDKVFRSSVLHSTQDLFLPFFSNVTWFHAIHVSGTNGTKRFDNPVLPFNDGVYFASTEKSNIIRGWIFGTTLDSKTQSLLIVNNATNVVIKVCEFQFCNDPFLGVYYHKNNKSWMESELRVYSSANNCTFEYVSQPFLMDLEGKQGNFKNLREFVFKNIDGYFKIYSKHTPINLVRDLPQGFSALEPLVDLPIGINITRFQTLLALHRSYLTPGDSSSGWTAGAAAYYVGYLQPRTFLLKYNENGTITDAVDCALDPLSETKCTLKSFTVEKGIYQTSNFRVQPTESIVRFPNITNLCPFGEVFNATRFASVYAWNRKRISNCVADYSVLYNSASFSTFKCYGVSPTKLNDLCFTNVYADSFVIRGDEVRQIAPGQTGKIADYNYKLPDDFTGCVIAWNSNNLDSKVGGNYNYLYRLFRKSNLKPFERDISTEIYQAGSTPCNGVEGFNCYFPLQSYGFQPTNGVGYQPYRVVVLSFELLHAPATVCGPKKSTNLVKNKCVNFNFNGLTGTGVLTESNKKFLPFQQFGRDIADTTDAVRDPQTLEILDITPCSFGGVSVITPGTNTSNQVAVLYQDVNCTEVPVAIHADQLTPTWRVYSTGSNVFQTRAGCLIGAEHVNNSYECDIPIGAGICASYQTQTNSPRRARSVASQSIIAYTMSLGAENSVAYSNNSIAIPTNFTISVTTEILPVSMTKTSVDCTMYICGDSTECSNLLLQYGSFCTQLNRALTGIAVEQDKNTQEVFAQVKQIYKTPPIKDFGGFNFSQILPDPSKPSKRSFIEDLLFNKVTLADAGFIKQYGDCLGDIAARDLICAQKFNGLTVLPPLLTDEMIAQYTSALLAGTITSGWWFGAGAALQIPFAMQMAYRFNGIGVTQNVLYENQKLIANQFNSAIGKIQDSLSSTASALGKLQDVVNQNAQALNTLVKQLSSNFGAISSVLNDILSRLDPPEAEVQIDRLITGRLQSLQTYVTQQLIRAAEIRWSANLAATKMSECVLGQSKRVDFCGKGYHLMSFPQSAPHGVVFLHVTYVPAQEKNFTTAPAICHDGKAHFPREGVFVSNGTHWFVTQRNFYEPQIITTDNTFVSGNCDVVIGIVNNTVYDPLQPELDSGGSGYIPEAPRDGQAYVRKDGEWVLLSTFL

SEQ ID NO: 9827 - protein, 1177 aa, Artificial Sequence
  SARS-CoV-2/SARS-CoV-2/Yunnan-01/human/2020/CHN__MT049951.1 spike protein (1-1147)(K986P_V987P_T887W_A1020W) Foldon construct
MFVFLVLLPLVSSQCVNLTTRTQLPPANTNSFTRGVYYPDKVFRSSVLHSTQDLFLPFFSNVTWFHAIHVSGTNGTKRFDNPVLPFNDGVYFASTEKSNIIRGWIFGTTLDSKTQSLLIVNNATNVVIKVCEFQFCNDPFLGVYYHKNNKSWMESEFRVYSSANNCTFEYVSQPFLMDLEGKQGNFKNLREFVFKNIDGYFKIYSKHTPINLVRDLPQGFSALEPLVDLPIGINITRFQTLLALHRSYLTPGDSSSGWTAGAAAYYVGYLQPRTFLLKYNENGTITDAVDCALDPLSETKCTLKSFTVEKGIYQTSNFRVQPTESIVRFPNITNLCPFGEVFNATRFASVYAWNRKRISNCVADYSVLYNSASFSTFKCYGVSPTKLNDLCFTNVYADSFVIRGDEVRQIAPGQTGKIADYNYKLPDDFTGCVIAWNSNNLDSKVGGNYNYLYRLFRKSNLKPFERDISTEIYQAGSTPCNGVEGFNCYFPLQSYGFQPTNGVGYQPYRVVVLSFELLHAPATVCGPKKSTNLVKNKCVNFNFNGLTGTGVLTESNKKFLPFQQFGRDIADTTDAVRDPQTLEILDITPCSFGGVSVITPGTNTSNQVAVLYQDVNCTEVPVAIHADQLTPTWRVYSTGSNVFQTRAGCLIGAEHVNNSYECDIPIGAGICASYQTQTNSPRRARSVASQSIIAYTMSLGAENSVAYSNNSIAIPTNFTISVTTEILPVSMTKTSVDCTMYICGDSTECSNLLLQYGSFCTQLNRALTGIAVEQDKNTQEVFAQVKQIYKTPPIKDFGGFNFSQILPDPSKPSKRSFIEDLLFNKVTLADAGFIKQYGDCLGDIAARDLICAQKFNGLTVLPPLLTDEMIAQYTSALLAGTITSGWWFGAGAALQIPFAMQMAYRFNGIGVTQNVLYENQKLIANQFNSAIGKIQDSLSSTASALGKLQDVVNQNAQALNTLVKQLSSNFGAISSVLNDILSRLDPPEAEVQIDRLITGRLQSLQTYVTQQLIRAAEIRWSANLAATKMSECVLGQSKRVDFCGKGYHLMSFPQSAPHGVVFLHVTYVPAQEKNFTTAPAICHDGKAHFPREGVFVSNGTHWFVTQRNFYEPQIITTDNTFVSGNCDVVIGIVNNTVYDPLQPELDSGGSGYIPEAPRDGQAYVRKDGEWVLLSTFL

SEQ ID NO: 9828 - protein, 1177 aa, Artificial Sequence
  SARS-CoV-2/USA/WA-UW292/2020__EPI_ISL_418077 spike protein (1-1147)(K986P_V987P_T887W_A1020W) Foldon construct
MFVFLVLLPLVSSQCVNLTTRTQLPPAYTNSFTRGVYYPDKVFRSSVLHSTQDLFLPFFSNVTWFHAIHVSGTNGTKRFDNPVLPFNDGVYFASTEKSNIIRGWIFGTTLDSKTQSLLIVNNATNVVIKVCEFQFCNDPFLGVYYHKNNKSWMESEFRVYSSANNCTFEYVSQPFLMDLEGKQGNFKNLREFVFKNIDGYFKIYSKHTPINLVRDLPQGFSALEPLVDLPIGINITRFQTLLALHRSYLTPGDSSSGWTAGAAAYYVGYLQPRTFLLKYNENGTITDAVDCALDPLSETKCTLKSFTVEKGIYQTSNFRVQPTESIVRFPNITNLCPFGEVFNATRFASVYAWNRKRISNCVADYSVLYNSASFSTFKCYGVSPTKLNDLCFTNVYADSFVIRGDEVRQIAPGQTGKIADYNYKLPDDFTGCVIAWNSNNLDSKVGGNYNYLYRLFRKSNLKPFERDISTEIYQASSTPCNGVEGFNCYFPLQSYGFQPTNGVGYQPYRVVVLSFELLHAPATVCGPKKSTNLVKNKCVNFNFNGLTGTGVLTESNKKFLPFQQFGRDIADTTDAVRDPQTLEILDITPCSFGGVSVITPGTNTSNQVAVLYQDVNCTEVPVAIHADQLTPTWRVYSTGSNVFQTRAGCLIGAEHVNNSYECDIPIGAGICASYQTQTNSPRRARSVASQSIIAYTMSLGAENSVAYSNNSIAIPTNFTISVTTEILPVSMTKTSVDCTMYICGDSTECSNLLLQYGSFCTQLNRALTGIAVEQDKNTQEVFAQVKQIYKTPPIKDFGGFNFSQILPDPSKPSKRSFIEDLLFNKVTLADAGFIKQYGDCLGDIAARDLICAQKFNGLTVLPPLLTDEMIAQYTSALLAGTITSGWWFGAGAALQIPFAMQMAYRFNGIGVTQNVLYENQKLIANQFNSAIGKIQDSLSSTASALGKLQDVVNQNAQALNTLVKQLSSNFGAISSVLNDILSRLDPPEAEVQIDRLITGRLQSLQTYVTQQLIRAAEIRWSANLAATKMSECVLGQSKRVDFCGKGYHLMSFPQSAPHGVVFLHVTYVPAQEKNFTTAPAICHDGKAHFPREGVFVSNGTHWFVTQRNFYEPQIITTDNTFVSGNCDVVIGIVNNTVYDPLQPELDSGGSGYIPEAPRDGQAYVRKDGEWVLLSTFL

SEQ ID NO: 9829 - protein, 1177 aa, Artificial Sequence
  SARS-CoV-2/Iceland/192/2020__EPI_ISL_417819 spike protein (1-1147)(K986P_V987P_T887W_A1020W) Foldon construct
MFVFFVLLPLVSSQCVNLTTRTQLPPAYTNSFTRGVYYPDKVFRSSVLHSTQDLFLPFFSNVTWFHAIHVSGTNGTKRFDNPVLPFNDGVYFASTEKSNIIRGWIFGTTLDSKTQSLLIVNNATNVVIKVCEFQFCNDPFLGVYYHKNNKSWMESEFRVYSSANNCTFEYVSQPFLMDLEGKQGNFKNLREFVFKNIDGYFKIYSKHTPINLVRDLPQGFSALEPLVDLPIGINITRFQTLLALHRSYLTPGDSSSGWTAGAAAYYVGYLQPRTFLLKYNENGTITDAVDCALDPLSETKCTLKSFTVEKGIYQTSNFRVQPTESIVRFPNITNLCPFGEVFNATRFASVYAWNRKRISNCVADYSVLYNSASFSTFKCYGVSPTKLNDLCFTNVYADSFVIRGDEVRQIAPGQTGKIADYNYKLPDDFTGCVIAWNSNNLDSKVGGNYNYLYRLFRKSNLKPFERDISTEIYQAGSTPCNGVEGFNCYFPLQSYGFQPTNGVGYQPYRVVVLSFELLHAPATVCGPKKSTNLVKNKCVNFNFNGLTGTGVLTESNKKFLPFQQFGRDIADTTDAVRDPQTLEILDITPCSFGGVSVITPGTNTSNQVAVLYQGVNCTEVPVAIHADQLTPTWRVYSTGSNVFQTRAGCLIGAEHVNNSYECDIPIGAGICASYQTQTNSPRRARSVASQSIIAYTMSLGAENSVAYSNNSIAIPTNFTISVTTEILPVSMTKTSVDCTMYICGDSTECSNLLLQYGSFCTQLNRALTGIAVEQDKNTQEVFAQVKQIYKTPPIKDFGGFNFSQILPDPSKPSKRSFIEDLLFNKVTLADAGFIKQYGDCLGDIAARDLICAQKFNGLTVLPPLLTDEMIAQYTSALLAGTITSGWWFGAGAALQIPFAMQMAYRFNGIGVTQNVLYENQKLIANQFNSAIGKIQDSLSSTASALGKLQDVVNQNAQALNTLVKQLSSNFGAISSVLNDILSRLDPPEAEVQIDRLITGRLQSLQTYVTQQLIRAAEIRWSANLAATKMSECVLGQSKRVDFCGKGYHLMSFPQSAPHGVVFLHVTYVPAQEKNFTTAPAICHDGKAHFPREGVFVSNGTHWFVTQRNFYEPQIITTDNTFVSGNCDVVIGIVNNTVYDPLQPELDSGGSGYIPEAPRDGQAYVRKDGEWVLLSTFL

SEQ ID NO: 9830 - protein, 1177 aa, Artificial Sequence
  SARS-CoV-2/Belgium/ULG-6939/2020__EPI_ISL_417020 spike protein (1-1147)(K986P_V987P_T887W_A1020W) Foldon construct
MFVFLVLLPLVSSQCVNLTTRTQLPPAYTNSFTRGVYYPDKVFRSSVLHSTQDLFLPFFSNVTWFHAIHVSGTNGTKRFDNPVLPFNDGVYFASTEKSNIIRGWIFGTTLDSKTQSLLIVNNATNVVIKVCEFQFCNDPFLGVYYHKNNKSWMESEFRVYSSANNCTFEYVSQPFLMDLEGKQGNFKNLREFVFKNIDGYFKIYSKHTPINLVRDLPQGFSALEPLVDLPIGINITRFQTLLALHRSYLTPGDSSSGWTAGAAAYYVGYLQPRTFLLKYNENGTITDAVDCALDPLSETKCTLKSFTVEKGIYQTSNFRVQPTESIVRFPNITNLCPFGEVFNATRFASVYAWNRKRISNCVADYSVLYNSASFSTFKCYGVSPTKLNDLCFTNVYADSFVIRGDEVRQIAPGQTGKIADYNYKLPDDFTGCVIAWNSNNLDSKVGGNYNYLYRLFRKSNLKPFERDISTEIYQAGSTPCNGVEGFNCYFPLQSYGFQPTNGVGYQPYRVVVLSFELLHAPATVCGPKKSTNLVKNKCVNFNFNGLTGTGVLTESNKKFLPFQQFGRDIADTTDAVRDPQTLEILDITPCSFGGVSVITPGTNTSNQVAVLYQGVNCTEVPVAIHADQLTPTWRVYSTGSNVFQTRAGCLIGAEHVNNSYECDIPIGAGICASYQTQTNSPRRARSVASQSIIAYTMSLGAENSVVYSNNSIAIPTNFTISVTTEILPVSMTKTSVDCTMYICGDSTECSNLLLQYGSFCTQLNRALTGIAVEQDKNTQEVFAQVKQIYKTPPIKDFGGFNFSQILPDPSKPSKRSFIEDLLFNKVTLADAGFIKQYGDCLGDIAARDLICAQKFNGLTVLPPLLTDEMIAQYTSALLAGTITSGWWFGAGAALQIPFAMQMAYRFNGIGVTQNVLYENQKLIANQFNSAIGKIQDSLSSTASALGKLQDVVNQNAQALNTLVKQLSSNFGAISSVLNDILSRLDPPEAEVQIDRLITGRLQSLQTYVTQQLIRAAEIRWSANLAATKMSECVLGQSKRVDFCGKGYHLMSFPQSAPHGVVFLHVTYVPAQEKNFTTAPAICHDGKAHFPREGVFVSNGTHWFVTQRNFYEPQIITTDNTFVSGNCDVVIGIVNNTVYDPLQPELDSGGSGYIPEAPRDGQAYVRKDGEWVLLSTFL

SEQ ID NO: 9831 - protein, 1177 aa, Artificial Sequence
  SARS-CoV-2/France/HF2496/2020__EPI_ISL_418231 spike protein (1-1147)(K986P_V987P_T887W_A1020W) Foldon construct
MFVFLVLLPLVSSQCVNLTTRTQLPPAYTNSFTRGVYYPDKVFRSSVLHSTQDLFLPFFSNVTWFHAIHVSGTNGTKRFDNPVLPFNDGVYFASTEKSNIIRGWIFGTTLDSKTQSLLIVNNATNVVIKVCEFQFCNDPFLGVYYHKNNKSWMESEFRVYSSANNCTFEYVSQPFLMDLEGKQGNFKNLREFVFKNIDGYFKIYSKHTPINLVRDLPQGFSALEPLVDLPIGINITRFQTLLALHRSYLTPGDSSSGWTAGAAAYYVGYLQPRTFLLKYNENGTITDAVDCALDPLSETKCTLKSFTVEKGIYQTSNFRVQPTESIVRFPNITNLCPFGEVFNATRFASVYAWNRKRISNCVADYSVLYNSASFSTFKCYGVSPTKLNDLCFTNVYADSFVIRGDEVRQIAPGQTGKIADYNYKLPDDFTGCVIAWNSNNLDSKVGGNYNYLYRLFRKSNLKPFERDISTEIYQAGSTPCNGVEGFNCYFPLQSYGFQPTNGVGYQPYRVVVLSFELLHAPATVCGPKKSTNLVKNKCVNFNFNGLTGTGVLTESNKKFLPFQQFGRDIADTTDAVRDPQTLEILDITPCSFGGVSVITPGTNTSNQVAVLYQGVNCTEVPVAIHADQLTPTWRVYSTGSNVFQTRAGCLIGAEHVNNSYECDIPIGAGICASYQTQTNSPRRARSVASQSIIAYTMSLGAENSVAYSNNSIAIPTNFTISVTTEILPVSMTKTSVDCTMYICGDSTECSNLLLQYGSFCTQLNRALTGIAVEQDKNTQEVFAQVKQIYKTPPIKDFGGFNFSQILPDPSKPSKRSFIEDLLFNKVTLADAGFIKQYGDCLGDIVARDLICAQKFNGLTVLPPLLTDEMIAQYTSALLAGTITSGWWFGAGAALQIPFAMQMAYRFNGIGVTQNVLYENQKLIANQFNSAIGKIQDSLSSTASALGKLQDVVNQNAQALNTLVKQLSSNFGAISSVLNDILSRLDPPEAEVQIDRLITGRLQSLQTYVTQQLIRAAEIRWSANLAATKMSECVLGQSKRVDFCGKGYHLMSFPQSAPHGVVFLHVTYVPAQEKNFTTAPAICHDGKAHFPREGVFVSNGTHWFVTQRNFYEPQIITTDNTFVSGNCDVVIGIVNNTVYDPLQPELDSGGSGYIPEAPRDGQAYVRKDGEWVLLSTFL

SEQ ID NO: 9832 - protein, 1177 aa, Artificial Sequence
  SARS-CoV-2/USA/WA-UW291/2020__EPI_ISL_418076 spike protein (1-1147)(K986P_V987P_T887W_A1020W) Foldon construct
MFVFLVLLPLVSSQCVNLTTRTQLPPAYTNSFTRGVYYPDKVFRSSVLHSTQDLFLPFFSNVTWFHAIHVSGTNGTKRFDNPVLPFNDGVYFASTEKSNIIRGWIFGTTLDSKTQSLLIVNNATNVVIKVCEFQFCNDPFLGVYYHKNNKSWMESEFRVYSSANNCTFEYVSQPFLMDLEGKQGNFKNLREFVFKNIDGYFKIYSKHTPINLVRDLPQGFSALEPLVDLPIGINITRFQTLLALHRSYLTPGDSSSGWTAGAAAYYVGYLQPRTFLLKYNENGTITDAVDCALDPLSETKCTLKSFTVEKGIYQTSNFRVQPTESIVRFPNITNLCPFGEVFNATRFASVYAWNRKRISNCVADYSVLYNSASFSTFKCYGVSPTKLNDLCFTNVYADSFVIRGDEVRQIAPGQTGKIADYNYKLPDDFTGCVIAWNSNNLDSKVGGNYNYLYRLFRKSNLKPFERDISTEIYQAGSTPCNGVEGFNCYFPLQSYGFQPTNGVGYQPYRVVVLSFELLHAPATVCGPKKSTNLVKNKCVNFNFNGLTGTGVLTESNKKFLPFQQFGRDIADTTDAVRDPQTLEILDITPCSFGGVSVITPGTNTSNQVAVLYQGVNCTEVPVAIHADQLTPTWRVYSTGSNVFQTRAGCLIGAEHVNNSYECDIPIGAGICASYQTQTNSPRRARSVASQSIIAYTMSLGAENSVAYSNNSIAIPTNFTISVTTEILPVSMTKTSVDCTMYICGDSTECSNLLLQYGSFCTQLNRALTGIAVEQDKNTQEVFAQVKQIYKTPPIKDFGGFNFSQILPDPSKPSKRSFIEDLLFNKVTLADAGFIKQYGDCLGDIAARDLICAQKFNGLTVLPPLLTDEMIAQYTSALLAGTITSGWWFGAGAALQIPFAMQMAYRFNGIGVTQNVLYENQKLIANQFNSAIGKIQYSLSSTASALGKLQDVVNQNAQALNTLVKQLSSNFGAISSVLNDILSRLDPPEAEVQIDRLITGRLQSLQTYVTQQLIRAAEIRWSANLAATKMSECVLGQSKRVDFCGKGYHLMSFPQSAPHGVVFLHVTYVPAQEKNFTTAPAICHDGKAHFPREGVFVSNGTHWFVTQRNFYEPQIITTDNTFVSGNCDVVIGIVNNTVYDPLQPELDSGGSGYIPEAPRDGQAYVRKDGEWVLLSTFL

SEQ ID NO: 9833 - protein, 1177 aa, Artificial Sequence; identical to SEQ ID NO: 9796
  SARS-CoV-2/Portugal/PT0034/2020__EPI_ISL_418019 spike protein (1-1147)(K986P_V987P_T887W_A1020W) Foldon construct

SEQ ID NO: 9834 - protein, 1177 aa, Artificial Sequence; identical to SEQ ID NO: 9788
  SARS-CoV-2/Iceland/202/2020__EPI_ISL_417750 spike protein (1-1147)(K986P_V987P_T887W_A1020W) Foldon construct

SEQ ID NO: 9835 - protein, 1177 aa, Artificial Sequence
  SARS-CoV-2/USA/WA-UW261/2020__EPI_ISL_418046 spike protein (1-1147)(K986P_V987P_T887W_A1020W) Foldon construct
MFVFLVLLPLVSSQCVNLTTRTQLPPAYTNSFTRGVYYPDKVFRSSVLHSTQDLFLPFFSNVTWFHAIHVSGTNGTKRFDNPVLPFNDGVYFASTEKSNIIRGWIFGTTLDSKTQSLLIVNNATNVVIKVCEFQFCNDPFLGVYYHKNNKSWMESEFRVYSSANNCTFEYVSQPFLMDLEGKQGNFKNLREFVFKNIDGYFKIYSKHTPINLVRDLPQGFSALEPLVDLPIGINITRFQTLLALHRSYLTPGDSSSGWTAGAAAYYVGYLQPRTFLLKYNENGTITDAVDCALDPLSETKCTLKSFTVEKGIYQTSNFRVQPTESIVRFPNITNLCPFGEVFNATRFTSVYAWNRKRISNCVADYSVLYNSASFSTFKCYGVSPTKLNDLCFTNVYADSFVIRGDEVRQIAPGQTGKIADYNYKLPDDFTGCVIAWNSNNLDSKVGGNYNYLYRLFRKSNLKPFERDISTEIYQAGSTPCNGVEGFNCYFPLQSYGFQPTNGVGYQPYRVVVLSFELLHAPATVCGPKKSTNLVKNKCVNFNFNGLTGTGVLTESNKKFLPFQQFGRDIADTTDAVRDPQTLEILDITPCSFGGVSVITPGTNTSNQVAVLYQDVNCTEVPVAIHADQLTPTWRVYSTGSNVFQTRAGCLIGAEHVNNSYECDIPIGAGICASYQTQTNSPRRARSVASQSIIAYTMSLGAENSVAYSNNSIAIPTNFTISVTTEILPVSMTKTSVDCTMYICGDSTECSNLLLQYGSFCTQLNRALTGIAVEQDKNTQEVFAQVKQIYKTPPIKDFGGFNFSQILPDPSKPSKRSFIEDLLFNKVTLADAGFIKQYGDCLGDIAARDLICAQKFNGLTVLPPLLTDEMIAQYTSALLAGTITSGWWFGAGAALQIPFAMQMAYRFNGIGVTQNVLYENQKLIANQFNSAIGKIQDSLSSTASALGKLQDVVNQNAQALNTLVKQLSSNFGAISSVLNDILSRLDPPEAEVQIDRLITGRLQSLQTYVTQQLIRAAEIRWSANLAATKMSECVLGQSKRVDFCGKGYHLMSFPQSAPHGVVFLHVTYVPAQEKNFTTAPAICHDGKAHFPREGVFVSNGTHWFVTQRNFYEPQIITTDNTFVSGNCDVVIGIVNNTVYDPLQPELDSGGSGYIPEAPRDGQAYVRKDGEWVLLSTFL

SEQ ID NO: 9836 - protein, 1177 aa, Artificial Sequence
  SARS-CoV-2/Portugal/PT0035/2020__EPI_ISL_418020 spike protein (1-1147)(K986P_V987P_T887W_A1020W) Foldon construct
MFVFLVLLPLVSSQCVNLTTRTQLPPAYTNSFTRGVYYPDKVFRSSVLHSTQDLFLPFFSNVTWFHAIHVSGTNGTKRFDNPVLPFNDGVYFASTEKSNIIRGWIFGTTLDSKTQSLLIVNNATNVVIKVCEFQFCNDPFLGVYYHKNNKSWMESEFRVYSSANNCTFEYVSQPFLMDLEGKQGNFKNLREFVFKNIDGYFKIYSKHTPINLVRDLPQGFSALEPLVDLPIGINITRFQTLLALHRSYLTPGDSSSGWTAGAAAYYVGYLQPRTFLLKYNENGTITDAVDCALDPLSETKCTLKSFTVEKGIYQTSNFRVQPTESIVRFPNITNLCPFGEVFNATRFASVYAWNRKRISNCVADYSVLYNSASFSTFKCYGVSPTKLNDLCFTNVYADSFVIRGDEVRQIAPGQTGKIADYNYKLPDDFTGCVIAWNSNNLDSKVGGNYNYLYRLFRKSNLKPFERDISTEIYQAGSTPCNGVEGFNCYFPLQSYGFQPTNGVGYQPYRVVVLSFELLHAPATVCGPKKSTNLVKNKCVNFNFNGLTGTGVLTESNKKFLPFQQFGRDIADTTDAVRDPQTLEILDITPCSFGGVSVITPGTNTSNQVAVLYQDVNCTEVPVAIHADQLTPTWRVYSTGSNVFQTRAGCLIGAEHVNNSYECDIPIGAGICASYQTQTNSPRRARSVASQSIIAYTMSLGAENSVAYSNNSIAIPTNFTISVTTEILPVSMTKTSVDCTMYICGDSTECSNLLLQYGSFCTQLNRALTGIAVEQDKNTQEVFAQVKQIYKTPPIKDFGGFNFSQILPDPSKPSKRSFIEDLLFNKVTLADAGFIKQYGDCLGDISARDLICAQKFNGLTVLPPLLTDEMIAQYTSALLAGTITSGWWFGAGAALQIPFAMQMAYRFNGIGVTQNVLYENQKLIANQFNSAIGKIQDSLSSTASALGKLQDVVNQNAQALNTLVKQLSSNFGAISSVLNDILSRLDPPEAEVQIDRLITGRLQSLQTYVTQQLIRAAEIRWSANLAATKMSECVLGQSKRVDFCGKGYHLMSFPQSAPHGVVFLHVTYVPAQEKNFTTAPAICHDGKAHFPREGVFVSNGTHWFVTQRNFYEPQIITTDNTFVSGNCDVVIGIVNNTVYDPLQPELDSGGSGYIPEAPRDGQAYVRKDGEWVLLSTFL

SEQ ID NO: 9837 - protein, 1177 aa, Artificial Sequence
  SARS-CoV-2/USA/NY-NYUMC7/2020__EPI_ISL_418192 spike protein (1-1147)(K986P_V987P_T887W_A1020W) Foldon construct
MFVFLVLLPLVSSQCVNLTTRTQLPPAYTNSFTRGVYYPDKVFRSSVLHSTQDLFLPFFSNVTWFHAIHVSGTNGTKRFDNPVLPFNDGVYFASTEKSNIIRGWIFGTTLDSKTQSLLIVNNATNVVIKVCEFQFCNDPFLGVYHHKNNKSWMESEFRVYSSANNCTFEYVSQPFLMDLEGKQGNFKNLREFVFKNIDGYFKIYSKHTPINLVRDLPQGFSALEPLVDLPIGINITRFQTLLALHRSYLTPGDSSSGWTAGAAAYYVGYLQPRTFLLKYNENGTITDAVDCALDPLSETKCTLKSFTVEKGIYQTSNFRVQPTESIVRFPNITNLCPFGEVFNATRFASVYAWNRKRISNCVADYSVLYNSASFSTFKCYGVSPTKLNDLCFTNVYADSFVIRGDEVRQIAPGQTGKIADYNYKLPDDFTGCVIAWNSNNLDSKVGGNYNYLYRLFRKSNLKPFERDISTEIYQAGSTPCNGVEGFNCYFPLQSYGFQPTNGVGYQPYRVVVLSFELLHAPATVCGPKKSTNLVKNKCVNFNFNGLTGTGVLTESNKKFLPFQQFGRDIADTTDAVRDPQTLEILDITPCSFGGVSVITPGTNTSNQVAVLYQGVNCTEVPVAIHADQLTPTWRVYSTGSNVFQTRAGCLIGAEHVNNSYECDIPIGAGICASYQTQTNSPRRARSVASQSIIAYTMSLGAENSVAYSNNSIAIPTNFTISVTTEILPVSMTKTSVDCTMYICGDSTECSNLLLQYGSFCTQLNRALTGIAVEQDKNTQEVFAQVKQIYKTPPIKDFGGFNFSQILPDPSKPSKRSFIEDLLFNKVTLADAGFIKQYGDCLGDIAARDLICAQKFNGLTVLPPLLTDEMIAQYTSALLAGTITSGWWFGAGAALQIPFAMQMAYRFNGIGVTQNVLYENQKLIANQFNSAIGKIQDSLSSTASALGKLQDVVNQNAQALNTLVKQLSSNFGAISSVLNDILSRLDPPEAEVQIDRLITGRLQSLQTYVTQQLIRAAEIRWSANLAATKMSECVLGQSKRVDFCGKGYHLMSFPQSAPHGVVFLHVTYVPAQEKNFTTAPAICHDGKAHFPREGVFVSNGTHWFVTQRNFYEPQIITTDNTFVSGNCDVVIGIVNNTVYDPLQPELDSGGSGYIPEAPRDGQAYVRKDGEWVLLSTFL

SEQ ID NO: 9838 - protein, 1177 aa, Artificial Sequence
  SARS-CoV-2/Iceland/189/2020__EPI_ISL_417709 spike protein (1-1147)(K986P_V987P_T887W_A1020W) Foldon construct
MFVFLVLLPLVSSQCVNLTTRTQLPPAYTNSFTRGVYYPDKVFRSSVLHSTQDLFLPFFSNVTWFHAIHVSGTNGTKRFDNPVLPFNDGVYFASTEKSNIIRGWIFGTTLDSKTQSLLIVNNATNVVIKVCEFQFCNDPFLGVYYHKNNKSWMESEFRVYSSANNCTFEYVSQPFLMDLEGKQGNFKNLREFVFKNIDGYFKIYSKHTPINLVRDLPQGFSALEPLVDLPIGINITRFQTLLALHRSYLTPGDSSSGWTAGAAAYYVGYLQPRTFLLKYNENGTITDAVDCALDPLSETKCTLKSFTVEKGIYQTSNFRVQPTESIVRFPNITNLCPFGEVFNATRFASVYAWNRKRISNCVADYSVLYNSASFSTFKCYGVSPTKLNDLCFTNVYADSFVIRGDEVRQIAPGQTGKIADYNYKLPDDFTGCVIAWNSNNLDSKVGGNYNYLYRLFRKSNLKPFERDISTEIYQAGSTPCNGVEGFNCYFPLQSYGFQPTNGVGYQPYRVVVLSFELLHAPATVCGPKKSTNLVKNKCVNFNFNGLTGTGVLTESNKKFLPFQQFGRDIADTTDAVRDPQTLEILDITPCSFGGVSVITPGTNTSNQVAVLYQGVNCTEVPVAIHADQLTPTWRVYSTGSNVFQTRAGCLIGAEHVNNSYECDIPIGAGICASYQTQTNSPRRARSVASQSIIAYTMSLGAENSVAYSNNSIAIPTNFTISVTTEILPVSMTKTSVDCTMYICGDSTECSNLLLQYGSFCTQLNRALTGIAVEQDKNTQEVFAQVKQIYKTPPIKDFGGFNFSQILPDPSKPSKRSFIEDLLFNKVTLADAGFTKQYGDCLGDIAARDLICAQKFNGLTVLPPLLTDEMIAQYTSALLAGTITSGWWFGAGAALQIPFAMQMAYRFNGIGVTQNVLYENQKLIANQFNSAIGKIQDSLSSTASALGKLQDVVNQNAQALNTLVKQLSSNFGAISSVLNDILSRLDPPEAEVQIDRLITGRLQSLQTYVTQQLIRAAEIRWSANLAATKMSECVLGQSKRVDFCGKGYHLMSFPQSAPHGVVFLHVTYVPAQEKNFTTAPAICHDGKAHFPREGVFVSNGTHWFVTQRNFYEPQIITTDNTFVSGNCDVVIGIVNNTVYDPLQPELDSGGSGYIPEAPRDGQAYVRKDGEWVLLSTFL

SEQ ID NO: 9839 - protein, 1177 aa, Artificial Sequence
  SARS-CoV-2/Australia/NSW56/2020__EPI_ISL_417408 spike protein (1-1147)(K986P_V987P_T887W_A1020W) Foldon construct
MFVFLVLLPLVSSQCVNLTTRTQLPPAYTNSFTRGVYYPDKVFRSSVLHSTQDLFLPFFSNVTWFHAIHVSGTNGTKRFDNPVLPFNDGVYFASTEKSNIIRGWIFGTTLDSKTQSLLIVNNATNVVIKVCEFQFCNDPFLGVYYHKNNKSWMESEFRVYSSANNCTFEYVSQPFLMDLEGKQGNFKNLREFVFKNIDGYFKIYSKHTPINLVRDLPQGFSALEPLVDLPIGINITRFQTLLALHRSYLTPGDSSSGWTAGAAAYYVGYLQPRTFLLKYNENGTITDAVDCALDPLSETKCTLKSFTVEKGIYQTSNFRVQPTESIVRFPNITNLCPFGEVFNATRFASVYAWNRKRISNCVADYSVLYNSASFSTFKCYGVSPTKLNDLCFTNVYADSFVIRGDEVRQIAPGQTGKIADYNYKLPDDFTGCVIAWNSNNLDSKVGGNYNYLYRLFRKSNLKPFERDISTEIYQAGSTPCNGVEGFNCYFPLQSYGFQPTNGVGYQPYRVVVLSFELLHAPATVCGPKKSTNLVKNKCVNFNFNGLTGTGVLTESNKKFLPFQQFGRDIADTTDAVRDPQTLEILDITPCSFGGVSVITPGTNTSNQVAVLYQDVNCTEVPVAIHADQLTPTWRVYSTGSNVFQTRAGCLIGAEHVNNSYECDIPIGAGICASYQTQTNSPRRARSVASQSIIAYTMSLGAENSVAYSNNSIAIPTNFTISVTTEILPVSMTKTSVDCTMYICGDSTECSNLLLQYGSFCTQLNRALTGIAVEQDKNTQEVFAQVKQIYKTPPIKDFGGFNFSQILPDSSKPSKRSFIEDLLFNKVTLADAGFIKQYGDCLGDIAARDLICAQKFNGLTVLPPLLTDEMIAQYTSALLAGTITSGWWFGAGAALQIPFAMQMAYRFNGIGVTQNVLYENQKLIANQFNSAIGKIQDSLSSTASALGKLQDVVNQNAQALNTLVKQLSSNFGAISSVLNDILSRLDPPEAEVQIDRLITGRLQSLQTYVTQQLIRAAEIRWSANLAATKMSECVLGQSKRVDFCGKGYHLMSFPQSAPHGVVFLHVTYVPAQEKNFTTAPAICHDGKAHFPREGVFVSNGTHWFVTQRNFYEPQIITTDNTFVSGNCDVVIGIVNNTVYDPLQPELDSGGSGYIPEAPRDGQAYVRKDGEWVLLSTFL

SEQ ID NO: 9840 - protein, 1177 aa, Artificial Sequence
  SARS-CoV-2/Iceland/280/2020__EPI_ISL_417608 spike protein (1-1147)(K986P_V987P_T887W_A1020W) Foldon construct
MFVFLVLLPLVSSQCVNLTTRTQLPPAYTNSFTRGVYYPDKVFRSSVLHSTQDLFLPFFSNVTWFHAIHVSGTNGTKRFDNPVLPFNDGVYFASTEKSNIIRGWIFGTTLDSKTQSLLIVNNATNVVIKVCEFQFCNDPFLGVYYHKNNKSWMESEFRVYSSANNCTFEYVSQPFLMDLEGKQGNFKNLREFVFKNIDGYFKIYSKHTPINLVRDLPQGFSALEPLVDLPIGINITRFQTLLALHRSYLTPGDSSSGWTAGAAAYYVGYLQPRTFLLKYNENGTITDAVDCALDPLSETKCTLKSFTVEKGIYQTSNFRVQPTESIVRFPNITNLCPFGEVFNATRFASVYAWNRKRISNCVADYSVLYNSASFSTFKCYGVSPTKLNDLCFTNVYADSFVIRGDEVRQIAPGQTGKIADYNYKLPDDFTGCVIAWNSNNLDSKVGGNYNYLYRLFRKSNLKPFERDISTEIYQAGSTPCNGVEGFNCYFPLQSYGFQPTNGVGYQPYRVVVLSFELLHAPATVCGPKKSTNLVKNKCVNFNFNGLTGTGVLTESNKKFLPFQQFGRDIADTTDAVRDPQTLEILDITPCSFGGVSVITPGTNTSNQVAVLYQGVNCTEVPVAIHADQLTPTWRVYSTGSNVFQTRAGCLIGAEHVNNSYECDIPIGAGICASYHTQTNSPRRARSVASQSIIAYTMSLGAENSVAYSNNSIAIPTNFTISVTTEILPVSMTKTSVDCTMYICGDSTECSNLLLQYGSFCTQLNRALTGIAVEQDKNTQEVFAQVKQIYKTPPIKDFGGFNFSQILPDPSKPSKRSFIEDLLFNKVTLADAGFIKQYGDCLGDIAARDLICAQKFNGLTVLPPLLTDEMIAQYTSALLAGTITSGWWFGAGAALQIPFAMQMAYRFNGIGVTQNVLYENQKLIANQFNSAIGKIQDSLSSTASALGKLQDVVNQNAQALNTLVKQLSSNFGAISSVLNDILSRLDPPEAEVQIDRLITGRLQSLQTYVTQQLIRAAEIRWSANLAATKMSECVLGQSKRVDFCGKGYHLMSFPQSAPHGVVFLHVTYVPAQEKNFTTAPAICHDGKAHFPREGVFVSNGTHWFVTQRNFYEPQIITTDNTFVSGNCDVVIGIVNNTVYDPLQPELDSGGSGYIPEAPRDGQAYVRKDGEWVLLSTFL

SEQ ID NO: 9841 - protein, 1177 aa, Artificial Sequence; identical to SEQ ID NO: 9796
  SARS-CoV-2/Iceland/247/2020__EPI_ISL_417575 spike protein (1-1147)(K986P_V987P_T887W_A1020W) Foldon construct

SEQ ID NO: 9842 - protein, 1177 aa, Artificial Sequence
  SARS-CoV-2/Iceland/238/2020__EPI_ISL_417566 spike protein (1-1147)(K986P_V987P_T887W_A1020W) Foldon construct
MFVFLVLLPLVSSQCVNLTTRTQLPPAYTNSFTRGVYYPDKVFRSSVLHSTQDLFLPFFSNVTWFHAIHVSGTNGTKRFDNPVLPFNDGVYFASTEKSNIIRGWIFGTTLDSKTQSLLIVNNATNVVIKVCEFQFCNDPFLGVYYHKNNKSWMESEFRVYSSANNCTFEYVSQPFLMDLEGKQGNFKNLREFVFKNIDGYFKIYSKHTPINLVRDLPQGFSALEPLVDLPIGINITRFQTLLALHRSYLTPGDSSSGWTAGAAAYYVGYLQPRTFLLKYNENGTITDAVDCALDPLSETKCTLKSFTVEKGIYQTSNFRVQPTESIVRFPNITNLCPFGEVFNATRFASVYAWNRKRISNCVADYSVLYNSASFSTFKCYGVSPTKLNDLCFTNVYADSFVIRGDEVRQIAPGQTGKIADYNYKLPDDFTGCVIAWNSNNLDSKVGGNYNYLYRLFRKSNLKPFERDISTEIYQAGSTPCNGVEGFNCYFPLQSYGFQPTNGVGYQPYRVVVLSFELLHAPATVCGPKKSTNLVKNKCVNFNFNGLTGTGVLTESNKKFLPFQQFGRDIADTTDAVRDPQTLEILDITPCSFGGVSVITPGTNTSNQVAVLYQGVNCTEVPVAIHADQLTPTWRVYSTGSNVFQTRAGCLIGAEHVNNSYECDIPIGAGICASYQTQTNSPRRARSVASQSIIAYTMSLGAENSVAYSNNSIAIPTNFTISVTTEILPVSMTKTSVDCTMYICGDSTECSNLLLQYGSFCTQLNRALTGIAVEQDKNTQEVFAQVKQIYKTPPIKDFGGFNFSQILPDPSKPSKRSFIEDLLFNKVTLADVGFIKQYGDCLGDIAARDLICAQKFNGLTVLPPLLTDEMIAQYTSALLAGTITSGWWFGAGAALQIPFAMQMAYRFNGIGVTQNVLYENQKLIANQFNSAIGKIQDSLSSTASALGKLQDVVNQNAQALNTLVKQLSSNFGAISSVLNDILSRLDPPEAEVQIDRLITGRLQSLQTYVTQQLIRAAEIRWSANLAATKMSECVLGQSKRVDFCGKGYHLMSFPQSAPHGVVFLHVTYVPAQEKNFTTAPAICHDGKAHFPREGVFVSNGTHWFVTQRNFYEPQIITTDNTFVSGNCDVVIGIVNNTVYDPLQPELDSGGSGYIPEAPRDGQAYVRKDGEWVLLSTFL

SEQ ID NO: 9843 - protein, 1177 aa, Artificial Sequence
  SARS-CoV-2/Greece/16/2020__EPI_ISL_418265 spike protein (1-1147)(K986P_V987P_T887W_A1020W) Foldon construct
MFVFLVLLPLVSSQCVNLTTRTQLPPAYTNSFTRGVYYPDKVFRSSVLHSTQDLFLPFFSNVTWFHAIHVSGTNGTKRFDNPVLPFNDGVYFASTEKSNIIRGWIFGTTLDSKTQSLLIVNNATNVVIKVCEFQFCNDPFLGVYYHKNNKSWMESEFRVYSSANNCTFEYVSQPFLMDLEGKQGNFKNLREFVFKNVDGYFKIYSKHTPINLVRDLPQGFSALEPLVDLPIGINITRFQTLLALHRSYLTPGDSSSGWTAGAAAYYVGYLQPRTFLLKYNENGTITDAVDCALDPLSETKCTLKSFTVEKGIYQTSNFRVQPTESIVRFPNITNLCPFGEVFNATRFASVYAWNRKRISNCVADYSVLYNSASFSTFKCYGVSPTKLNDLCFTNVYADSFVIRGDEVRQIAPGQTGKIADYNYKLPDDFTGCVIAWNSNNLDSKVGGNYNYLYRLFRKSNLKPFERDISTEIYQAGSTPCNGVEGFNCYFPLQSYGFQPTNGVGYQPYRVVVLSFELLHAPATVCGPKKSTNLVKNKCVNFNFNGLTGTGVLTESNKKFLPFQQFGRDIADTTDAVRDPQTLEILDITPCSFGGVSVITPGTNTSNQVAVLYQDVNCTEVPVAIHADQLTPTWRVYSTGSNVFQTRAGCLIGAEHVNNSYECDIPIGAGICASYQTQTNSPRRARSVASQSIIAYTMSLGAENSVAYSNNSIAIPTNFTISVTTEILPVSMTKTSVDCTMYICGDSTECSNLLLQYGSFCTQLNRALTGIAVEQDKNTQEVFAQVKQIYKTPPIKDFGGFNFSQILPDPSKPSKRSFIEDLLFNKVTLADAGFIKQYGDCLGDIAARDLICAQKFNGLTVLPPLLTDEMIAQYTSALLAGTITSGWWFGAGAALQIPFAMQMAYRFNGIGVTQNVLYENQKLIANQFNSAIGKIQDSLSSTASALGKLQDVVNQNAQALNTLVKQLSSNFGAISSVLNDILSRLDPPEAEVQIDRLITGRLQSLQTYVTQQLIRAAEIRWSANLAATKMSECVLGQSKRVDFCGKGYHLMSFPQSAPHGVVFLHVTYVPAQEKNFTTAPAICHDGKAHFPREGVFVSNGTHWFVTQRNFYEPQIITTDNTFVSGNCDVVIGIVNNTVYDPLQPELDSGGSGYIPEAPRDGQAYVRKDGEWVLLSTFL

SEQ ID NO: 9844 - protein, 1177 aa, Artificial Sequence
  SARS-CoV-2/Iceland/319/2020__EPI_ISL_417648 spike protein (1-1147)(K986P_V987P_T887W_A1020W) Foldon construct
MFVFLVLLPLVSSQCVNLTTRTQLPPAYTNSFTRGVYYPDKVFRSSVLHSTQDLFLPFFSNVTWFHAIHVSGTNGTKRFDNPVLPFNDGVYFASTEKSNIIRGWIFGTTLDSKTQSLLIVNNATNVVIKVCEFQFCNDPFLGVYYHKNNKSWMESEFRVYSSANNCTFEYVSQPFLIDLEGKQGNFKNLREFVFKNIDGYFKIYSKHTPINLVRDLPQGFSALEPLVDLPIGINITRFQTLLALHRSYLTPGDSSSGWTAGAAAYYVGYLQPRTFLLKYNENGTITDAVDCALDPLSETKCTLKSFTVEKGIYQTSNFRVQPTESIVRFPNITNLCPFGEVFNATRFASVYAWNRKRISNCVADYSVLYNSASFSTFKCYGVSPTKLNDLCFTNVYADSFVIRGDEVRQIAPGQTGKIADYNYKLPDDFTGCVIAWNSNNLDSKVGGNYNYLYRLFRKSNLKPFERDISTEIYQAGSTPCNGVEGFNCYFPLQSYGFQPTNGVGYQPYRVVVLSFELLHAPATVCGPKKSTNLVKNKCVNFNFNGLTGTGVLTESNKKFLPFQQFGRDIADTTDAVRDPQTLEILDITPCSFGGVSVITPGTNTSNQVAVLYQGVNCTEVPVAIHADQLTPTWRVYSTGSNVFQTRAGCLIGAEHVNNSYECDIPIGAGICASYQTQTNSPRRARSVASQSIIAYTMSLGAENSVAYSNNSIAIPTNFTISVTTEILPVSMTKTSVDCTMYICGDSTECSNLLLQYGSFCTQLNRALTGIAVEQDKNTQEVFAQVKQIYKTPPIKDFGGFNFSQILPDPSKPSKRSFIEDLLFNKVTLADAGFIKQYGDCLGDIAARDLICAQKFNGLTVLPPLLTDEMIAQYTSALLAGTITSGWWFGAGAALQIPFAMQMAYRFNGIGVTQNVLYENQKLIANQFNSAIGKIQDSLSSTASALGKLQDVVNQNAQALNTLVKQLSSNFGAISSVLNDILSRLDPPEAEVQIDRLITGRLQSLQTYVTQQLIRAAEIRWSANLAATKMSECVLGQSKRVDFCGKGYHLMSFPQSAPHGVVFLHVTYVPAQEKNFTTAPAICHDGKAHFPREGVFVSNGTHWFVTQRNFYEPQIITTDNTFVSGNCDVVIGIVNNTVYDPLQPELDSGGSGYIPEAPRDGQAYVRKDGEWVLLSTFL

SEQ ID NO: 9845 - protein, 1177 aa, Artificial Sequence
  SARS-CoV-2/Congo/94/2020__EPI_ISL_417947 spike protein (1-1147)(K986P_V987P_T887W_A1020W) Foldon construct
MFVFLVLLPLVSSQCVNLTTRTQLPPAYTNSFTRGVYYPDKVFRSSVLHSTQDLFLPFFSNVTWFHAIHVSGTNGTKRFDNPVLPFNDGVYFASTEKSNIIRGWIFGTTLDSKTQSLLIVNNATNVVIKVCEFQFCNDPFLGVYYHKNNKSWMESEFRVYSSANNCTFEYVSQPFLMDLEGKQGNFKNLREFVFKNIDGYFKIYSKHTPINLVRDLPQGFSALEPLVDLPIGINITRFQTLLALHRSYLTPGDSSSGWTAGAAAYYVGYLQPRTFLLKYNENGTITDAVDCALDPLSETKCTLKSFTVEKGIYQTSNFRVQPTESIVRFPNITNLCPFGEVFNATRFASVYAWNRKRISNCVADYSVLYNSASFSTFKCYGVSPTKLNDLCFTNVYADSFVIRGDEVRQIAPGQTGKIADYNYKLPDDFTGCVIAWNSNNLDSKVGGNYNYLYRLFRKSNLKPFERDISTEIYQAGSTPCNGVEGFNCYFPLQSYGFQPTNGVGYQPYRVVVLSFELLHAPATVCGPKKSTNLVKNKCVNFNFNGLTGTGVLTESNKKFLPFQQFGRDIADTTDAVRDPQTLEILDITPCSFGGVSVITPGTNTSNQVAVLYQGVNCTEVPVAIHADQLTPTWRVYSTGSNVFQTRAGCLIGAEHVNNSYECDIPIGAGICASYQTQTNSPRRARSVASQSIIAYTMSLGAENSVAYSNNSIAIPTNFTISVTTEILPVSMTKTSVDCTMYICGDSTECSNLLLQYGSFCTQLNRALTGIAVEQDKNTQEVFAQVKQIYKTPPIKDFGGFNFSQILPDPSKPSKRSFIEDILFNKVTLADAGFIKQYGDCLGDIAARDLICAQKFNGLTVLPPLLTDEMIAQYTSALLAGTITSGWWFGAGAALQIPFAMQMAYRFNGIGVTQNVLYENQKLIANQFNSAIGKIQDSLSSTASALGKLQDVVNQNAQALNTLVKQLSSNFGAISSVLNDILSRLDPPEAEVQIDRLITGRLQSLQTYVTQQLIRAAEIRWSANLAATKMSECVLGQSKRVDFCGKGYHLMSFPQSAPHGVVFLHVTYVPAQEKNFTTAPAICHDGKAHFPREGVFVSNGTHWFVTQRNFYEPQIITTDNTFVSGNCDVVIGIVNNTVYDPLQPELDSGGSGYIPEAPRDGQAYVRKDGEWVLLSTFL

SEQ ID NO: 9846 - protein, 1177 aa, Artificial Sequence
  SARS-CoV-2/Congo/158/2020__EPI_ISL_417950 spike protein (1-1147)(K986P_V987P_T887W_A1020W) Foldon construct
MFVFLVLLPLVSSQCVNLTTRTQLPPAYTNSFTRGVYYPDKVFRSSVLHSTQDLFLPFFSNVTWFHAIHVSGTNGTKRFDNPVLPFNDGVYFASTEKSNIIRGWIFGTTLDSKTQSLLIVNNATNVVIKVCEFQFCNDPFLGVYYHKNNKSWMESEFRVYSSANNCTFEYVSQPFLMDLEGKQGNFKNLREFVFKNIDGYFKIYSKHTPINLVRDLPQGFSALEPLVDLPIGINITRFQTLLALHRSYLTPGDSSSGWTAGAAAYYVGYLQPRTFLLKYNENGTITDAVDCALDPLSETKCTLKSFTVEKGIYQTSNFRVQPTESIVRFPNITNLCPFGEVFNATRFASVYAWNRKRISNCVADYSVLYNSASFSTFKCYGVSPTKLNDLCFTNVYADSFVIRGDEVRQIAPGQTGKIADYNYKLPDDFTGCVIAWNSNNLDSKVGGNYNYLYRLFRKSNLKPFERDISTEIYQAGSTPCNGVEGFNCYFPLQSYGFQPTNGVGYQPYRVVVLSFELLHAPATVCGPKKSTNLVKNKCVNFNFNGLTGTGVLTESNKKFLPFQQFGRDIADTTDAVRDPQTLEILDITPCSFGGVSVITPGTNTSNQVAVLYQDVNCTEVPVAIHADQLTPTWRVYSTGSNVFQTRAGCLIGAEHVNNSYECDIPIGAGICASYQTQTNSPRRARSVASQSIIAYTMSLGAENSVAYSNNSIAIPTNFTISVTTEILPVSMTKTSVDCTMYICGDSTECSNLLLQYGSFCTQLNRALTGIAVEQDKNTQEVFAQVKQIYKTPPIKDFGGFNFSQILPDPSKPSKRSFIEDLLFNKVTLADAGFIKQYGDCLGDIAARDLICAQKFNGLTVLPPLLTDEMIAQYTSALLAGTITSGWWFGAGAALQIPFAMQMAYRFNGIGVTQNVLYENQKLIANQFNSAIGKIQDSLSSTASALGKLQDVVNQNAQALNTLVKQLSSNFGAISSVLNDILSRLDPPEAEVQIDRLITGRLQSLQTYVTQQLIRAAEIRWSANLAATKMSECVLGQSKRVDFCGKGYHLMSFPQSAPHGVVFLHVTYVPAQEKNFTTAPAICHDGKAHFPREGVFVSNGTHWFVTQRNFYEPQIITTDNTFLSGNCDVVIGIVNNTVYDPLQPELDSGGSGYIPEAPRDGQAYVRKDGEWVLLSTFL

SEQ ID NO: 9847 - protein, 1177 aa, Artificial Sequence
  SARS-CoV-2/USA/UT-00034/2020__EPI_ISL_417977 spike protein (1-1147)(K986P_V987P_T887W_A1020W) Foldon construct
MFVFLVLLPLVSSQCVNLTTRTQLPPAYTNSFTRGVYYPDKVFRSSVLHSTQDLFLPFFSNVTWFHAIHVSGTNGTKRFDNPVLPFNDGVYFASTEKSNIIRGWIFGTTLDSKTQSLLIVNNATNVVIKVCEFQFCNDPFLGVYYYKNNKSWMESEFRVYSSANNCTFEYVSQPFLMDLEGKQGNFKNLREFVFKNIDGYFKIYSKHTPINLVRDLPQGFSALEPLVDLPIGINITRFQTLLALHRSYLTPGDSSSGWTAGAAAYYVGYLQPRTFLLKYNENGTITDAVDCALDPLSETKCTLKSFTVEKGIYQTSNFRVQPTESIVRFPNITNLCPFGEVFNATRFASVYAWNRKRISNCVADYSVLYNSASFSTFKCYGVSPTKLNDLCFTNVYADSFVIRGDEVRQIAPGQTGKIADYNYKLPDDFTGCVIAWNSNNLDSKVGGNYNYLYRLFRKSNLKPFERDISTEIYQAGSTPCNGVEGFNCYFPLQSYGFQPTNGVGYQPYRVVVLSFELLHAPATVCGPKKSTNLVKNKCVNFNFNGLTGTGVLTESNKKFLPFQQFGRDIADTTDAVRDPQTLEILDITPCSFGGVSVITPGTNTSNQVAVLYQGVNCTEVPVAIHADQLTPTWRVYSTGSNVFQTRAGCLIGAEHVNNSYECDIPIGAGICASYQTQTNSPRRARSVASQSIIAYTMSLGAENSVAYSNNSIAIPTNFTISVTTEILPVSMTKTSVDCTMYICGDSTECSNLLLQYGSFCTQLNRALTGIAVEQDKNTQEVFAQVKQIYKTPPIKDFGGFNFSQILPDPSKPSKRSFIEDLLFNKVTLADAGFIKQYGDCLGDIAARDLICAQKFNGLTVLPPLLTDEMIAQYTSALLAGTITSGWWFGAGAALQIPFAMQMAYRFNGIGVTQNVLYENQKLIANQFNSAIGKIQDSLSSTASALGKLQDVVNQNAQALNTLVKQLSSNFGAISSVLNDILSRLDPPEAEVQIDRLITGRLQSLQTYVTQQLIRAAEIRWSANLAATKMSECVLGQSKRVDFCGKGYHLMSFPQSAPHGVVFLHVTYVPAQEKNFTTAPAICHDGKAHFPREGVFVSNGTHWFVTQRNFYEPQIITTDNTFVSGNCDVVIGIVNNTVYDPLQPELDSGGSGYIPEAPRDGQAYVRKDGEWVLLSTFL

SEQ ID NO: 9848 - protein, 1177 aa, Artificial Sequence
  SARS-CoV-2/USA/UT-00033/2020__EPI_ISL_417976 spike protein (1-1147)(K986P_V987P_T887W_A1020W) Foldon construct
MFVFLVLLPLVSSQCVNLTTRTQLPPAYTNSFTRGVYYPDKVFRSSVLHSTQDLFLPFFSNVTWFHAIHVSGTNGTKRFDNPVLPFNDGVYFASTEKSNIIRGWIFGTTLDSKTQSLLIVNNATNVVIKVCEFQFCNDPFLGVYYHKNNKSWMESEFRVYSSANNCTFEYVSQPFLMDLEGKQGNFKNLREFVFKNIDGYFKIYSKHTPINLVRDLPQGFSALEPLVDLPIGINITRFQTLLALHRSYLTPGDSSSGLTAGAAAYYVGYLQPRTFLLKYNENGTITDAVDCALDPLSETKCTLKSFTVEKGIYQTSNFRVQPTESIVRFPNITNLCPFGEVFNATRFASVYAWNRKRISNCVADYSVLYNSASFSTFKCYGVSPTKLNDLCFTNVYADSFVIRGDEVRQIAPGQTGKIADYNYKLPDDFTGCVIAWNSNNLDSKVGGNYNYLYRLFRKSNLKPFERDISTEIYQAGSTPCNGVEGFNCYFPLQSYGFQPTNGVGYQPYRVVVLSFELLHAPATVCGPKKSTNLVKNKCVNFNFNGLTGTGVLTESNKKFLPFQQFGRDIADTTDAVRDPQTLEILDITPCSFGGVSVITPGTNTSNQVAVLYQGVNCTEVPVAIHADQLTPTWRVYSTGSNVFQTRAGCLIGAEHVNNSYECDIPIGAGICASYQTQTNSPRRARSVASQSIIAYTMSLGAENSVAYSNNSIAIPTNFTISVTTEILPVSMTKTSVDCTMYICGDSTECSNLLLQYGSFCTQLNRALTGIAVEQDKNTQEVFAQVKQIYKTPPIKDFGGFNFSQILPDPSKPSKRSFIEDLLFNKVTLADAGFIKQYGDCLGDIAARDLICAQKFNGLTVLPPLLTDEMIAQYTSALLAGTITSGWWFGAGAALQIPFAMQMAYRFNGIGVTQNVLYENQKLIANQFNSAIGKIQDSLSSTASALGKLQDVVNQNAQALNTLVKQLSSNFGAISSVLNDILSRLDPPEAEVQIDRLITGRLQSLQTYVTQQLIRAAEIRWSANLAATKMSECVLGQSKRVDFCGKGYHLMSFPQSAPHGVVFLHVTYVPAQEKNFTTAPAICHDGKAHFPREGVFVSNGTHWFVTQRNFYEPQIITTDNTFVSGNCDVVIGIVNNTVYDPLQPELDSGGSGYIPEAPRDGQAYVRKDGEWVLLSTFL

SEQ ID NO: 9849 - protein, 1177 aa, Artificial Sequence
  SARS-CoV-2/USA/WI-13/2020__EPI_ISL_417516 spike protein (1-1147)(K986P_V987P_T887W_A1020W) Foldon construct
MFVFLVLLPLVSSQCVNLTTRTQLPPAYTNSFTRGVYYPDKVFRSSVLHSTQDLFLPFFSNVTWFHAIHVSGTNGTKRFDNPVLPFNDGVYFASTEKSNIIRGWIFGTTLDSKTQSLLIVNNATNVVIKVCEFQFCNDPFLGVYYHKNNKSWMESEFRVYSSANNCTFEYVSQPFLMDLEGKQGNFKNLREFVFKNIDGYFKIYSKHTPINLVRDLPQGFSALEPLVDLPIGINITRFQTLLALHRSYLTPGDSSSGWTAGAAAYYVGYLQPRTFLLKYNENGTITDAVDCALDPLSETKCTLKSFTVEKGIYQTSNFRVLPTESIVRFPNITNLCPFGEVFNATRFASVYAWNRKRISNCVADYSVLYNSASFSTFKCYGVSPTKLNDLCFTNVYADSFVIRGDEVRQIAPGQTGKIADYNYKLPDDFTGCVIAWNSNNLDSKVGGNYNYLYRLFRKSNLKPFERDISTEIYQAGSTPCNGVEGFNCYFPLQSYGFQPTNGVGYQPYRVVVLSFELLHAPATVCGPKKSTNLVKNKCVNFNFNGLTGTGVLTESNKKFLPFQQFGRDIADTTDAVRDPQTLEILDITPCSFGGVSVITPGTNTSNQVAVLYQGVNCTEVPVAIHADQLTPTWRVYSTGSNVFQTRAGCLIGAEHVNNSYECDIPIGAGICASYQTQTNSPRRARSVASQSIIAYTMSLGAENSVAYSNNSIAIPTNFTISVTTEILPVSMTKTSVDCTMYICGDSTECSNLLLQYGSFCTQLNRALTGIAVEQDKNTQEVFAQVKQIYKTPPIKDFGGFNFSQILPDPSKPSKRSFIEDLLFNKVTLADAGFIKQYGDCLGDIAARDLICAQKFNGLTVLPPLLTDEMIAQYTSALLAGTITSGWWFGAGAALQIPFAMQMAYRFNGIGVTQNVLYENQKLIANQFNSAIGKIQDSLSSTASALGKLQDVVNQNAQALNTLVKQLSSNFGAISSVLNDILSRLDPPEAEVQIDRLITGRLQSLQTYVTQQLIRAAEIRWSANLAATKMSECVLGQSKRVDFCGKGYHLMSFPQSAPHGVVFLHVTYVPAQEKNFTTAPAICHDGKAHFPREGVFVSNGTHWFVTQRNFYEPQIITTDNTFVSGNCDVVIGIVNNTVYDPLQPELDSGGSGYIPEAPRDGQAYVRKDGEWVLLSTFL

SEQ ID NO: 9850 - protein, 1176 aa, Artificial Sequence
  SARS-CoV-2/India/1-27/2020__EPI_ISL_413522 spike protein (1-1146)(K985P_V986P_T886W_A1019W) Foldon construct
MFVFLVLLPLVSSQCVNLTTRTQLPPAYTNSFTRGVYYPDKVFRSSVLHSTQDLFLPFFSNVTWFHAIHVSGTNGTKRFDNPVLPFNDGVYFASTEKSNIIRGWIFGTTLDSKTQSLLIVNNATNVVIKVCEFQFCNDPFLGVYHKNNKSWMESEFRVYSSANNCTFEYVSQPFLMDLEGKQGNFKNLREFVFKNIDGYFKIYSKHTPINLVRDLPQGFSALEPLVDLPIGINITRFQTLLALHRSYLTPGDSSSGWTAGAAAYYVGYLQPRTFLLKYNENGTITDAVDCALDPLSETKCTLKSFTVEKGIYQTSNFRVQPTESIVRFPNITNLCPFGEVFNATRFASVYAWNRKRISNCVADYSVLYNSASFSTFKCYGVSPTKLNDLCFTNVYADSFVIRGDEVIQIAPGQTGKIADYNYKLPDDFTGCVIAWNSNNLDSKVGGNYNYLYRLFRKSNLKPFERDISTEIYQAGSTPCNGVEGFNCYFPLQSYGFQPTNGVGYQPYRVVVLSFELLHAPATVCGPKKSTNLVKNKCVNFNFNGLTGTGVLTESNKKFLPFQQFGRDIADTTDAVRDPQTLEILDITPCSFGGVSVITPGTNTSNQVAVLYQDVNCTEVPVAIHADQLTPTWRVYSTGSNVFQTRAGCLIGAEHVNNSYECDIPIGAGICASYQTQTNSPRRARSVASQSIIAYTMSLGAENSVAYSNNSIAIPTNFTISVTTEILPVSMTKTSVDCTMYICGDSTECSNLLLQYGSFCTQLNRALTGIAVEQDKNTQEVFAQVKQIYKTPPIKDFGGFNFSQILPDPSKPSKRSFIEDLLFNKVTLADAGFIKQYGDCLGDIAARDLICAQKFNGLTVLPPLLTDEMIAQYTSALLAGTITSGWWFGAGAALQIPFAMQMAYRFNGIGVTQNVLYENQKLIANQFNSAIGKIQDSLSSTASALGKLQDVVNQNAQALNTLVKQLSSNFGAISSVLNDILSRLDPPEAEVQIDRLITGRLQSLQTYVTQQLIRAAEIRWSANLAATKMSECVLGQSKRVDFCGKGYHLMSFPQSAPHGVVFLHVTYVPAQEKNFTTAPAICHDGKAHFPREGVFVSNGTHWFVTQRNFYEPQIITTDNTFVSGNCDVVIGIVNNTVYDPLQPELDSGGSGYIPEAPRDGQAYVRKDGEWVLLSTFL

SEQ ID NO: 9851 - protein, 1171 aa, Artificial Sequence
  SARS-CoV-2/pangolin/Guangxi/P4L/2017__EPI_ISL_410538 spike protein (1-1141)(K980P_V981P_T881W_A1014W) Foldon construct
MFVFLFVLPLVSSQCVNLTTRTGIPPGYTNSSTRGVYYPDKVFRSSILHLTQDLFLPFFSNVTWFNTINYQGGFKKFDNPVLPFNDGVYFASTEKSNIIRGWIFGTTLDARTQSLLIVNNATNVVIKVCEFQFCTDPFLGVYYHNNNKTWVENEFRVYSSANNCTFEYISQPFLMDLEGKQGNFKNLREFVFKNVDGYFKIYSKHTPIDLVRDLPRGFAALEPLVDLPIGINITRFQTLLALHRSYLTPGNLESGWTTGAAAYYVGYLQQRTFLLSYNQNGTITDAVDCSLDPLSETKCTLKSLTVEKGIYQTSNFRVQPTISIVRFPNITNLCPFGEVFNASKFASVYAWNRKRISNCVADYSVLYNSTSFSTFKCYGVSPTKLNDLCFTNVYADSFVVKGDEVRQIAPGQTGVIADYNYKLPDDFTGCVIAWNSVKQDALTGGNYGYLYRLFRKSKLKPFERDISTEIYQAGSTPCNGQVGLNCYYPLERYGFHPTTGVNYQPFRVVVLSFELLNGPATVCGPKLSTTLVKDKCVNFNFNGLTGTGVLTTSKKQFLPFQQFGRDISDTTDAVRDPQTLEILDITPCSFGGVSVITPGTNTSNQVAVLYQDVNCTEVPMAIHAEQLTPAWRVYSAGANVFQTRAGCLVGAEHVNNSYECDIPVGAGICASYHSMSSLRSVNQRSIIAYTMSLGAENSVAYSNNSIAIPTNFTISVTTEILPVSMTKTSVDCTMYICGDSIECSNLLLQYGSFCTQLNRALTGIAVEQDKNTQEVFAQVKQIYKTPPIKDFGGFNFSQILPDPSKPSKRSFIEDLLFNKVTLADAGFIKQYGDCLGDIAARDLICAQKFNGLTVLPPLLTDEMIAQYTSALLAGTITSGWWFGAGAALQIPFAMQMAYRFNGIGVTQNVLYENQKLIANQFNSAIGKIQDSLSSTASALGKLQDVVNQNAQALNTLVKQLSSNFGAISSVLNDILSRLDPPEAEVQIDRLITGRLQSLQTYVTQQLIRAAEIRWSANLAATKMSECVLGQSKRVDFCGKGYHLMSFPQSAPHGVVFLHVTYVPAQEKNFTTAPAICHEGKAHFPREGVFVSNGTHWFITQRNFYEPQIITTDNTFVSGSCDVVIGIVNNTVYDPLQPELDSGGSGYIPEAPRDGQAYVRKDGEWVLLSTFL

SEQ ID NO: 9852 - protein, 1171 aa, Artificial Sequence
  SARS-CoV-2/pangolin/Guangxi/P5L/2017__EPI_ISL_410540 spike protein (1-1141)(K980P_V981P_T881W_A1014W) Foldon construct
MFVFLFVLPLVSSQCVNLTTRTGIPPGYTNSSTRGVYYPDKVFRSSILHLTQDLFLPFFSNVTWFNTINYQGGFKKFDNPVLPFNDGVYFASTEKSNIIRGWIFGTTLDARTQSLLIVNNATNVVIKVCEFQFCTDPFLGVYYHNNNKTWVENEFRVYSSANNCTFEYISQPFLMDLEGKQGNFKNLREFVFKNVDGYFKIYSKHTPIDLVRDLPRGFAALEPLVDLPIGINITRFQTLLALHRSYLTPGKLESGWTTGAAAYYVGYLQQRTFLLSYNQNGTITDAVDCSLDPLSETKCTLKSLTVEKGIYQTSNFRVQPTISIVRFPNITNLCPFGEVFNASKFASVYAWNRKRISNCVADYSVLYNSTSFSTFKCYGVSPTKLNDLCFTNVYADSFVVKGDEVRQIAPGQTGVIADYNYKLPDDFTGCVIAWNSVKQDALTGGNYGYLYRLFRKSKLKPFERDISTEIYQAGSTPCNGQVGLNCYYPLERYGFHPTTGVNYQPFRVVVLSFELLNGPATVCGPKLSTTLVKDKCVNFNFNGLTGTGVLTTSKKQFLPFQQFGRDISDTTDAVRDPQTLEILDITPCSFGGVSVITPGTNTSNQVAVLYQDVNCTEVPMAIHAEQLTPAWRVYSAGANVFQTRAGCLVGAEHVNNSYECDIPVGAGICASYHSMSSFRSVNQRSIIAYTMSLGAENSVAYSNNSIAIPTNFTISVTTEILPVSMTKTSVDCTMYICGDSIECSNLLLQYGSFCTQLNRALTGIAVEQDKNTQEVFAQVKQIYKTPPIKDFGGFNFSQILPDPSKPSKRSFIEDLLFNKVTLADAGFIKQYGDCLGDIAARDLICAQKFNGLTVLPPLLTDEMIAQYTSALLAGTITSGWWFGAGAALQIPFAMQMAYRFNGIGVTQNVLYENQKLIANQFNSAIGKIQDSLSSTASALGKLQDVVNQNAQALNTLVKQLSSNFGAISSVLNDILSRLDPPEAEVQIDRLITGRLQSLQTYVTQQLIRAAEIRWSANLAATKMSECVLGQSKRVDFCGKGYHLMSFPQSAPHGVVFLHVTYVPAQEKNFTTAPAICHEGKAHFPREGVFVSNGTHWFITQRNFYEPQIITTDNTFVSGSCDVVIGIVNNTVYDPLQPELDSGGSGYIPEAPRDGQAYVRKDGEWVLLSTFL

SEQ ID NO: 9853 - protein, 1171 aa, Artificial Sequence
  SARS-CoV-2/pangolin/Guangxi/P5E/2017__EPI_ISL_410541 spike protein (1-1141)(K980P_V981P_T881W_A1014W) Foldon construct
MFVFLFVLPLVSSQCVNLTTRTGIPPGYTNSSTRGVYYPDKVFRSSILHLTQDLFLPFFSNVTWFNTITYQGGSKKFDNPVLPFNDGVYFASTEKSNIIRGWIFGTTLDARTQSLLIVNNATNVVIKVCEFQFCTDPFLGVYYHNNNKTWVENEFRVYSSANNCTFEYISQPFLMDLEGKQGNFKNLREFVFKNVDGYFKIYSKHTPIDLVRDLPRGFAALEPLVDLPIGINITRFQTLLALHRSYLTPGKLESGWTTGAAAYYVGYLQQRTFLLSYNQNGTITDAVDCSLDPLSETKCTLKSLTVEKGIYQTSNFRVQPTISIVRFPNITNLCPFGEVFNASKFASVYAWNRKRISNCVADYSVLYNSTSFSTFKCYGVSPTKLNDLCFTNVYADSFVVKGDEVRQIAPGQTGVIADYNYKLPDDFTGCVIAWNSVKQDALTGDNYGYLYRLFRKSKLKPFERDISTEIYQAGSTPCNGQVGLNCYYPLERYGFHPTTGVNYQPFRVVVLSFELLNGPATVCGPKLSTTLVKDKCVNFNFNGLTGTGVLTTSKKQFLPFQQFGRDISDTTDAVRDPQTLEILDITPCSFGGVSVITPGTNTSNQVAVLYQDVNCTEVPMAIHAEQLTPAWRVYSAGANVFQTRAGCLVGAEHVNNSYECDIPVGAGICASYHSMSSFRSVNQRSIIAYTMSLGAENSVAYSNNSIAIPTNFTISVTTEILPVSMTKTSVDCTMYICGDSIECSNLLLQYGSFCTQLNRALTGIAVEQDKNTQEVFAQVKQIYKTPPIKDFGGFNFSQILPDPSKPSKRSFIEDLLFNKVTLADAGFIKQYGDCLGDIAARDLICAQKFNGLTVLPPLLTDEMIAQYTSALLAGTITSGWWFGAGAALQIPFAMQMAYRFNGIGVTQNVLYENQKLIANQFNSAIGKIQDSLSSTASALGKLQDVVNQNAQALNTLVKQLSSNFGAISSVLNDILSRLDPPEAEVQIDRLITGRLQSLQTYVTQQLIRAAEIRWSANLAATKMSECVLGQSKRVDFCGKGYHLMSFPQSAPHGVVFLHVTYVPAQEKNFTTAPAICHEGKAHFPREGVFVSNGTHWFITQRNFYEPQIITTDNTFVSGSCDVVIGIVNNTVYDPLQPELDSGGSGYIPEAPRDGQAYVRKDGEWVLLSTFL

SEQ ID NO: 9854 - protein, 1169 aa, Artificial Sequence
  SARS-CoV-2/pangolin/Guangxi/P1E/2017__EPI_ISL_410539 spike protein (1-1139)(K978P_V979P_T879W_A1012W) Foldon construct
MFVFLFVLPLVSSQCVNLTTRTGIQPGYTNSSTRGVYYPDKVFRSSILHLTQDLFLPFFSNVTWFNTINYQGGFKKFDNPVLPFNDGVYFASTEKSNIIRGWIFGTTLDARTQSLLIVNNATNVVIKVCEFQFCTDPFLGVYYHNNNKTWVENEFRVYSSANNCTFEYISQPFLMDLEGKQGNFKNLREFVFKNVDGYFKIYSKHTPIDLVRDLPRGFAALEPLVDLPIGINITRFQTLLALHRSYLTPGKLESGWTTGAAAYYVGYLQQRTFLLSYNQNGTITDAVDCSLDPLSETKCTLKSLTVEKGIYQTSNFRVQPTISIVRFPNITNLCPFGEVFNASKFASVYAWNRKRISNCVADYSVLYNSTSFSTFKCYGVSPTKLNDLCFTNVYADSFVVKGDEVRQIAPGQTGVIADYNYKLPDDFTGCVIAWNSVKQDALTGGNYLYRLFRKSKLKPFERDISTEIYQAGSTPCNGQVGLNCYYPLERYGFHPTTGVNYQPFRVVVLSFELLNGPATVCGPKLSTTLVKDKCVNFNFNGLTGTGVLTTSKKQFLPFQQFGRDISDTTDAVRDPQTLEILDITPCSFGGVSVITPGTNTSNQVAVLYQDVNCTEVPMAIHAEQLTPAWRVYSAGANVFQTRAGCLVGAEHVNNSYECDIPVGAGICASYHSMSSLRSVNQRSIIAYTMSLGAENSVAYSNNSIAIPTNFTISVTTEILPVSMTKTSVDCTMYICGDSIECSNLLLQYGSFCTQLNRALTGIAVEQDKNTQEVFAQVKQIYKTPPIKDFGGFNFSQILPDPSKPSKRSFIEDLLFNKVTLADAGFIKQYGDCLGDIAARDLICAQKFNGLTVLPPLLTDEMIAQYTSALLAGTITSGWWFGAGAALQIPFAMQMAYRFNGIGVTQNVLYENQKLIANQFNSAIGKIQDSLSSTASALGKLQDVVNQNAQALNTLVKQLSSNFGAISSVLNDILSRLDPPEAEVQIDRLITGRLQSLQTYVTQQLIRAAEIRWSANLAATKMSECVLGQSKRVDFCGKGYHLMSFPQSAPHGVVFLHVTYVPAQEKNFTTAPAICHEGKAHFPREGVFVSNGTHWFITQRNFYEPQIITTDNTFVSGSCDVVIGIVNNTVYDPLQPELDSGGSGYIPEAPRDGQAYVRKDGEWVLLSTFL

SEQ ID NO: 9855 - protein, 1177 aa, Artificial Sequence
  SARS-CoV-2/Wuhan/WIV05/2019__EPI_ISL_402128 spike protein (1-1147)(K986P_V987P_P1069F) Foldon construct
MFVFLVLLPLVSSQCVNLTTRTQLPPAYTNSFTRGVYYPDKVFRSSVLHSTQDLFLPFFSNVTWFHAIHVSGTNGTKRFDNPVLPFNDGVYFASTEKSNIIRGWIFGTTLDSKTQSLLIVNNATNVVIKVCEFQFCNDPFLGVYYHKNNKSWMESEFRVYSSANNCTFEYVSQPFLMDLEGKQGNFKNLREFVFKNIDGYFKIYSKHTPINLVRDLPQGFSALEPLVDLPIGINITRFQTLLALHRSYLTPGDSSSGWTAGAAAYYVGYLQPRTFLLKYNENGTITDAVDCALDPLSETKCTLKSFTVEKGIYQTSNFRVQPTESIVRFPNITNLCPFGEVFNATRFASVYAWNRKRISNCVADYSVLYNSASFSTFKCYGVSPTKLNDLCFTNVYADSFVIRGDEVRQIAPGQTGKIADYNYKLPDDFTGCVIAWNSNNLDSKVGGNYNYLYRLFRKSNLKPFERDISTEIYQAGSTPCNGVEGFNCYFPLQSYGFQPTNGVGYQPYRVVVLSFELLHAPATVCGPKKSTNLVKNKCVNFNFNGLTGTGVLTESNKKFLPFQQFGRDIADTTDAVRDPQTLEILDITPCSFGGVSVITPGTNTSNQVAVLYQDVNCTEVPVAIHADQLTPTWRVYSTGSNVFQTRAGCLIGAEHVNNSYECDIPIGAGICASYQTQTNSPRRARSVASQSIIAYTMSLGAENSVAYSNNSIAIPTNFTISVTTEILPVSMTKTSVDCTMYICGDSTECSNLLLQYGSFCTQLNRALTGIAVEQDKNTQEVFAQVKQIYKTPPIKDFGGFNFSQILPDPSKPSKRSFIEDLLFNKVTLADAGFIKQYGDCLGDIAARDLICAQKFNGLTVLPPLLTDEMIAQYTSALLAGTITSGWTFGAGAALQIPFAMQMAYRFNGIGVTQNVLYENQKLIANQFNSAIGKIQDSLSSTASALGKLQDVVNQNAQALNTLVKQLSSNFGAISSVLNDILSRLDPPEAEVQIDRLITGRLQSLQTYVTQQLIRAAEIRASANLAATKMSECVLGQSKRVDFCGKGYHLMSFPQSAPHGVVFLHVTYVFAQEKNFTTAPAICHDGKAHFPREGVFVSNGTHWFVTQRNFYEPQIITTDNTFVSGNCDVVIGIVNNTVYDPLQPELDSGGSGYIPEAPRDGQAYVRKDGEWVLLSTFL

SEQ ID NO: 9856 - protein, 1173 aa, Artificial Sequence
  SARS-CoV-2/bat/Yunnan/RaTG13/2013__EPI_ISL_402131 spike protein (1-1143)(K982P_V983P_P1065F) Foldon construct
MFVFLVLLPLVSSQCVNLTTRTQLPPAYTNSSTRGVYYPDKVFRSSVLHLTQDLFLPFFSNVTWFHAIHVSGTNGIKRFDNPVLPFNDGVYFASTEKSNIIRGWIFGTTLDSKTQSLLIVNNATNVVIKVCEFQFCNDPFLGVYYHKNNKSWMESEFRVYSSANNCTFEYVSQPFLMDLEGKQGNFKNLREFVFKNIDGYFKIYSKHTPINLVRDLPPGFSALEPLVDLPIGINITRFQTLLALHRSYLTPGDSSSGWTAGAAAYYVGYLQPRTFLLKYNENGTITDAVDCALDPLSETKCTLKSFTVEKGIYQTSNFRVQPTDSIVRFPNITNLCPFGEVFNATTFASVYAWNRKRISNCVADYSVLYNSTSFSTFKCYGVSPTKLNDLCFTNVYADSFVITGDEVRQIAPGQTGKIADYNYKLPDDFTGCVIAWNSKHIDAKEGGNFNYLYRLFRKANLKPFERDISTEIYQAGSKPCNGQTGLNCYYPLYRYGFYPTDGVGHQPYRVVVLSFELLNAPATVCGPKKSTNLVKNKCVNFNFNGLTGTGVLTESNKKFLPFQQFGRDIADTTDAVRDPQTLEILDITPCSFGGVSVITPGTNASNQVAVLYQDVNCTEVPVAIHADQLTPTWRVYSTGSNVFQTRAGCLIGAEHVNNSYECDIPIGAGICASYQTQTNSRSVASQSIIAYTMSLGAENSVAYSNNSIAIPTNFTISVTTEILPVSMTKTSVDCTMYICGDSTECSNLLLQYGSFCTQLNRALTGIAVEQDKNTQEVFAQVKQIYKTPPIKDFGGFNFSQILPDPSKPSKRSFIEDLLFNKVTLADAGFIKQYGDCLGDIAARDLICAQKFNGLTVLPPLLTDEMIAQYTSALLAGTITSGWTFGAGAALQIPFAMQMAYRFNGIGVTQNVLYENQKLIANQFNSAIGKIQDSLSSTASALGKLQDVVNQNAQALNTLVKQLSSNFGAISSVLNDILSRLDPPEAEVQIDRLITGRLQSLQTYVTQQLIRAAEIRASANLAATKMSECVLGQSKRVDFCGKGYHLMSFPQSAPHGVVFLHVTYVFAQEKNFTTAPAICHDGKAHFPREGVFVSNGTHWFVTQRNFYEPQIITTDNTFVSGSCDVVIGIVNNTVYDPLQPELDSGGSGYIPEAPRDGQAYVRKDGEWVLLSTFL

SEQ ID NO: 9857 - protein, 1177 aa, Artificial Sequence
  SARS-CoV-2/Wuhan/HBCDC-HB-01/2019__EPI_ISL_402132 spike protein (1-1147)(K986P_V987P_P1069F) Foldon construct
MFVFLVLLPLVSSQCVNLTTRTQLPPAYTNSITRGVYYPDKVFRSSVLHSTQDLFLPFFSNVTWFHAIHVSGTNGTKRFDNPVLPFNDGVYFASTEKSNIIRGWIFGTTLDSKTQSLLIVNNATNVVIKVCEFQFCNDPFLGVYYHKNNKSWMESEFRVYSSANNCTFEYVSQPFLMDLEGKQGNFKNLREFVFKNIDGYFKIYSKHTPINLVRDLPQGFSALEPLVDLPIGINITRFQTLLALHRSYLTPGDSSSGWTAGAAAYYVGYLQPRTFLLKYNENGTITDAVDCALDPLSETKCTLKSFTVEKGIYQTSNFRVQPTESIVRFPNITNLCPFGEVFNATRFASVYAWNRKRISNCVADYSVLYNSASFSTFKCYGVSPTKLNDLCFTNVYADSFVIRGDEVRQIAPGQTGKIADYNYKLPDDFTGCVIAWNSNNLDSKVGGNYNYLYRLFRKSNLKPFERDISTEIYQAGSTPCNGVEGFNCYFPLQSYGFQPTNGVGYQPYRVVVLSFELLHAPATVCGPKKSTNLVKNKCVNFNFNGLTGTGVLTESNKKFLPFQQFGRDIADTTDAVRDPQTLEILDITPCSFGGVSVITPGTNTSNQVAVLYQDVNCTEVPVAIHADQLTPTWRVYSTGSNVFQTRAGCLIGAEHVNNSYECDIPIGAGICASYQTQTNSPRRARSVASQSIIAYTMSLGAENSVAYSNNSIAIPTNFTISVTTEILPVSMTKTSVDCTMYICGDSTECSNLLLQYGSFCTQLNRALTGIAVEQDKNTQEVFAQVKQIYKTPPIKDFGGFNFSQILPDPSKPSKRSFIEDLLFNKVTLADAGFIKQYGDCLGDIAARDLICAQKFNGLTVLPPLLTDEMIAQYTSALLAGTITSGWTFGAGAALQIPFAMQMAYRFNGIGVTQNVLYENQKLIANQFNSAIGKIQDSLSSTASALGKLQDVVNQNAQALNTLVKQLSSNFGAISSVLNDILSRLDPPEAEVQIDRLITGRLQSLQTYVTQQLIRAAEIRASANLAATKMSECVLGQSKRVDFCGKGYHLMSFPQSAPHGVVFLHVTYVFAQEKNFTTAPAICHDGKAHFPREGVFVSNGTHWFVTQRNFYEPQIITTDNTFVSGNCDVVIGIVNNTVYDPLQPELDSGGSGYIPEAPRDGQAYVRKDGEWVLLSTFL

SEQ ID NO: 9858 - protein, 1177 aa, Artificial Sequence
  SARS-CoV-2/Guangdong/20SF028/2020__EPI_ISL_403936 spike protein (1-1147)(K986P_V987P_P1069F) Foldon construct
MFVFLVLLPLVSSQCVNLTTRTQLPPAYTNSFTRGVYYPDKVFRSSVLYSTQDLFLPFFSNVTWFHAIHVSGTNGTKRFDNPVLPFNDGVYFASTEKSNIIRGWIFGTTLDSKTQSLLIVNNATNVVIKVCEFQFCNDPFLGVYYHKNNKSWMESEFRVYSSANNCTFEYVSQPFLMDLEGKQGNFKNLREFVFKNIDGYFKIYSKHTPINLVRDLPQGFSALEPLVDLPIGINITRFQTLLALHRSYLTPGDSSSGWTAGAAAYYVGYLQPRTFLLKYNENGTITDAVDCALDPLSETKCTLKSFTVEKGIYQTSNFRVQPTESIVRFPNITNLCPFGEVFNATRFASVYAWNRKRISNCVADYSVLYNSASFSTFKCYGVSPTKLNDLCFTNVYADSFVIRGDEVRQIAPGQTGKIADYNYKLPDDFTGCVIAWNSNNLDSKVGGNYNYLYRLFRKSNLKPFERDISTEIYQAGSTPCNGVEGFNCYFPLQSYGFQPTNGVGYQPYRVVVLSFELLHAPATVCGPKKSTNLVKNKCVNFNFNGLTGTGVLTESNKKFLPFQQFGRDIADTTDAVRDPQTLEILDITPCSFGGVSVITPGTNTSNQVAVLYQDVNCTEVPVAIHADQLTPTWRVYSTGSNVFQTRAGCLIGAEHVNNSYECDIPIGAGICASYQTQTNSPRRARSVASQSIIAYTMSLGAENSVAYSNNSIAIPTNFTISVTTEILPVSMTKTSVDCTMYICGDSTECSNLLLQYGSFCTQLNRALTGIAVEQDKNTQEVFAQVKQIYKTPPIKDFGGFNFSQILPDPSKPSKRSFIEDLLFNKVTLADAGFIKQYGDCLGDIAARDLICAQKFNGLTVLPPLLTDEMIAQYTSALLAGTITSGWTFGAGAALQIPFAMQMAYRFNGIGVTQNVLYENQKLIANQFNSAIGKIQDSLSSTASALGKLQDVVNQNAQALNTLVKQLSSNFGAISSVLNDILSRLDPPEAEVQIDRLITGRLQSLQTYVTQQLIRAAEIRASANLAATKMSECVLGQSKRVDFCGKGYHLMSFPQSAPHGVVFLHVTYVFAQEKNFTTAPAICHDGKAHFPREGVFVSNGTHWFVTQRNFYEPQIITTDNTFVSGNCDVVIGIVNNTVYDPLQPELDSGGSGYIPEAPRDGQAYVRKDGEWVLLSTFL

SEQ ID NO: 9859 - protein, 1177 aa, Artificial Sequence
  SARS-CoV-2/Shenzhen/SZTH-001/2020__EPI_ISL_406592 spike protein (1-1147)(K986P_V987P_P1069F) Foldon construct
MFVFLVLLPLVSSQCVNLTTRTQLPPAYTNSFTRGVYYPDKVFRSSVLHSTQDLFLPFFSNVTWFHAIHVSGTNGTKRFDNPVLPFNDGVYFASTEKSNIIRGWIFGTTLDSKTQSLLIVNNATNVVIKVCEFQFCNDPFLGVYYHKNNKSWMESEFRVYSSANNCTFEYVSQPFLMDLEGKQGNFKNLREFVFKNIDGYFKIYSKHTPINLVRDLPQGFSALEPLVDLPIGINITRFQTLLALHRSYLTPGDSSSGWTAGAAAYYVGYLQPRTFLLKYNENGTITDAVDCALDPLSETKCTLKSFTVEKGIYQTSNFRVQPTESIVRFPNITNLCPFGEVFNATRFASVYAWNRKRISNCVADYSVLYNSASFSTFKCYGVSPTKLNDLCFTNVYADSFVIRGDEVRQIAPGQTGKIADYNYKLPDDFTGCVIAWNSNNLDSKVGGNYNYLYRLFRKSNLKPFERDISTEIYQAGSTPCNGVEGFNCYFPLQSYGFQPTNGVGYQPYRVVVLSFELLHAPATVCGPKKSTNLVKNKCVNFNFNGLTGTGVLTESNKKFLPFQQFGRDIADTTDAVRDPQTLEILDITPCSFGGVSVITPGTNTSNQVAVLYQDVNCTEVPVAIHADQLTPTWRVYSTGSNVFQTRAGCLIGAEHVNNSYECDIPIGAGICASYQTQTNSPRRARSVASQSIIAYTMSLGAENSVAYSNNSIAIPTNFTISVTTEILPVSMTKTSVDCTMYICGDSTECSNLLLQYGSFCTQLNRALTGIAVEQDKNTQEVFAQVKQIYKTPPIKDFGGFNFSQILPDPSKPSKRSFIEDLLFNKVTLADAGFIKQYGDCLGDIAARDLICAQKFNGLTVLPPLLTDEMIAQYTSALLAGTITSGWTFGAGAALQIPFAMQMAYRFNGIGVTQNVLYENQKLIANQFNSAIGKIQDSLSSTASALGKLQDVVNQNAQALNTLVKQLSSNFGAISSVLNDILSRLDPPEAEVQIDRLITGRLQSLQTYVTQQLIRAAEIRASANLAATKMSECVLGQSKRVDFCGKGYHLMSFPQSAPHGVVFLHVTYVFAQEKNFTTAPAICHDGKAHFPREGVFVSNGTHWFVTQRNFYEPQIITTDNTFVSGNCDVLIGIVNNTVYDPLQPELDSGGSGYIPEAPRDGQAYVRKDGEWVLLSTFL

SEQ ID NO: 9860 - protein, 1177 aa, Artificial Sequence
  SARS-CoV-2/Shenzhen/SZTH-004/2020__EPI_ISL_406595 spike protein (1-1147)(K986P_V987P_P1069F) Foldon construct
MFVFLVLLPLVSSQCVNLTTRTQLPPAYTNSFTRGVYYPDKVFRSSVLHSTQDLFLPFFSNVTWFHAIHVSGTNGTKRFDNPVLPFNDGVYFASTEKSNIIRGWIFGTTLDSKTQSLLIVNNATNVVIKVCEFQFCNDPFLGVYYHKNNKSWMESEFRVYSSANNCTFEYVSQPFLMDLEGKQGNFKNLREFVFKNIDGYFKIYSKHTPINLVRDLPQGFSALEPLVDLPIGINITRFQTLLALHRSYLTPGDSSSGWTAGAAAYYVGYLQPRTFLLKYNENGTITDAVDCALDPLSETKCTLKSFTVEKGIYQTSNFRVQPTESIVRFPNITNLCPFGEVFNATRFASVYAWDRKRISNCVAYYSVLYNSASFSTFKCYGVSPTKLNDLCFTNVYADSFVIRGDEVRQIAPGQTGKIADYNYKLPDDFTGCVIAWNSNNLDSKVGGNYNYLYRLFRKSNLKPFERDISTEIYQAGSTPCNGVEGFNCYFPLQSYGFQPTNGVGYQPYRVVVLSFELLHAPATVCGPKKSTNLVKNKCVNFNFNGLTGTGVLTESNKKFLPFQQFGRDIADTTDAVRDPQTLEILDITPCSFGGVSVITPGTNTSNQVAVLYQDVNCTEVPVAIHADQLTPTWRVYSTGSNVFQTRAGCLIGAEHVNNSYECDIPIGAGICASYQTQTNSPRRARSVASQSIIAYTMSLGAENSVAYSNNSIAIPTNFTISVTTEILPVSMTKTSVDCTMYICGDSTECSNLLLQYGSFCTQLNRALTGIAVEQDKNTQEVFAQVKQIYKTPPIKDFGGFNFSQILPDPSKPSKRSFIEDLLFNKVTLADAGFIKQYGDCLGDIAARDLICAQKFNGLTVLPPLLTDEMIAQYTSALLAGTITSGWTFGAGAALQIPFAMQMAYRFNGIGVTQNVLYENQKLIANQFNSAIGKIQDSLSSTASALGKLQDVVNQNAQALNTLVKQLSSNFGAISSVLNDILSRLDPPEAEVQIDRLITGRLQSLQTYVTQQLIRAAEIRASANLAATKMSECVLGQSKRVDFCGKGYHLMSFPQSAPHGVVFLHVTYVFAQEKNFTTAPAICHDGKAHFPREGVFVSNGTHWFVTQRNFYEPQIITTDNTFVSGNCDVVIGIVNNTVYDPLQPELDSGGSGYIPEAPRDGQAYVRKDGEWVLLSTFL

SEQ ID NO: 9861 - protein, 1177 aa, Artificial Sequence
  SARS-CoV-2/France/IDF0372/2020__EPI_ISL_406596 spike protein (1-1147)(K986P_V987P_P1069F) Foldon construct
MFVFLVLLPLVSSQCVNLTTRTQLPPAYTNSFTRGVYYPDKVFRSSVLHSTQDLFLPFFSNVTWFHAIHVSGTNGTKRFDNPVLPFNDGVYFASTEKSNIIRGWIFGTTLDSKTQSLLIVNNATNVVIKVCEFQFCNDPFLGVYYHKNNKSWMESEFRVYSSANNCTFEYVSQPFLMDLEGKQGNFKNLREFVFKNIDGYFKIYSKHTPINLVRDLPQGFSALEPLVDLPIGINITRFQTLLALHRSYLTPGDSSSGWTAGAAAYYVGYLQPRTFLLKYNENGTITDAVDCALDPLSETKCTLKSFTVEKGIYQTSNFRVQPTESIVRFPNITNLCPFGEVFNATRFASVYAWNRKRISNCVADYSFLYNSASFSTFKCYGVSPTKLNDLCFTNVYADSFVIRGDEVRQIAPGQTGKIADYNYKLPDDFTGCVIAWNSNNLDSKVGGNYNYLYRLFRKSNLKPFERDISTEIYQAGSTPCNGVEGFNCYFPLQSYGFQPTNGVGYQPYRVVVLSFELLHAPATVCGPKKSTNLVKNKCVNFNFNGLTGTGVLTESNKKFLPFQQFGRDIADTTDAVRDPQTLEILDITPCSFGGVSVITPGTNTSNQVAVLYQDVNCTEVPVAIHADQLTPTWRVYSTGSNVFQTRAGCLIGAEHVNNSYECDIPIGAGICASYQTQTNSPRRARSVASQSIIAYTMSLGAENSVAYSNNSIAIPTNFTISVTTEILPVSMTKTSVDCTMYICGDSTECSNLLLQYGSFCTQLNRALTGIAVEQDKNTQEVFAQVKQIYKTPPIKDFGGFNFSQILPDPSKPSKRSFIEDLLFNKVTLADAGFIKQYGDCLGDIAARDLICAQKFNGLTVLPPLLTDEMIAQYTSALLAGTITSGWTFGAGAALQIPFAMQMAYRFNGIGVTQNVLYENQKLIANQFNSAIGKIQDSLSSTASALGKLQDVVNQNAQALNTLVKQLSSNFGAISSVLNDILSRLDPPEAEVQIDRLITGRLQSLQTYVTQQLIRAAEIRASANLAATKMSECVLGQSKRVDFCGKGYHLMSFPQSAPHGVVFLHVTYVFAQEKNFTTAPAICHDGKAHFPREGVFVSNGTHWFVTQRNFYEPQIITTDNTFVSGNCDVVIGIVNNTVYDPLQPELDSGGSGYIPEAPRDGQAYVRKDGEWVLLSTFL

SEQ ID NO: 9862 - protein, 1177 aa, Artificial Sequence
  SARS-CoV-2/Australia/VIC01/2020__EPI_ISL_406844 spike protein (1-1147)(K986P_V987P_P1069F) Foldon construct
MFVFLVLLPLVSSQCVNLTTRTQLPPAYTNSFTRGVYYPDKVFRSSVLHSTQDLFLPFFSNVTWFHAIHVSGTNGTKRFDNPVLPFNDGVYFASTEKSNIIRGWIFGTTLDSKTQSLLIVNNATNVVIKVCEFQFCNDPFLGVYYHKNNKSWMESEFRVYSSANNCTFEYVSQPFLMDLEGKQGNFKNLREFVFKNIDGYFKIYSKHTPINLVRDLPQGFSALEPLVDLPIGINITRFQTLLALHRRYLTPGDSSSGWTAGAAAYYVGYLQPRTFLLKYNENGTITDAVDCALDPLSETKCTLKSFTVEKGIYQTSNFRVQPTESIVRFPNITNLCPFGEVFNATRFASVYAWNRKRISNCVADYSVLYNSASFSTFKCYGVSPTKLNDLCFTNVYADSFVIRGDEVRQIAPGQTGKIADYNYKLPDDFTGCVIAWNSNNLDSKVGGNYNYLYRLFRKSNLKPFERDISTEIYQAGSTPCNGVEGFNCYFPLQSYGFQPTNGVGYQPYRVVVLSFELLHAPATVCGPKKSTNLVKNKCVNFNFNGLTGTGVLTESNKKFLPFQQFGRDIADTTDAVRDPQTLEILDITPCSFGGVSVITPGTNTSNQVAVLYQDVNCTEVPVAIHADQLTPTWRVYSTGSNVFQTRAGCLIGAEHVNNSYECDIPIGAGICASYQTQTNSPRRARSVASQSIIAYTMSLGAENSVAYSNNSIAIPTNFTISVTTEILPVSMTKTSVDCTMYICGDSTECSNLLLQYGSFCTQLNRALTGIAVEQDKNTQEVFAQVKQIYKTPPIKDFGGFNFSQILPDPSKPSKRSFIEDLLFNKVTLADAGFIKQYGDCLGDIAARDLICAQKFNGLTVLPPLLTDEMIAQYTSALLAGTITSGWTFGAGAALQIPFAMQMAYRFNGIGVTQNVLYENQKLIANQFNSAIGKIQDSLSSTASALGKLQDVVNQNAQALNTLVKQLSSNFGAISSVLNDILSRLDPPEAEVQIDRLITGRLQSLQTYVTQQLIRAAEIRASANLAATKMSECVLGQSKRVDFCGKGYHLMSFPQSAPHGVVFLHVTYVFAQEKNFTTAPAICHDGKAHFPREGVFVSNGTHWFVTQRNFYEPQIITTDNTFVSGNCDVVIGIVNNTVYDPLQPELDSGGSGYIPEAPRDGQAYVRKDGEWVLLSTFL

SEQ ID NO: 9863 - protein, 1177 aa, Artificial Sequence
  SARS-CoV-2/Germany/BavPat1/2020__EPI_ISL_406862 spike protein (1-1147)(K986P_V987P_P1069F) Foldon construct
MFVFLVLLPLVSSQCVNLTTRTQLPPAYTNSFTRGVYYPDKVFRSSVLHSTQDLFLPFFSNVTWFHAIHVSGTNGTKRFDNPVLPFNDGVYFASTEKSNIIRGWIFGTTLDSKTQSLLIVNNATNVVIKVCEFQFCNDPFLGVYYHKNNKSWMESEFRVYSSANNCTFEYVSQPFLMDLEGKQGNFKNLREFVFKNIDGYFKIYSKHTPINLVRDLPQGFSALEPLVDLPIGINITRFQTLLALHRSYLTPGDSSSGWTAGAAAYYVGYLQPRTFLLKYNENGTITDAVDCALDPLSETKCTLKSFTVEKGIYQTSNFRVQPTESIVRFPNITNLCPFGEVFNATRFASVYAWNRKRISNCVADYSVLYNSASFSTFKCYGVSPTKLNDLCFTNVYADSFVIRGDEVRQIAPGQTGKIADYNYKLPDDFTGCVIAWNSNNLDSKVGGNYNYLYRLFRKSNLKPFERDISTEIYQAGSTPCNGVEGFNCYFPLQSYGFQPTNGVGYQPYRVVVLSFELLHAPATVCGPKKSTNLVKNKCVNFNFNGLTGTGVLTESNKKFLPFQQFGRDIADTTDAVRDPQTLEILDITPCSFGGVSVITPGTNTSNQVAVLYQGVNCTEVPVAIHADQLTPTWRVYSTGSNVFQTRAGCLIGAEHVNNSYECDIPIGAGICASYQTQTNSPRRARSVASQSIIAYTMSLGAENSVAYSNNSIAIPTNFTISVTTEILPVSMTKTSVDCTMYICGDSTECSNLLLQYGSFCTQLNRALTGIAVEQDKNTQEVFAQVKQIYKTPPIKDFGGFNFSQILPDPSKPSKRSFIEDLLFNKVTLADAGFIKQYGDCLGDIAARDLICAQKFNGLTVLPPLLTDEMIAQYTSALLAGTITSGWTFGAGAALQIPFAMQMAYRFNGIGVTQNVLYENQKLIANQFNSAIGKIQDSLSSTASALGKLQDVVNQNAQALNTLVKQLSSNFGAISSVLNDILSRLDPPEAEVQIDRLITGRLQSLQTYVTQQLIRAAEIRASANLAATKMSECVLGQSKRVDFCGKGYHLMSFPQSAPHGVVFLHVTYVFAQEKNFTTAPAICHDGKAHFPREGVFVSNGTHWFVTQRNFYEPQIITTDNTFVSGNCDVVIGIVNNTVYDPLQPELDSGGSGYIPEAPRDGQAYVRKDGEWVLLSTFL

SEQ ID NO: 9864 - protein, 1177 aa, Artificial Sequence
  SARS-CoV-2/Wuhan/HBCDC-HB-02/2020__EPI_ISL_412978 spike protein (1-1147)(K986P_V987P_P1069F) Foldon construct
MFVFLVLLPLVSSQCVNLTTRTQLPPAYTNSFTRGVYYPDKVFRSSVLHSTQDLFLPFFSNVTWFHAIHVSGTNGTKRFDNPVLPFNDGVYFASTEKSNIIRGWIFGTTLDSKTQSLLIVNNATNVVIKVCEFQFCNDPFLGVYYHKNNKSWMESEFRVYSSANNCTFEYVSQPFLMDLEGKQGNFKNLREFVFKNIDGYFKIYSKHTPINLVRDLPQGFSALEPLVDLPIGINITRFQTLLALHRSYLTPGDSSSGWTAGAAAYYVGYLQPRTFLLKYNENGTITDAVDCALDPLSETKCTLKSFTVEKGIYQTSNFRVQPTESIVRFPNITNLCPFGEVFNATRFASVYAWNRKRISNCVADYSVLYNSASFSTFKCYGVSPTKLNDLCFTNVYADSFVIRGDEVRQIAPGQTGKIADYNYKLPDDFTGCVIAWNSNNLDSKVGGNYNYLYRLFRKSNLKPFERDISTEIYQAGSTPCNGVEGFNCYFPLQSYGFQPTNGVGYQPYRVVVLSFELLHAPATVCGPKKSTNLVKNKCVNFNFNGLTGTGVLTESNKKFLPFQQFGRDIADTTDAVRDPQTLEILDITPCSFGGVSVITPGTNTSNQVAVLYQDVNCTEVPVAIHADQLTPTWRVYSTGSNVFQTRAGCLIGAEHVNNSYECDIPIGAGICASYQTQTNSPRRARSVASQSIIAYTMSLGAENSVAYSNNSIAIPTNFTISVTTEILPVSMTKTSVDCTMYICGDSTECSNFLLQYGSFCTQLNRALTGIAVEQDKNTQEVFAQVKQIYKTPPIKDFGGFNFSQILPDPSKPSKRSFIEDLLFNKVTLADAGFIKQYGDCLGDIAARDLICAQKFNGLTVLPPLLTDEMIAQYTSALLAGTITSGWTFGAGAALQIPFAMQMAYRFNGIGVTQNVLYENQKLIANQFNSAIGKIQDSLSSTASALGKLQDVVNQNAQALNTLVKQLSSNFGAISSVLNDILSRLDPPEAEVQIDRLITGRLQSLQTYVTQQLIRAAEIRASANLAATKMSECVLGQSKRVDFCGKGYHLMSFPQSAPHGVVFLHVTYVFAQEKNFTTAPAICHDGKAHFPREGVFVSNGTHWFVTQRNFYEPQIITTDNTFVSGNCDVVIGIVNNTVYDPLQPELDSGGSGYIPEAPRDGQAYVRKDGEWVLLSTFL

SEQ ID NO: 9865 - protein, 1177 aa, Artificial Sequence
  SARS-CoV-2/Australia/QLD02/2020__EPI_ISL_407896 spike protein (1-1147)(K986P_V987P_P1069F) Foldon construct
MFVFLVLLPLVSSQCVNLTTRTQLPPAYTNSFTRGVYYPDKVFRSSVLHSTQDLFLPFFSNVTWFHAIHVSGTNGTKRFDNPVLPFNDGVYFASTEKSNIIRGWIFGTTLDSKTQSLLIVNNATNVVIKVCEFQFCNDPFLGVYYHKNNKSWMESEFRVYSSANNCTFEYVSQPFLMDLEGKQGNFKNLREFVFKNIDGYFKIYSKHTPINLVRDLPQGFSALEPLVDLPIGINITRFQTLLALHRSYLTPGDSSSGWTAGAAAYYVGYLQPRTFLLKYNENGTITDAVDCALDPLSETKCTLKSFTVEKGIYQTSNFRVQPTESIVRFPNITNLCPFGEVFNATRFASVYAWNRKRISNCVADYSVLYNSASFSTFKCYGVSPTKLNDLCFTNVYADSFVIRGDEVRQIAPGQTGKIADYNYKLPDDFTGCVIAWNSNNLDSKVGGNYNYLYRLFRKSNLKPFERDISTEIYQAGSTPCNGVEGFNCYFPLQSYGFQPTNGVGYQPYRVVVLSFELLHAPATVCGPKKSTNLVKNKCVNFNFNGLTGTGVLTESNKKFLPFQQFGRDIADTTDAVRDPQTLEILDITPCSFGGVSVITPGTNTSNQVAVLYQDVNCTEVPVAIHADQLTPTWRVYSTGSNVFQTRAGCLIGAEHVNNSYECDIPIGAGICASYQTQTNSPRRARSVASQSIIAYTMSLGAENSVAYSNNSIAIPTNFTISVTTEILPVSMTKTSVDCTMYICGDSTECSNLLLQYGSFCTQLNRALTGIAVEQDKNTQEVFAQVKQIYKTPPIKDFGGFNFSQILPDPSKPSKRSFIEDLLFNKVTLADAGFIKQYGDCLGDIAARDLICAQKFNGLTVLPPLLTDEMIAQYTSALLAGTITSGWTFGAGAALQIPFAMQMAYRFNGIGVTQNVLYENQKLIANQFNSAIGKIQDSLSSTASALGKLQDVVNQNAQALNTLVKQLSSNFGAISSVLNDILSRLDPPEAEVQIDRLITGRLQSLQTYVTQQLIRAAEIRASANLAATKMSECVLGQSKRVDFCGKGYHLMSFPQSAPHGVVFLHVTYVFAQEKNFTTAPAICHDGKAHFPREGVFVSNGTHWFVTQRNFYEPQIITTDNTFVSGNCDVVIGIVNNTVYDPLQLELDSGGSGYIPEAPRDGQAYVRKDGEWVLLSTFL

SEQ ID NO: 9866 - protein, 1177 aa, Artificial Sequence
  SARS-CoV-2/India/1-31/2020__EPI_ISL_413523 spike protein (1-1147)(K986P_V987P_P1069F) Foldon construct
MFVFLVLLPLVSSQCVNLTTRTQLPPAYTNSFTRGVYYPDKVFRSSVLHSTQDLFLPFFSNVTWFHAIHVSGTNGTKRFDNPVLPFNDGVYFASTEKSNIIRGWIFGTTLDSKTQSLLIVNNATNVVIKVCEFQFCNDPFLGVYYHKNNKSWMESEFRVYSSANNCTFEYVSQPFLMDLEGKQGNFKNLREFVFKNIDGYFKIYSKHTPINLVRDLPQGFSALEPLVDLPIGINITRFQTLLALHRSYLTPGDSSSGWTAGAAAYYVGYLQPRTFLLKYNENGTITDAVDCALDPLSETKCTLKSFTVEKGIYQTSNFRVQPTESIVRFPNITNLCPFGEVFNATRFASVYAWNRKRISNCVADYSVLYNSASFSTFKCYGVSPTKLNDLCFTNVYADSFVIRGDEVRQIAPGQTGKIADYNYKLPDDFTGCVIAWNSNNLDSKVGGNYNYLYRLFRKSNLKPFERDISTEIYQAGSTPCNGVEGFNCYFPLQSYGFQPTNGVGYQPYRVVVLSFELLHAPATVCGPKKSTNLVKNKCVNFNFNGLTGTGVLTESNKKFLPFQQFGRDIADTTDAVRDPQTLEILDITPCSFGGVSVITPGTNTSNQVAVLYQDVNCTEVPVAIHADQLTPTWRVYSTGSNVFQTRAGCLIGAEHVNNSYECDIPIGAGICASYQTQTNSPRRARSVASQSIIAYTMSLGAENSVAYSNNSIAIPTNFTISVTTEILPVSMTKTSVDCTMYICGDSTECSNLLLQYGSFCTQLNRALTGIAVEQDKNTQEVFAQVKQIYKTPPIKDFGGFNFSQILPDPSKPSKRSFIEDLLFNKVTLADAGFIKQYGDCLGDIAARDLICAQKFNGLTVLPPLLTDEMIAQYTSALLAGTITSGWTFGAGAALQIPFAMQMAYRFNGIGVTQNVLYENQKLIANQFNSVIGKIQDSLSSTASALGKLQDVVNQNAQALNTLVKQLSSNFGAISSVLNDILSRLDPPEAEVQIDRLITGRLQSLQTYVTQQLIRAAEIRASANLAATKMSECVLGQSKRVDFCGKGYHLMSFPQSAPHGVVFLHVTYVFAQEKNFTTAPAICHDGKAHFPREGVFVSNGTHWFVTQRNFYEPQIITTDNTFVSGNCDVVIGIVNNTVYDPLQPELDSGGSGYIPEAPRDGQAYVRKDGEWVLLSTFL

SEQ ID NO: 9867 - protein, 1177 aa, Artificial Sequence
  SARS-CoV-2/Guangdong/GD2020087-P0008/2020__EPI_ISL_413863 spike protein (1-1147)(K986P_V987P_P1069F) Foldon construct
MFVFLVLLPLVSSQCVNLTTRTQLPPAYTNSFTRGVYYPDKVFRSSVLHSTQDLFLPFFSNVTWFHAIHVSGTNGTKRFDNPVLPFNDGVYFASTEKSNIIRGWIFGTTLDSKTQSLLIVNNATNVVIKVCEFQFCNDPFLGVYYHKNNKSWMESEFRVYSSANNCTFEYVSQPFLMDLEGKQGNFKNLREFVFKNIDGYFKIYSKHTPINLVRDLPQGFSALEPLVDLPIGINITRFQTLLALHRSYLTPGDSSSGWTAGAAAYYVGYLQPRTFLLKYNENGTITDAVDCALDPLSETKCTLKSFTVEKGIYQTSNFRVQPTESIVRFPNITNLCPFGEVFNATRFASVYAWNRKRISNCVADYSVLYNSASFSTFKCYGVSPTKLNDLCFTNVYADSFVIRGDEVREIAPGQTGKIADYNYKLPDDFTGCVIAWNSNNLDSKVGGNYNYLYRLFRKSNLKPFERDISTEIYQAGSTPCNGVEGFNCYFPLQSYGFQPTNGVGYQPYRVVVLSFELLHAPATVCGPKKSTNLVKNKCVNFNFNGLTGTGVLTESNKKFLPFQQFGRDIADTTDAVRDPQTLEILDITPCSFGGVSVITPGTNTSNQVAVLYQDVNCTEVPVAIHADQLTPTWRVYSTGSNVFQTRAGCLIGAEHVNNSYECDIPIGAGICASYQTQTNSPRRARSVASQSIIAYTMSLGAENSVAYSNNSIAIPTNFTISVTTEILPVSMTKTSVDCTMYICGDSTECSNLLLQYGSFCTQLNRALTGIAVEQDKNTQEVFAQVKQIYKTPPIKDFGGFNFSQILPDPSKPSKRSFIEDLLFNKVTLADAGFIKQYGDCLGDIAARDLICAQKFNGLTVLPPLLTDEMIAQYTSALLAGTITSGWTFGAGAALQIPFAMQMAYRFNGIGVTQNVLYENQKLIANQFNSAIGKIQDSLSSTASALGKLQDVVNQNAQALNTLVKQLSSNFGAISSVLNDILSRLDPPEAEVQIDRLITGRLQSLQTYVTQQLIRAAEIRASANLAATKMSECVLGQSKRVDFCGKGYHLMSFPQSAPHGVVFLHVTYVFAQEKNFTTAPAICHDGKAHFPREGVFVSNGTHWFVTQRNFYEPQIITTDNTFVSGNCDVVIGIVNNTVYDPLQPELDSGGSGYIPEAPRDGQAYVRKDGEWVLLSTFL

SEQ ID NO: 9868 - protein, 1177 aa, Artificial Sequence
  SARS-CoV-2/Sweden/01/2020__EPI_ISL_411951 spike protein (1-1147)(K986P_V987P_P1069F) Foldon construct
MFVFLVLLPLVSSQCVNLTTRTQLPPAYTNSFTRGVYYPDKVFRSSVLHSTQDLFLPFFSNVTWFHAIHVSGTNGTKRFDNPVLPFNDGVYFASTEKSNIIRGWIFGTTLDSKTQSLLIVNNATNVVIKVCEFQFCNDPFLGVYYHKNNKSWMESEFRVYSSANNCTFEYVSQPFLMDLEGKQGNFKNLREFVFKNIDGYFKIYSKHTPINLVRDLPQGFSALEPLVDLPIGINITRFQTLLALHRSYLTPGDSSSGWTAGAAAYYVGYLQPRTFLLKYNENGTITDAVDCALDPLSETKCTLKSFTVEKGIYQTSNFRVQPTESIVRFPNITNLCPFGEVFNATRFASVYAWNRKRISNCVADYSVLYNSASFSTFKCYGVSPTKLNDLCFTNVYADSFVIRGDEVRQIAPGQTGKIADYNYKLPDDFTGCVIAWNSNNLDSKVGGNYNYLYRLFRKSNLKPFERDISTEIYQAGSTPCNGVEGFNCYFPLQSYGFQPTNGVGYQPYRVVVLSFELLHAPATVCGPKKSTNLVKNKCVNFNFNGLTGTGVLTESNKKFLPFQQFGRDIADTTDAVRDPQTLEILDITPCSFGGVSVITPGTNTSNQVAVLYQDVNCTEVPVAIHADQLTPTWRVYSTGSNVFQTRAGCLIGAEHVNNSYECDIPIGAGICASYQTQTNSPRRARSVASQSIIAYTMSLGAENSVAYSNNSIAIPTNFTISVTTEILPVSMTKTSVDCTMYICGDSTECSNLLLQYGSFCTQLNRALTGIAVEQDKNTQEVFAQVKQIYKTPPIKDCGGFNFSQILPDPSKPSKRSFIEDLLFNKVTLADAGFIKQYGDCLGDIAARDLICAQKFNGLTVLPPLLTDEMIAQYTSALLAGTITSGWTFGAGAALQIPFAMQMAYRFNGIGVTQNVLYENQKLIANQFNSAIGKIQDSLSSTASALGKLQDVVNQNAQALNTLVKQLSSNFGAISSVLNDILSRLDPPEAEVQIDRLITGRLQSLQTYVTQQLIRAAEIRASANLAATKMSECVLGQSKRVDFCGKGYHLMSFPQSAPHGVVFLHVTYVFAQEKNFTTAPAICHDGKAHFPREGVFVSNGTHWFVTQRNFYEPQIITTDNTFVSGNCDVVIGIVNNTVYDPLQPELDSGGSGYIPEAPRDGQAYVRKDGEWVLLSTFL

SEQ ID NO: 9869 - protein, 1177 aa, Artificial Sequence
  SARS-CoV-2/Tianmen/HBCDC-HB-07/2020__EPI_ISL_412983 spike protein (1-1147)(K986P_V987P_P1069F) Foldon construct
MFVFLVLLPLVSSQCVNLTTRTQLPPAYTNSFTRGVYYPDKVFRSSVLHSTQDLFLPFFSNVTWFHAIHVSGTNGTKRFDNPVLPFNDGVYFASTEKSNIIRGWIFGTTLDSKTQSLLIVNNATNVVIKVCEFQFCNDPFLGVYYHKNNKSWMESEFRVYSSANNCTFEYVSQPFLMDLEGKQGNFKNLREFVFKNIDGYFKIYSKHTPINLVRDLPQGFSALEPLVDLPIGINITRFQTLLALHRSYLTPGDSSSGWTAGAAAYYVGYLQPRTFLLKYNENGTITDAVDCALDPLSETKCTLKSFTVEKGIYQTSNFRVQPTESIVRFPNITNLCPFGEVFNATRFASVYAWNRKRISNCVADYSVLYNSASFSTFKCYGVSPTKLNDLCFTNVYADSFVIRGDEVRQIAPGQTGKIADYNYKLPDDFTGCVIAWNSNNLDSKVGGNYNYLYRLFRKSNLKPFERDISTEIYQAGSTPCNGVEGFNCYFPLQSYGFQPTNGVGYQPYRVVVLSFELLHAPATVCGPKKSTNLVKNKCVNFNFNGLTGTGVLTESNKKFLPFQQFGRDIADTTDAVRDPQTLEILDITPCSFGGVSVITPGTNTSNQVAVLYQDLNCTEVPVAIHADQLTPTWRVYSTGSNVFQTRAGCLIGAEHVNNSYECDIPIGAGICASYQTQTNSPRRARSVASQSIIAYTMSLGAENSVAYSNNSIAIPTNFTISVTTEILPVSMTKTSVDCTMYICGDSTECSNLLLQYGSFCTQLNRALTGIAVEQDKNTQEVFAQVKQIYKTPPIKDFGGFNFSQILPDPSKPSKRSFIEDLLFNKVTLADAGFIKQYGDCLGDIAARDLICAQKFNGLTVLPPLLTDEMIAQYTSALLAGTITSGWTFGAGAALQIPFAMQMAYRFNGIGVTQNVLYENQKLIANQFNSAIGKIQDSLSSTASALGKLQDVVNQNAQALNTLVKQLSSNFGAISSVLNDILSRLDPPEAEVQIDRLITGRLQSLQTYVTQQLIRAAEIRASANLAATKMSECVLGQSKRVDFCGKGYHLMSFPQSAPHGVVFLHVTYVFAQEKNFTTAPAICHDGKAHFPREGVFVSNGTHWFVTQRNFYEPQIITTDNTFVSGNCDVVIGIVNNTVYDPLQPELDSGGSGYIPEAPRDGQAYVRKDGEWVLLSTFL

SEQ ID NO: 9870 - protein, 1177 aa, Artificial Sequence
  SARS-CoV-2/Hong Kong/case42_VM20002493/2020__EPI_ISL_414527 spike protein (1-1147)(K986P_V987P_P1069F) Foldon construct
MFVFLVLLPLVSSQCVNLTTRTQLPPAYTNSFTRGVYYPDKVFRSSVLHSTQDLFLPFFSNVTWFHAIHVSGTNGTKRFDNPVLPFNDGVYFASTEKSNIIRGWIFGTTLDSKTQSLLIVNNATNVVIKVCEFQFCNDPFLGVYYHKNNKSWMESEFRVYSSANNCTFEYVSQPFLMDLEGKQGNFKNLREFVFKNIDGYFKIYSKHTPINLVRDLPQGFSALEPLVDLPIGINITRFQTLLALHRSYLTPGDSSSGWTAGAAAYYVGYLQPRTFLLKYNENGTITDAVDCALDPLSETKCTLKSFTVEKGIYQTSNFRVQPTESIVRFPNITNLCPFGEVFNATRFASVYAWNRKRISNCVADYSVLYNSASFSTFKCYGVSPTKLNDLCFTNVYADSFVIRGDEVRQIAPGQTGKIADYNYKLPDDFTGCVIAWNSNNLDSKVGGNYNYLYRLFRKSNLKPFERDISTEIYQAGSTPCNGVEGFNCYFPLQSYGFQPTNGVGYQPYRVVVLSFELLHAPATVCGPKKSTNLVKNKCVNFNFNGLTGTGVLTESNKKFLPFQQFGRDIADTTDAVRDPQTLEILDITPCSFGGVSVITPGTNTSNQVAVLYQDVNCTEVPVAIHADQLTPTWRVYSTGSNVFQTRAGCLIGAEHVNNSYECDIPIGAGICASYQTQTNSPRRARSVASQSIIAYTMSLGAENSVAYSNNSIAIPTNFAISVTTEILPVSMTKTSVDCTMYICGDSTECSNLLLQYGSFCTQLNRALTGIAVEQDKNTQEVFAQVKQIYKTPPIKDFGGFNFSQILPDPSKPSKRSFIEDLLFNKVTLADAGFIKQYGDCLGDIAARDLICAQKFNGLTVLPPLLTDEMIAQYTSALLAGTITSGWTFGAGAALQIPFAMQMAYRFNGIGVTQNVLYENQKLIANQFNSAIGKIQDSLSSTASALGKLQDVVNQNAQALNTLVKQLSSNFGAISSVLNDILSRLDPPEAEVQIDRLITGRLQSLQTYVTQQLIRAAEIRASANLAATKMSECVLGQSKRVDFCGKGYHLMSFPQSAPHGVVFLHVTYVFAQEKNFTTAPAICHDGKAHFPREGVFVSNGTHWFVTQRNFYEPQIITTDNTFVSGNCDVVIGIVNNTVYDPLQPELDSGGSGYIPEAPRDGQAYVRKDGEWVLLSTFL

SEQ ID NO: 9871 - protein, 1177 aa, Artificial Sequence
  SARS-CoV-2/USA/CruiseA-23/2020__EPI_ISL_414482 spike protein (1-1147)(K986P_V987P_P1069F) Foldon construct
MFVFLVLLPLVSSQCVNLTTRTQLPPAYTNSFTRGVYYPDKVFRSSVLHSTQDLFLPFFSNVTWFHAIHVSGTNGTKRFDNPVLPFNDGVYFASTEKSNIIRGWIFGTTLDSKTQSLLIVNNATNVVIKVCEFQFCNDPFLGVYYHKNNKSWMESEFRVYSSANNCTFEYVSQPFLMDLEVKQGNFKNLREFVFKNIDGYFKIYSKHTPINLVRDLPQGFSALEPLVDLPIGINITRFQTLLALHRSYLTPGDSSSGWTAGAAAYYVGYLQPRTFLLKYNENGTITDAVDCALDPLSETKCTLKSFTVEKGIYQTSNFRVQPTESIVRFPNITNLCPFGEVFNATRFASVYAWNRKRISNCVADYSVLYNSASFSTFKCYGVSPTKLNDLCFTNVYADSFVIRGDEVRQIAPGQTGKIADYNYKLPDDFTGCVIAWNSNNLDSKVGGNYNYLYRLFRKSNLKPFERDISTEIYQAGSTPCNGVEGFNCYFPLQSYGFQPTNGVGYQPYRVVVLSFELLHAPATVCGPKKSTNLVKNKCVNFNFNGLTGTGVLTESNKKFLPFQQFGRDIADTTDAVRDPQTLEILDITPCSFGGVSVITPGTNTSNQVAVLYQDVNCTEVPVAIHADQLTPTWRVYSTGSNVFQTRAGCLIGAEHVNNSYECDIPIGAGICASYQTQTNSPRRARSVASQSIIAYTMSLGAENSVAYSNNSIAIPTNFTISVTTEILPVSMTKTSVDCTMYICGDSTECSNLLLQYGSFCTQLNRALTGIAVEQDKNTQEVFAQVKQIYKTPPIKDFGGFNFSQILPDPSKPSKRSFIEDLLFNKVTLADAGFIKQYGDCLGDIAARDLICAQKFNGLTVLPPLLTDEMIAQYTSALLAGTITSGWTFGAGAALQIPFAMQMAYRFNGIGVTQNVLYENQKLIANQFNSAIGKIQDSLSSTASALGKLQDVVNQNAQALNTLVKQLSSNFGAISSVLNDILSRLDPPEAEVQIDRLITGRLQSLQTYVTQQLIRAAEIRASANLAATKMSECVLGQSKRVDFCGKGYHLMSFPQSAPHGVVFLHVTYVFAQEKNFTTAPAICHDGKAHFPREGVFVSNGTHWFVTQRNFYEPQIITTDNTFVSGNCDVVIGIVNNTVYDPLQPELDSGGSGYIPEAPRDGQAYVRKDGEWVLLSTFL

SEQ ID NO: 9872 - protein, 1177 aa, Artificial Sequence
  SARS-CoV-2/Hong Kong/case85_VM20002868/2020__EPI_ISL_414519 spike protein (1-1147)(K986P_V987P_P1069F) Foldon construct
MFVFLVLVPLVSSQCVNLTTRTQLPPAYTNSFTRGVYYPDKVFRSSVLHSTQDLFLPFFSNVTWFHAIHVSGTNGTKRFDNPVLPFNDGVYFASTEKSNIIRGWIFGTTLDSKTQSLLIVNNATNVVIKVCEFQFCNDPFLGVYYHKNNKSWMESEFRVYSSANNCTFEYVSQPFLMDLEGKQGNFKNLREFVFKNIDGYFKIYSKHTPINLVRDLPQGFSALEPLVDLPIGINITRFQTLLALHRSYLTPGDSSSGWTAGAAAYYVGYLQPRTFLLKYNENGTITDAVDCALDPLSETKCTLKSFTVEKGIYQTSNFRVQPTESIVRFPNITNLCPFGEVFNATRFASVYAWNRKRISNCVADYSVLYNSASFSTFKCYGVSPTKLNDLCFTNVYADSFVIRGDEVRQIAPGQTGKIADYNYKLPDDFTGCVIAWNSNNLDSKVGGNYNYLYRLFRKSNLKPFERDISTEIYQAGSTPCNGVEGFNCYFPLQSYGFQPTNGVGYQPYRVVVLSFELLHAPATVCGPKKSTNLVKNKCVNFNFNGLTGTGVLTESNKKFLPFQQFGRDIADTTDAVRDPQTLEILDITPCSFGGVSVITPGTNTSNQVAVLYQDVNCTEVPVAIHADQLTPTWRVYSTGSNVFQTRAGCLIGAEHVNNSYECDIPIGAGICASYQTQTNSPRRARSVASQSIIAYTMSLGAENSVAYSNNSIAIPTNFTISVTTEILPVSMTKTSVDCTMYICGDSTECSNLLLQYGSFCTQLNRALTGIAVEQDKNTQEVFAQVKQIYKTPPIKDFGGFNFSQILPDPSKPSKRSFIEDLLFNKVTLADAGFIKQYGDCLGDIAARDLICAQKFNGLTVLPPLLTDEMIAQYTSALLAGTITSGWTFGAGAALQIPFAMQMAYRFNGIGVTQNVLYENQKLIANQFNSAIGKIQDSLSSTASALGKLQDVVNQNAQALNTLVKQLSSNFGAISSVLNDILSRLDPPEAEVQIDRLITGRLQSLQTYVTQQLIRAAEIRASANLAATKMSECVLGQSKRVDFCGKGYHLMSFPQSAPHGVVFLHVTYVFAQEKNFTTAPAICHDGKAHFPREGVFVSNGTHWFVTQRNFYEPQIITTDNTFVSGNCDVVIGIVNNTVYDPLQPELDSGGSGYIPEAPRDGQAYVRKDGEWVLLSTFL

SEQ ID NO: 9873 - protein, 1177 aa, Artificial Sequence; identical to SEQ ID NO: 9863
  SARS-CoV-2/England/200990660/2020__EPI_ISL_414523 spike protein (1-1147)(K986P_V987P_P1069F) Foldon construct

SEQ ID NO: 9874 - protein, 1177 aa, Artificial Sequence
  SARS-CoV-2/Australia/NSW09/2020__EPI_ISL_413595 spike protein (1-1147)(K986P_V987P_P1069F) Foldon construct
MFVFLVLLPLVSSQCVNLTTRTQLPPAYTNSFTRGVYYPDKVFRSSVLHSTQDLFLPFFSNVTWFHAIHVSGTNGTKRFDNPVLPFNDGVYFASTEKSNIIRGWIFGTTLDSKTQSLLIVNNATNVVIKVCEFQFCNDPFLGVYYHKNNKSWMESEFRVYSSANNCTFEYVSQPFLMDLEGKQGNFKNLREFVFKNIDGYFKIYSKHTPINLVRDLPQGFSALEPLVDLPIGINITRFQTLLALHRSYLTPGDSSSGWTAGAAAYYVGYLQPRTFLLKYNENGTITDAVDCALDPLSETKCTLKSFTVEKGIYQTSNFRVQPTESIVRFPNITNLCPFGEVFNATRFASVYAWNRKRISNCVADYSVLYNSASFSTFKCYGVSPTKLNDLCFTNVYADSFVIRGDEVRQIAPGQTGKIADYNYKLPDDFTGCVIAWNSNNLDSKVGGNYNYLYRLFRKSNLKPFERDISTEIYQAGSTPCNGVEGFNCYFPLQSYGFQPTNGVGYQPYRVVVLSFELLHAPATVCGPKKSTNLVKNKCVNFNFNGLTGTGVLTESNKKFLPFQQFGRDIADTTDAVRDPQTLEILDITPCSFGGVSVITPGTNTSNQVAVLYQDVNCTEVPVAIHADQLTPTWRVYSTGSNVFQTRAGCLIGAEHVNNSYECDIPIGAGICASYQTQTNSPRRARSVASQSIIAYTMSLGAENSVAYSNNSIAIPTNFTISVTTEILPVSMTKTSVDCTMYICGDSTECSNLLLQYGSFCTQLNRALTGIAVEQDKNTQEVFAQVKQIYKTPPIKDFGGFNFSQILPDPSKPSKRSFIEDLLFNKVTLADAGFIKQYGDCLGDIAARDLICAQKFNGLTVLPPLLTDEMIAQYTSALLAGTITSGWTFGAGAALQIPFAMQMAYRFNGIGVTQNVLYENQKLIANQFNSAIGKIQDSLSFTASALGKLQDVVNQNAQALNTLVKQLSSNFGAISSVLNDILSRLDPPEAEVQIDRLITGRLQSLQTYVTQQLIRAAEIRASANLAATKMSECVLGQSKRVDFCGKGYHLMSFPQSAPHGVVFLHVTYVFAQEKNFTTAPAICHDGKAHFPREGVFVSNGTHWFVTQRNFYEPQIITTDNTFVSGNCDVVIGIVNNTVYDPLQPELDSGGSGYIPEAPRDGQAYVRKDGEWVLLSTFL

SEQ ID NO: 9875 - protein, 1177 aa, Artificial Sequence; identical to SEQ ID NO: 9855
  SARS-CoV-2/Australia/NSW10/2020__EPI_ISL_413596 spike protein (1-1147)(K986P_V987P_P1069F) Foldon construct

SEQ ID NO: 9876 - protein, 1177 aa, Artificial Sequence
  SARS-CoV-2/Switzerland/1000477797/2020__EPI_ISL_413023 spike protein (1-1147)(K986P_V987P_P1069F) Foldon construct
MFVFLVLLPLVSSQCVNLTTRTQLPPAYTNSFTRGVYYPDKVFRSSVLHSTQDLFLPFFSNVTWFHAIHVSGTNGTKRFDNPVLPFNDGVYFASTEKSNIIRGWIFGTTLDSKTQSLLIVNNATNVVIKVCEFQFCNDPFLGVYYHKNNKSWMESEFRVYSSANNCTFEYVSQPFLMDLEGKQGNFKNLREFVFKNIDGYFNIYSKHTPINLVRDLPQGFSALEPLVDLPIGINITRFQTLLALHRSYLTPGDSSSGWTAGAAAYYVGYLQPRTFLLKYNENGTITDAVDCALDPLSETKCTLKSFTVEKGIYQTSNFRVQPTESIVRFPNITNLCPFGEVFNATRFASVYAWNRKRISNCVADYSVLYNSASFSTFKCYGVSPTKLNDLCFTNVYADSFVIRGDEVRQIAPGQTGKIADYNYKLPDDFTGCVIAWNSNNLDSKVGGNYNYLYRLFRKSNLKPFERDISTEIYQAGSTPCNGVEGFNCYFPLQSYGFQPTNGVGYQPYRVVVLSFELLHAPATVCGPKKSTNLVKNKCVNFNFNGLTGTGVLTESNKKFLPFQQFGRDIADTTDAVRDPQTLEILDITPCSFGGVSVITPGTNTSNQVAVLYQGVNCTEVPVAIHADQLTPTWRVYSTGSNVFQTRAGCLIGAEHVNNSYECDIPIGAGICASYQTQTNSPRRARSVASQSIIAYTMSLGAENSVAYSNNSIAIPTNFTISVTTEILPVSMTKTSVDCTMYICGDSTECSNLLLQYGSFCTQLNRALTGIAVEQDKNTQEVFAQVKQIYKTPPIKDFGGFNFSQILPDPSKPSKRSFIEDLLFNKVTLADAGFIKQYGDCLGDIAARDLICAQKFNGLTVLPPLLTDEMIAQYTSALLAGTITSGWTFGAGAALQIPFAMQMAYRFNGIGVTQNVLYENQKLIANQFNSAIGKIQDSLSSTASALGKLQDVVNQNAQALNTLVKQLSSNFGAISSVLNDILSRLDPPEAEVQIDRLITGRLQSLQTYVTQQLIRAAEIRASANLAATKMSECVLGQSKRVDFCGKGYHLMSFPQSAPHGVVFLHVTYVFAQEKNFTTAPAICHDGKAHFPREGVFVSNGTHWFVTQRNFYEPQIITTDNTFVSGNCDVVIGIVNNTVYDPLQPELDSGGSGYIPEAPRDGQAYVRKDGEWVLLSTFL

SEQ ID NO: 9877 - protein, 1177 aa, Artificial Sequence
  SARS-CoV-2/Belgium/BA-02291/2020__EPI_ISL_415159 spike protein (1-1147)(K986P_V987P_P1069F) Foldon construct
MFVFLVLLPLVSSQCVNLTTRTQLPPAYTNSFTRGVYYPDKVFRSSVLHSTQDLFLPFFSNVTWFHAIHVSGTNGTKRFDNPVLPFNDGVYFASTEKSNIIRGWIFGTTLDSKTQSLLIVNNATNVVIKVCEFQFCNDPFLGVYYHKNNKSWMESEFRVYSSANNCTFEYVSQPFLMDLEGKQGNFKNLREFVFKNIDGYFKIYSKHTPINLVRDLPQGFSALEPLVDLPIGINITRFQTLLALHRSYLTPGDSSSGWTAGAAAYYVGYLQPRTFLLKYNENGTITDAVDCALDPLSETKCTLKSFTVEKGIYQTSNFRVQPTESIVRFPNITNLCPFGEVFNATRFASVYAWNRKRISNCVADYSVLYNSASFSTFKCYGVSPTKLNDLCFTNVYADSFVIRGDEVRQIAPGQTGKIADYNYKLPDDFTGCVIAWNSNNLDSKVGGNYNYLYRLFRRSNLKPFERDISTEIYQAGSTPCNGVEGFNCYFPLQSYGFQPTNGVGYQPYRVVVLSFELLPAPATVCGPKKSTNLVKNKCVNFNFNGLTGTGVLTESNKKFLPFQQFGRDIADTTDAVRDPQTLEILDITPCSFGGVSVITPGTNTSNQVAVLYQGVNCTEVPVAIHADQLTPTWRVYSTGSNVFQTRAGCLIGAEHVNNSYECDIPIGAGICASYQTQTNSPRRARSVASQSIIAYTMSLGAENSVAYSNNSIAIPTNFTISVTTEILPVSMTKTSVDCTMYICGDSTECSNLLLQYGSFCTQLNRALTGIAVEQDKNTQEVFAQVKQIYKTPPIKDFGGFNFSQILPDPSKPSKRSFIEDLLFNKVTLADAGFIKQYGDCLGDIAARDLICAQKFNGLTVLPPLLTDEMIAQYTSALLAGTITSGWTFGAGAALQIPFAMQMAYRFNGIGVTQNVLYENQKLIANQFNSAIGKIQDSLSSAAPALGKLQDVVNQNAQALNTLVKQLSSNFGAISSVLNDILSRLDPPEAEVQIDRLITGRLQSLQTYVTQQLIRAAEIRASANLAATKMSECVLGQSKRVDFCGKGYHLMSFPQSAPHGVVFLHVTYVFAQEKNFTTAPAICHDGKAHFPREGVFVSNGTHWFVTQRNFYEPQIITTDNTFVSGNCDVVIGIVNNTVYDPLQPELDSGGSGYIPEAPRDGQAYVRKDGEWVLLSTFL

SEQ ID NO: 9878 - protein, 1177 aa, Artificial Sequence
  SARS-CoV-2/USA/WA8-UW5/2020__EPI_ISL_413486 spike protein (1-1147)(K986P_V987P_P1069F) Foldon construct
MFVFLVLLPLVSSQCVNLTTRTQLPPAYTNSFTRGVYYPDKVFRSSVLHSTQDLFLPFFSNVTWFHAIHVSGTNGTKRFDNPVLPFNDGVYFASTEKSNIIRGWIFGTTLDSKTQSLLIVNNATNVVIKVCEFQFCNDPFLGVYYHKNNKSWMESEFRVYSSANNCTFEYVSQPFLMDLEGKQGNFKNLREFVFKNIDGYFKIYSKHTPINLVRDLPQGFSALEPLVDLPIGINITRFQTLLALHRSYLTPGDSSSGWTAGAAAYYVGYLQPRTFLLKYNENGTITDAVDCALDPLSETKCTLKSFTVEKGIYQTSNFRVQPTESIVRFPNITNLCPFGEVFNATRFASVYAWNRKRISNCVADYSVLYNSASFSTFKCYGVSPTKLNDLCFTNVYADSFVIRGDEVRQIAPGQTGKIADYNYKLPDDFTGCVIAWNSNNLDSKVGGNYNYLYRLFRKSNLKPFERDISTEIYQAGSTPCNGVEGFNCYFPLQSYGFQPTNGVGYQPYRVVVLSFELLHAPATVCGPKKSTNLVKNKCVNFNFNGLTGTGVLTESNKKFLPFQQFGRDIADTTDAVRDPQTLEILDITPCSFGGVSVITPGTNTSNQVAVLYQDVNCTEVPVAIHADQLTPTWRVYSTGSNVFQTRAGCLIGAEYVNNSYECDIPIGAGICASYQTQTNSPRRARSVASQSIIAYTMSLGAENSVAYSNNSIAIPTNFTISVTTEILPVSMTKTSVDCTMYICGDSTECSNLLLQYGSFCTQLNRALTGIAVEQDKNTQEVFAQVKQIYKTPPIKDFGGFNFSQILPDPSKPSKRSFIEDLLFNKVTLADAGFIKQYGDCLGDIAARDLICAQKFNGLTVLPPLLTDEMIAQYTSALLAGTITSGWTFGAGAALQIPFAMQMAYRFNGIGVTQNVLYENQKLIANQFNSAIGKIQDSLSSTASALGKLQDVVNQNAQALNTLVKQLSSNFGAISSVLNDILSRLDPPEAEVQIDRLITGRLQSLQTYVTQQLIRAAEIRASANLAATKMSECVLGQSKRVDFCGKGYHLMSFPQSAPHGVVFLHVTYVFAQEKNFTTAPAICHDGKAHFPREGVFVSNGTHWFVTQRNFYEPQIITTDNTFVSGNCDVVIGIVNNTVYDPLQPELDSGGSGYIPEAPRDGQAYVRKDGEWVLLSTFL

SEQ ID NO: 9879 - protein, 1177 aa, Artificial Sequence
  SARS-CoV-2/England/20102000506/2020__EPI_ISL_415147 spike protein (1-1147)(K986P_V987P_P1069F) Foldon construct
MFVFLVLLPLVSSQCVNLTTRTQLPPAYTNSFTRGVYYPDKVFRSSVLHSTQDLFLPFFSNVTWFHAIHVSGTNGTKRFDNPVLPFNDGVYFASTEKSNIIRGWIFGTTLDSKTQSLLIVNNATNVVIKVCEFQFCNDPFLGVYYHKNNKSWMESEFRVYSSANNCTFEYVSQPFLMDLEGKQGNFKNLREFVFKNIDGYFKIYSKHTPINLVRDLPQGFSALEPLVDLPIGINITRFQTLLALHRSYLTPGDSSSGWTAGAAAYYVGYLQPRTFLLKYNENGTITDAVDCALDPLSETKCTLKSFTVEKGIYQTSNFRVQPTESIVRFPNITNLCPFGEVFNATRFASVYAWNRKRISNCVADYSVLYNSASFSTFKCYGVSPTKLNDLCFTNVYADSFVIRGDEVRQIAPGQTGKIADYNYKLPDDFTGCVIAWNSNNLDSKVGGNYNYLYRLFRKSNLKPFERDISTEIYQAGSTPCNGVEGFNCYFPLQSYGFQPTNGVGYQPYRVVVLSFELLHAPATVCGPKKSTNLVKNKCVNFNFNGLTGTGVLTESNKKFLPFQQFGRDIADTTDAVRDPQTLEILDITPCSFGGVSVITPGTNTSNQVAVLYQGVNCTEVPVAIHADQLTPTWRVYSTGSNVFQTRAGCLIGAEHVNNSYECDIPIGAGICASYQTQTNSPRRARSVASQSIIAYTMSLGAENSVAYSNNSIAIPTNFTISVTTEILPVSMTKTSVDCTMYICGDSTECSNLLLQYGSFCTQLNRALTGIAVEQDKNTQEVFAQVKQIYKTPPIKDFGGFNFSQILPDPSKPSKRSFIEDLLFNKVTLADAGFIKQYGYCLGDIAARDLICAQKFNGLTVLPPLLTDEMIAQYTSALLAGTITSGWTFGAGAALQIPFAMQMAYRFNGIGVTQNVLYENQKLIANQFNSAIGKIQDSLSSTASALGKLQDVVNQNAQALNTLVKQLSSNFGAISSVLNDILSRLDPPEAEVQIDRLITGRLQSLQTYVTQQLIRAAEIRASANLAATKMSECVLGQSKRVDFCGKGYHLMSFPQSAPHGVVFLHVTYVFAQEKNFTTAPAICHDGKAHFPREGVFVSNGTHWFVTQRNFYEPQIITTDNTFVSGNCDVVIGIVNNTVYDPLQPELDSGGSGYIPEAPRDGQAYVRKDGEWVLLSTFL

SEQ ID NO: 9880 - protein, 1177 aa, Artificial Sequence
  SARS-CoV-2/Belgium/VAG-03013/2020__EPI_ISL_415155 spike protein (1-1147)(K986P_V987P_P1069F) Foldon construct
MFVFLVLLPLVSSQCVNLTTRTQLPPAYTNSFTRGVYYPDKVFRSSVLHSTQDLFLPFFSNVTWFHAIHVSGTNGTKRFDNPVLPFNDGVYFASTEKSNIIRGWIFGTTLDSKTQSLLIVNNATNVVIKVCEFQFCNDPFLGVYYHKNNKSWMESEFRVYSSANNCTFEYVSQPFLMDLEGKQGNFKNLREFVFKNIDGYFKIYSKHTPINLVRDLPQGFSALEPLVDLPIGINITRFQTLLALHRSYLTPGDSSSGWTAGAAAYYVGYLQPRTFLLKYNENGTITDAVDCALDPLSETKCTLKSFTVEKGIYQTSNFRVQPTESIVRFPNITNLCPFGEVFNATRFASVYAWNRKRISNCVADYSVLYNSASFSTFKCYGVSPTKLNDLCFTNVYADSFVIRGDEVRQIAPGQTGKIADYNYKLPDDFTGCVIAWNSNNLDSKVGGNYNYLYRLFRKSNLKPFERDISTEIYQAGSTPCNGVEGFNCYFPLQSYGFQPTNGVGYQPYRVVVLSFELLHAPATVCGPKKSTNLVKNKCVNFNFNGLTGTGVLTESNKKFLPFQQFGRDIADTTDAVRDPQTLEILDITPCSFGGVSVITPGTNTSNQVAVLYQGVNCTEVPVAIHADQLTPTWRVYSTGSNVFQTRAGCLIGAEHVNNSYECDIPIGAGICASYQTQTNSPRRARSVASQSIIAYTMSLGAENSVAYSNNSIAIPTNFTISVTTEILPVSMTKTSVDCTMYICGDSTECSNLLLQYGSFCTQLNRALTGIAVEQDKNTQEVFAQVKQIYKTPPIKDFGGFNFSQILPDPSKPSKRSFIEDLLFNKVTLADAGFIKQYGDCLGDIAARDLICAQKFNGLTVLPPLLTDEMIAQYTSALLAGTITSGWTFGAGAALQIPFAMQMAYRFNGIGVTQNVLYENQKLIANQFNSAIGKIQDSLSSTATALGKLQDVVNQNAQALNTLVKQLSSNFGAISSVLNDILSRLDPPEAEVQIDRLITGRLQSLQTYVTQQLIRAAEIRASANLAATKMSECVLGQSKRVDFCGKGYHLMSFPQSAPHGVVFLHVTYVFAQEKNFTTAPAICHDGKAHFPREGVFVSNGTHWFVTQRNFYEPQIITTDNTFVSGNCDVVIGIVNNTVYDPLQPELDSGGSGYIPEAPRDGQAYVRKDGEWVLLSTFL

SEQ ID NO: 9881 - protein, 1177 aa, Artificial Sequence
  SARS-CoV-2/Belgium/BC-03016/2020__EPI_ISL_415157 spike protein (1-1147)(K986P_V987P_P1069F) Foldon construct
MFVFLVLLPLVSSQCVNLTTRTQLPPAYTNSFTRGVYYPDKVFRSSVLHSTQDLFLPFFSNVTWFHAIHVSGTNGTKRFDNPVLPFNDGVYFASTEKSNIIRGWIFGTTLDSKTQSLLIVNNATNVVIKVCEFQFCNDPFLGVYYHKNNKSWMESEFRVYSSANNCTFEYVSQPFLMDLEGKQGNFKNLREFVFKNIDGYFKIYSKHTPINLVRDLPQGFSALEPLVDLPIGINITRFQTLLALHRSYLTPGDSSSGWTAGAAAYYVGYLQPRTFLLKYNENGTITDAVDCALDPLSETKCTLKSFTVEKGIYQTSNFRVQPTESIVRFPNITNLCPFGEVFNATRFASVYAWNRKRISNCVADYSVLYNSASFSTFKCYGVSPTKLNDLCFTNVYADSFVIRGDEVRQIAPGQTGKIADYNYKLPDDFTGCVIAWNSNNLDSKVGGNYNYLYRLFRKSNLKPFERDISTEIYQAGSTPCNGVEGFNCYFPLQSYGFQPTNGVGYQPYRVVVLSFELLHAPATVCGPKKSTNLVKNKCVNFNFNGLTGTGVLTESNKKFLPFQQFGRDIADTTDAVRDPQTLEILDITPCSFGGVSVITPGTNTSNQVAVLYQGVNCTEVPVAIHADQLTPTWRVYSTGSNVFQTRAGCLIGAEHVNNSYECDIPIGAGICASYQTQTNSPRRARSVASQSIIAYTMSLGAENSVAYSNNSIAIPTNFTISVTTEILPVSMTKTSVDCTMYICGDSTECSNLLLQYGSFCTQLNRALTGIAVEQDKNTQEVFAQVKQIYKTPPIKDFGGFNFSQILPDPSKPSKRSFIEDLLFNKVTLADAGFIKQYGDCLGDIAARDLICAQKFNGLTVLPPLLTDEMIAQYTSALLAGTITSGWTFGAGAALQIPFAMQMAYRFNGIGVTQNVLYENQKLIANQFNSAIGKIQDSLSSTAPALGKLQDVVNQNAQALNTLVKQLSSNFGAISSVLNDILSRLDPPEAEVQIDRLITGRLQSLQTYVTQQLIRAAEIRASANLAATKMSECVLGQSKRVDFCGKGYHLMSFPQSAPHGVVFLHVTYVFAQEKNFTTAPAICHDGKAHFPREGVFVSNGTHWFVTQRNFYEPQIITTDNTFVSGNCDVVIGIVNNTVYDPLQPELDSGGSGYIPEAPRDGQAYVRKDGEWVLLSTFL

SEQ ID NO: 9882 - protein, 1177 aa, Artificial Sequence
  SARS-CoV-2/Germany/BavPat3/2020__EPI_ISL_414521 spike protein (1-1147)(K986P_V987P_P1069F) Foldon construct
MFVFLVLLPLVSSQCVNLTTRTQLPPAYTNSFTRGVYYPDKVFRSSVLHSTQDLFLPFFSNVTWFHAIHVSGTNGTKRFDNPVLPFNDGVYFASTEKSNIIRGWIFGTTLDSKTQSLLIVNNATNVVIKVCEFQFCNDPFLGVYYHKNNKSWMESEFRVYSSANNCTFEYVSQPFLMDLEGKQGNFKNLREFVFKNIDGYFKIYSKHTPINLVRDLPQGFSALEPLVDLPIGINITRFQTLLALHRSYLTPGDSSSGWTAGAAAYYVGYLQPRTFLLKYNENGTITDAVDCALDPLSETKCTLKSFTVEKGIYQTSNFRVQPTESIVRFPNITNLCPFGEVFNATRFASVYAWNRKRISNCVADYSVLYNSASFSTFKCYGVSPTKLNDLCFTNVYADSFVIRGDEVRQIAPGQTGKIADYNYKLPDDFTGCVIAWNSNNLDSKVGGNYNYLYRLFRKSNLKPFERDISTEIYQAGSTPCNGVEGFNCYFPLQSYGFQPTNGVGYQPYRVVVLSFELLHAPATVCGPKKSTNLVKNKCVNFNFNGLTGTGVLTESNKKFLPFQQFGRDIADTTDAVRDPQTLEILDITPCSFGGVSVITPGTNTSNQVAVLYQDVNCTEVPVAIHADQLTPTWRVYSTGSNVFQTRAGCLIGAEHVNNSYECDIPIGAGICASYQTQTNSPRRARSVASQSIIAYTMSLGAENSVAYSNNSIAIPTNFTISVTTEILPVSMTKTSVDCTMYICGDSTECSNLLLQYGSFCTQLNRALTGIAVEQDKNTQQVFAQVKQIYKTPPIKDFGGFNFSQILPDPSKPSKRSFIEDLLFNKVTLADAGFIKQYGDCLGDIAARDLICAQKFNGLTVLPPLLTDEMIAQYTSALLAGTITSGWTFGAGAALQIPFAMQMAYRFNGIGVTQNVLYENQKLIANQFNSAIGKIQDSLSSTASALGKLQDVVNQNAQALNTLVKQLSSNFGAISSVLNDILSRLDPPEAEVQIDRLITGRLQSLQTYVTQQLIRAAEIRASANLAATKMSECVLGQSKRVDFCGKGYHLMSFPQSAPHGVVFLHVTYVFAQEKNFTTAPAICHDGKAHFPREGVFVSNGTHWFVTQRNFYEPQIITTDNTFVSGNCDVVIGIVNNTVYDPLQPELDSGGSGYIPEAPRDGQAYVRKDGEWVLLSTFL

SEQ ID NO: 9883 - protein, 1177 aa, Artificial Sequence
  SARS-CoV-2/France/HF1805/2020__EPI_ISL_414628 spike protein (1-1147)(K986P_V987P_P1069F) Foldon construct
MFVFLVLLPLVSSQCVNLTTRTQLPPAYTNSFTRGVYYPDKVFRSSVLHSTQDLFLPFFSNVTWFHAIHVSGTNGTKRFDNPVLPFNDGVYFASTEKSNIIRGWIFGTTLDSKTQSLLIVNNATNVVIKVCEFQFCNDPFLGVYYHKNNKSWMESEFRVYSSANNCTFEYVSQPFLMDLEGKQGNFKNLREFVFKNIDGYFKIYSKHTPINLVRDLPQGFSALEPLVDLPIGINITRFQTLLALHRSYLTPGDSSSGWTAGAAAYYVGYLQPRTFLLKYNENGTITDAVDCALDPLSETKCTLKSFTVEKGIYQTSNFRVQPTESIVRFPNITNLCPFGEVFNATRFASVYAWNRKRISNCVADYSVLYNSASFSTFKCYGVSPTKLNDLCFTNVYADSFVIRGDEVRQIAPGQTGKIADYNYKLPDDFTGCVIAWNSNNLDSKVGGNYNYLYRLFRKSNLKPFERDISTEIYQAGSTPCNGVEGFNCYFPLQSYGFQPTNGVGYQPYRVVVLSFELLHAPATVCGPKKSTNLVKNKCVNFNFNGLTGTGVLTESNKKFLPFQQFGRDIADTTDAVRDPQTLEILDITPCSFGGVSVITPGTNTSNQVAVLYQGVNCTEVPVAIHADQLTPTWRVYSTGSNVFQTRAGCLIGAEHVNNSYECDIPIGAGICASYQTQTNSPRRARSVASQSIIAYTMSLGAENSVAYSNNSIAIPTNFTISVTTEILPVSMTKTSVDCTMYICGDSTECSNLLLQYGSFCTQLNRALTGIAVEQDKNTQEVFAQVKQIYKTPPIKDFGGFNFSQILPDPSKPSKRSFIEDLLFNKVTLADAGFIKQYGDCLGDIAARDLICAQKFNGLTVLPPLLTDEMIAQYTSALLAGTITSGWTFGAGAALQIPFAMQMAYRFNGIGVTQNVLYENQKLIANQFNSAIGKIQDSLSSTASALGKLQDVVNQNAQALNTLVKQLSSNFGAISSVLNDILSRLDPPEAEVQIDRLITGRLQSLQTYVTQQLIRAAEIRASANLAATKMSECVLGQSKRVDFCGKGYHLMSFPQSAPHGVVFLHVTYVFAQEKNFTTAPAICHDGKAHFPREGVFVSNGTHWFVTQRNFYEPQIITTDNTFVSGNCDVVIGVVNNTVYDPLQPELDSGGSGYIPEAPRDGQAYVRKDGEWVLLSTFL

SEQ ID NO: 9884 - protein, 1177 aa, Artificial Sequence
  SARS-CoV-2/Netherlands/ZuidHolland_9/2020__EPI_ISL_414445 spike protein (1-1147)(K986P_V987P_P1069F) Foldon construct
MFVFLVLLPLVSSQCVNLTTRTQLPPAYTNSFTRGVYYPDKVFRSSVLHSTQDLFLPFFSNVTWFHAIHVSGTNGTKRFDNPVLPFNDGVYFASTEKSNIIRGWIFGTTLDSKTQSLLIVNNATNVVIKVCEFQFCNDPFLGVYYHKNNKSWMESEFRVYSSANNCTFEYVSQPFLMDLEGKQGNFKNLREFVFKNIDGYFKIYSKHTPINLVRDLPQGFSALEPLVDLPIGINITRFQTLLALHRSYLTPGDSSSGWTAGAAAYYVGYLQPRTFLLKYNENGTITDAVDCALDPLSETKCTLKSFTVEKGIYQTSNFRVQPTESIVRFPNITNLCPFGEVFNATRFASVYAWNRKRISNCVADYSVLYNSASFSTFKCYGVSPTKLNDLCFTNVYADSFVIRGDEVRQIAPGQTGKIADYNYKLPDDFTGCVIAWNSNNLDSKVGGNYNYLYRLFRKSNLKPFERDISTEIYQAGSTPCNGVEGFNCYFPLQSYGFQPTNGVGYQPYRVVVLSFELLHAPATVCGPKKSTNLVKNKCVNFNFNGLTGTGVLTESNKKFLPFQQFGRDIADTTDAVRDPQTLEILDITPCSFGGVSVITPGTNTSNQVAVLYQGVNCTEVPVAIHADQLTPTWRVYSTGSNVFQTRAGCLIGAEHVNNSYECDIPIGAGICASYQTQTNSPRRARSVASQSIIAYTMSLGAENSVAYSNNSIAIPTNFTISVTTEILPVSMTKTSVDCTMYICGDSTECSNLLLQYGSFCTQLNRALTGIAVEQDKNTQEVFAQVKQIYKTPPIKDFGGFNFSQILPDPSKPSKRSFIEDLLFNKVTLADAGFIKQYGDCLGDIAARDLICVQKFNGLTVLPPLLTDEMIAQYTSALLAGTITSGWTFGAGAALQIPFAMQMAYRFNGIGVTQNVLYENQKLIANQFNSAIGKIQDSLSSTASALGKLQDVVNQNAQALNTLVKQLSSNFGAISSVLNDILSRLDPPEAEVQIDRLITGRLQSLQTYVTQQLIRAAEIRASANLAATKMSECVLGQSKRVDFCGKGYHLMSFPQSAPHGVVFLHVTYVFAQEKNFTTAPAICHDGKAHFPREGVFVSNGTHWFVTQRNFYEPQIITTDNTFVSGNCDVVIGIVNNTVYDPLQPELDSGGSGYIPEAPRDGQAYVRKDGEWVLLSTFL

SEQ ID NO: 9885 - protein, 1177 aa, Artificial Sequence
  SARS-CoV-2/Finland/FIN03032020A/2020__EPI_ISL_413602 spike protein (1-1147)(K986P_V987P_P1069F) Foldon construct
MFVFLVLLPLVSSQCVNLTTRTQLPPAYTNSFTRGVYYPDKVFRSSVLHSTQDLFLPFFSNVTWFHAIHVSGTNGTKRFDNPVLPFNDGVYFASTEKSNIIRGWIFGTTLDSKTQSLLIVNNATNVVIKVCEFQFCNDPFLGVYYHKNNKSWMESEFRVYSSANNCTFEYVSQPFLMDLEGKQGNFKNLREFVFKNIDGYFKIYSKHTPINLVRDLPQGFSALEPLVDLPIGINITRFQTLLALHRSYLTPGDSSSGWTAGAAAYYVGYLQPRTFLLKYNENGTITDAVDCALDPLSETKCTLKSFTVEKGIYQTSNFRVQPTESIVRFPNITNLCPFGEVFNATRFASVYAWNRKRISNCVADYSVLYNSASFSTFKCYGVSPTKLNDLCFTNVYADSFVIRGDEVRQIAPGQTGKIADYNYKLPDDFTGCVISWNSNNLDSKVGGNYNYLYRLFRKSNLKPFERDISTEIYQAGSTPCNGVEGFNCYFPLQSYGFQPTNGVGYQPYRVVVLSFELLHAPATVCGPKKSTNLVKNKCVNFNFNGLTGTGVLTESNKKFLPFQQFGRDIADTTDAVRDPQTLEILDITPCSFGGVSVITPGTNTSNQVAVLYQGVNCTEVPVAIHADQLTPTWRVYSTGSNVFQTRAGCLIGAEHVNNSYECDIPIGAGICASYQTQTNSPRRARSVASQSIIAYTMSLGAENSVAYSNNSIAIPTNFTISVTTEILPVSMTKTSVDCTMYICGDSTECSNLLLQYGSFCTQLNRALTGIAVEQDKNTQEVFAQVKQIYKTPPIKDFGGFNFSQILPDPSKPSKRSFIEDLLFNKVTLADAGFIKQYGDCLGDIAARDLICAQKFNGLTVLPPLLTDEMIAQYTSALLAGTITSGWTFGAGAALQIPFAMQMAYRFNGIGVTQNVLYENQKLIANQFNSAIGKIQDSLSSTASALGKLQDVVNQNAQALNTLVKQLSSNFGAISSVLNDILSRLDPPEAEVQIDRLITGRLQSLQTYVTQQLIRAAEIRASANLAATKMSECVLGQSKRVDFCGKGYHLMSFPQSAPHGVVFLHVTYVFAQEKNFTTAPAICHDGKAHFPREGVFVSNGTHWFVTQRNFYEPQIITTDNTFVSGNCDVVIGIVNNTVYDPLQPELDSGGSGYIPEAPRDGQAYVRKDGEWVLLSTFL

SEQ ID NO: 9886 - protein, 1177 aa, Artificial Sequence
  SARS-CoV-2/France/GE1977/2020__EPI_ISL_414632 spike protein (1-1147)(K986P_V987P_P1069F) Foldon construct
MFVFLVLLPLVSSQCVNLTTRTQLPPAYTNSFTRGVYYPDKVFRSSVLHSTQDLFLPFFSNVTWFHAIHVSGTNGTKRFDNPVLPFNDGVYFASTEKSNIIRGWIFGTTLDSKTQSLLIVNNATNVVIKVCEFQFCNDPFLGVYYHKNNKSWMESEFRVYSSANNCTFEYVSQPFLMDLEGKQGNFKNLREFVFKNIDGYFKIYSKHTPINLVRDLPQGFSALEPLVDLPIGINITRFQTLLALHRSYLTPGDSSSGWTAGAAAYYVGYLQPRTFLLKYNENGTITDAVDCALDPLSETKCTLKSFTVEKGIYQTSNFRVQPTESIVRFPNITNLCPFGEVFNATRFASVYAWNRKRISNCVADYSVLYNSASFSTFKCYGVSPTKLNDLCFTNVYADSFVIRGDEVRQIAPGQTGKIADYNYKLPDDFTGCVIAWNSNNLDSKVGGNYNYLYRLFRKSNLKPFERDISTEIYQAGSTPCNGVEGFNCYFPLQSYGFQPTNGVGYQPYRVVVLSFELLHAPATVCGPKKSTNLVKNKCVNFNFNGLTGTGVLTESNKKFLPFQQFGRDIADTTDAVRDPQTLEILDITPCSFGGVSVITPGTNTSNQVAVLYQGVNCTEVPVAIHADQLTPTWRVYSTGSNVFQTRAGCLIGAEHVNNSYECDIPIGAGICASYQTQTNSPRRARSVASQSIIAYTMSLGAENSVAYSNNSIAIPTNFTISVTTEILPVSMTKTSVDCTMYICGDSTECSNLLLQYGSFCTQLNRALTGIAVEQDKNTQEVFAQVKQIYKTPPIKDFGGFNFSQILPDPSKPSKRSFIEDLLFNKVTLADAGFIKQYGDCLGDIAARDLICAQKFNGLTVLPPLLTDEMIAQYTSALLAGTITSGWTFGAGAALQIPFAMQMAYRFNGIGVTQNVLYENQKLIANQFNSAIGKIQDSLFSTASALGKLQDVVNQNAQALNTLVKQLSSNFGAISSVLNDILSRLDPPEAEVQIDRLITGRLQSLQTYVTQQLIRAAEIRASANLAATKMSECVLGQSKRVDFCGKGYHLMSFPQSAPHGVVFLHVTYVFAQEKNFTTAPAICHDGKAHFPREGVFVSNGTHWFVTQRNFYEPQIITTDNTFVSGNCDVVIGIVNNTVYDPLQPELDSGGSGYIPEAPRDGQAYVRKDGEWVLLSTFL

SEQ ID NO: 9887 - protein, 1177 aa, Artificial Sequence
  SARS-CoV-2/Finland/FIN-313/2020__EPI_ISL_414641 spike protein (1-1147)(K986P_V987P_P1069F) Foldon construct
MFVFLVLLPLVSSQCVNLTTRTQLPPAYTNSFTRGVYYPDKVFRSSVLHSTQDLFLPFFSNVTWFHAIHVSGTNGTKRFDNPVLPFNDGVYFASTEKSNIIRGWIFGTTLDSKTQSLLIVNNATNVVIKVCEFQFCNDPFLGVYYHKNNKSWMESEFRVYSSANNCTFEYVSQPFLMDLEGKQGNFKNLREFVFKNIDGYFKIYSKHTPINLVRDLPQGFSALEPLVDLPIGINITRFKTLLALHRSYLTPGDSSSGWTAGAAAYYVGYLQPRTFLLKYNENGTITDAVDCALDPLSETKCTLKSFTVEKGIYQTSNFRVQPTESIVRFPNITNLCPFGEVFNATRFASVYAWNRKRISNCVADYSVLYNSASFSTFKCYGVSPTKLNDLCFTNVYADSFVIRGDEVRQIAPGQTGKIADYNYKLPDDFTGCVIAWNSNNLDSKVGGNYNYLYRLFRKSNLKPFERDISTEIYQAGSTPCNGVEGFNCYFPLQSYGFQPTNGVGYQPYRVVVLSFELLHAPATVCGPKKSTNLVKNKCVNFNFNGLTGTGVLTESNKKFLPFQQFGRDIADTTDAVRDPQTLEILDITPCSFGGVSVITPGTNTSNQVAVLYQGVNCTEVPVAIHADQLTPTWRVYSTGSNVFQTRAGCLIGAEHVNNSYECDIPIGAGICASYQTQTNSPRRARSVASQSIIAYTMSLGAENSVAYSNNSIAIPTNFTISVTTEILPVSMTKTSVDCTMYICGDSTECSNLLLQYGSFCTQLNRALTGIAVEQDKNTQEVFAQVKQIYKTPPIKDFGGFNFSQILPDPSKPSKRSFIEDLLFNKVTLADAGFIKQYGDCLGDIAARDLICAQKFNGLTVLPPLLTDEMIAQYTSALLAGTITSGWTFGAGAALQIPFAMQMAYRFNGIGVTQNVLYENQKLIANQFNSAIGKIQDSLSSTASALGKLQDVVNQNAQALNTLVKQLSSNFGAISSVLNDILSRLDPPEAEVQIDRLITGRLQSLQTYVTQQLIRAAEIRASANLAATKMSECVLGQSKRVDFCGKGYHLMSFPQSAPHGVVFLHVTYVFAQEKNFTTAPAICHDGKAHFPREGVFVSNGTHWFVTQRNFYEPQIITTDNTFVSGNCDVVIGIVNNTVYDPLQPELDSGGSGYIPEAPRDGQAYVRKDGEWVLLSTFL

SEQ ID NO: 9888 - protein, 1177 aa, Artificial Sequence
  SARS-CoV-2/Netherlands/ZuidHolland_2/2020__EPI_ISL_414556 spike protein (1-1147)(K986P_V987P_P1069F) Foldon construct
MFVFLVLLPLVSSQCVNLTTRTQLPPAYTNSFTRGVYYPDKVFRSSVLHSTQDLFLPFFSNVTWFHAIHVSGTNGTKRFDNPVLPFNDGVYFASTEKSNIIRGWIFGTTLDSKTQSLLIVNNATNVVIKVCEFQFCNDPFLGVYYHKNNKSWMESEFRVYSSANNCTFEYVSQPFLMDLEGKQGNFKNLREFVFKNIDGYFKIYSKHTPINLVRDLPQGFSALEPLVDLPIGINITRFQTLLALHRSYLTPGDSSSGWTAGAAAYYVGYLQPRTFLLKYNENGTITDAVDCALDPLSETKCTLKSFTVEKGIYQTSNFRVQPTESIVRFPNITNLCPFGEVFNATRFASVYAWNRKRISNCVADYSVLYNSASFSTFKCYGVSPTKLNDLCFTNVYADSFVIRGDEVRQIAPGQTGKIADYNYKLPDDFTGCVIAWNSNNLDSKVGGNYNYLYRLFRKSNLKPFERDISTEIYQAGSTPCNGVEGFNCYFPLQSYGFQPTNGVGYQPYRVVVLSFELLHAPATVCGPKKSTNLVKNKCVNFNFNGLTGTGVLTESNKKFLPFQQFGRDIADTTDAVRDPQTLEILDITPCSFGGVSVITPGTNTSNQVAVLYQGVNCTEVPVAIHADQLTPTWRVYSTGSNVFQTRAGCLIGAEHVNNSYECDIPIGAGICASYQTQTNSPRRARSVASQSIIAYTMSLGAENSVAYSNNSIAIPTNFTISVTTEILPVSMTKTSVDCTMYICGDSTECSNLLLQYGSFCTQLNRALTGIALEQDKNTQEVFAQVKQIYKTPPIKDFGGFNFSQILPDPSKPSKRSFIEDLLFNKVTLADAGFIKQYGDCLGDIAARDLICAQKFNGLTVLPPLLTDEMIAQYTSALLAGTITSGWTFGAGAALQIPFAMQMAYRFNGIGVTQNVLYENQKLIANQFNSAIGKIQDSLSSTASALGKLQDVVNQNAQALNTLVKQLSSNFGAISSVLNDILSRLDPPEAEVQIDRLITGRLQSLQTYVTQQLIRAAEIRASANLAATKMSECVLGQSKRVDFCGKGYHLMSFPQSAPHGVVFLHVTYVFAQEKNFTTAPAICHDGKAHFPREGVFVSNGTHWFVTQRNFYEPQIITTDNTFVSGNCDVVIGIVNNTVYDPLQPELDSGGSGYIPEAPRDGQAYVRKDGEWVLLSTFL

SEQ ID NO: 9889 - protein, 1177 aa, Artificial Sequence
  SARS-CoV-2/USA/WA-UW31/2020__EPI_ISL_414618 spike protein (1-1147)(K986P_V987P_P1069F) Foldon construct
MFVFLVLLPLVSSQCVNLTTRTQLPPAYTNSFTRGVYYPDKVFRSSVLHSTQDLFLPFFSNVTWFHAIHVSGTNGTKRFDNPVLPFNDGVYFASTEKSNIIRGWIFGTTLDSKTQSLLIVNNATNVVIKVCEFQFCNDPFLGVYYHKNNKSWMESEFRVYSSANNCTFEYVSQPFLMDLEGKQGNFKNLREFVFKNIDGYFKIYSKHTPINLVRDLPQGFSALEPLVDLPIGINITRFQTLLALHRSYLTPGDSSSGWTAGAAAYYVGYLQPRTFLLKYNENGTITDAVDCALDPLSETKCTLKSFTVEKGIYQTSNFRVQPTESIVRFPNITNLCPFGEVFNATRFASVYAWNRKRISNCVADYSVLYNSASFSTFKCYGVSPTKLNDLCFTNVYADSFVIRGDEVRQIAPGQTGKIADYNYKLPDDFTGCVIAWNSNNLDSKVGGNYNYLYRLFRKSNLKPFERDISTEIYQAGSTPCNGAEGFNCYFPLQSYGFQPTNGVGYQPYRVVVLSFELLHAPATVCGPKKSTNLVKNKCVNFNFNGLTGTGVLTESNKKFLPFQQFGRDIADTTDAVRDPQTLEILDITPCSFGGVSVITPGTNTSNQVAVLYQDVNCTEVPVAIHADQLTPTWRVYSTGSNVFQTRAGCLIGAEHVNNSYECDIPIGAGICASYQTQTNSPRRARSVASQSIIAYTMSLGAENSVAYSNNSIAIPTNFTISVTTEILPVSMTKTSVDCTMYICGDSTECSNLLLQYGSFCTQLNRALTGIAVEQDKNTQEVFAQVKQIYKTPPIKDFGGFNFSQILPDPSKPSKRSFIEDLLFNKVTLADAGFIKQYGDCLGDIAARDLICAQKFNGLTVLPPLLTDEMIAQYTSALLAGTITSGWTFGAGAALQIPFAMQMAYRFNGIGVTQNVLYENQKLIANQFNSAIGKIQDSLSSTASALGKLQDVVNQNAQALNTLVKQLSSNFGAISSVLNDILSRLDPPEAEVQIDRLITGRLQSLQTYVTQQLIRAAEIRASANLAATKMSECVLGQSKRVDFCGKGYHLMSFPQSAPHGVVFLHVTYVFAQEKNFTTAPAICHDGKAHFPREGVFVSNGTHWFVTQRNFYEPQIITTDNTFVSGNCDVVIGIVNNTVYDPLQPELDSGGSGYIPEAPRDGQAYVRKDGEWVLLSTFL

SEQ ID NO: 9890 - protein, 1177 aa, Artificial Sequence
  SARS-CoV-2/South Korea/SNU01/2020__EPI_ISL_411929 spike protein (1-1147)(K986P_V987P_P1069F) Foldon construct
MFVFLVLLPLVSSQCVNLTTRTQLPPAYTNSFTRGVYYPDKVFRSSVLHSTQDLFLPFFSNVTWFHAIHVSGTNGTKRFDNPVLPFNDGVYFASTEKSNIIRGWIFGTTLDSKTQSLLIVNNATNVVIKVCEFQFCNDPFLGVYYHKNNKSWMESEFRVYSSANNCTFEYVSQPFLMDLEGKQGNFKNLREFVFKNIDGYFKIYSKHTPINLVRDLPQGFWALEPLVDLPIGINITRFQTLLALHRSYLTPGDSSSGWTAGAAAYYVGYLQPRTFLLKYNENGTITDAVDCALDPLSETKCTLKSFTVEKGIYQTSNFRVQPTESIVRFPNITNLCPFGEVFNATRFASVYAWNRKRISNCVADYSVLYNSASFSTFKCYGVSPTKLNDLCFTNVYADSFVIRGDEVRQIAPGQTGKIADYNYKLPDDFTGCVIAWNSNNLDSKVGGNYNYLYRLFRKSNLKPFERDISTEIYQAGSTPCNGVEGFNCYFPLQSYGFQPTNGVGYQPYRVVVLSFELLHAPATVCGPKKSTNLVKNKCVNFNFNGLTGTGVLTESNKKFLPFQQFGRDIADTTDAVRDPQTLEILDITPCSFGGVSVITPGTNTSNQVAVLYQDVNCTEVPVAIHADQLTPTWRVYSTGSNVFQTRAGCLIGAEHVNNSYECDIPIGAGICASYQTQTNSPRRARSVASQSIIAYTMSLGAENSVAYSNNSIAIPTNFTISVTTEILPVSMTKTSVDCTMYICGDSTECSNLLLQYGSFCTQLNRALTGIAVEQDKNTQEVFAQVKQIYKTPPIKDFGGFNFSQILPDPSKPSKRSFIEDLLFNKVTLADAGFIKQYGDCLGDIAARDLICAQKFNGLTVLPPLLTDEMIAQYTSALLAGTITSGWTFGAGAALQIPFAMQMAYRFNGIGVTQNVLYENQKLIANQFNSAIGKIQDSLSSTASALGKLQDVVNQNAQALNTLVKQLSSNFGAISSVLNDILSRLDPPEAEVQIDRLITGRLQSLQTYVTQQLIRAAEIRASANLAATKMSECVLGQSKRVDFCGKGYHLMSFPQSAPHGVVFLHVTYVFAQEKNFTTAPAICHDGKAHFPREGVFVSNGTHWFVTQRNFYEPQIITTDNTFVSGNCDVVIGIVNNTVYDPLQPELDSGGSGYIPEAPRDGQAYVRKDGEWVLLSTFL

SEQ ID NO: 9891 - protein, 1177 aa, Artificial Sequence
  SARS-CoV-2/China/WF0004/2020__EPI_ISL_413694 spike protein (1-1147)(K986P_V987P_P1069F) Foldon construct
MFVFLVLLPLVSSQCVNLTTRTQLPPAYTNSFTRGVYYPDKVFRSSVLHSTQDLFLPFFSNVTWFHAIHVSGTNGTKRFDNPVLPFNDGVYFASTEKSNIIRGWIFGTTLDSKTQSLLIVNNATNVVIKVCEFQFCNDPFLGVYYHKNNKSWTESEFRVYSSANNCTFEYVSQPFLMDLEGKQGNFKNLREFVFKNIDGYFKIYSKHTPINLVRDLPQGFSALEPLVDLPIGINITRFQTLLALHRSYLTPGDSSSGWTAGAAAYYVGYLQPRTFLLKYNENGTITDAVDCALDPLSETKCTLKSFTVEKGIYQTSNFRVQPTESIVRFPNITNLCPFGEVFNATRFASVYAWNRKRISNCVADYSVLYNSASFSTFKCYGVSPTKLNDLCFTNVYADSFVIRGDEVRQIAPGQTGKIADYNYKLPDDFTGCVIAWNSNNLDSKVGGNYNYLYRLFRKSNLKPFERDISTEIYQAGSTPCNGVEGFNCYFPLQSYGFQPTNGVGYQPYRVVVLSFELLHAPATVCGPKKSTNLVKNKCVNFNFNGLTGTGVLTESNKKFLPFQQFGRDIADTTDAVRDPQTLEILDITPCSFGGVSVITPGTNTSNQVAVLYQDVNCTEVPVAIHADQLTPTWRVYSTGSNVFQTRAGCLIGAEHVNNSYECDIPIGAGICASYQTQTNSPRRARSVASQSIIAYTMSLGAENSVAYSNNSIAIPTNFTISVTTEILPVSMTKTSVDCTMYICGDSTECSNLLLQYGSFCTQLNRALTGIAVEQDKNTQEVFAQVKQIYKTPPIKDFGGFNFSQILPDPSKPSKRSFIEDLLFNKVTLADAGFIKQYGDCLGDIAARDLICAQKFNGLTVLPPLLTDEMIAQYTSALLAGTITSGWTFGAGAALQIPFAMQMAYRFNGIGVTQNVLYENQKLIANQFNSAIGKIQDSLSSTASALGKLQDVVNQNAQALNTLVKQLSSNFGAISSVLNDILSRLDPPEAEVQIDRLITGRLQSLQTYVTQQLIRAAEIRASANLAATKMSECVLGQSKRFDFCGKGYHLMSFPQSAPHGVVFLHVTYVFAQEKNFTTAPAICHDGKAHFPREGVFVSNGTHWFVTQRNFYEPQIITTDNTFVSGNCDVVIGIVNNTVYDPLQPELDSGGSGYIPEAPRDGQAYVRKDGEWVLLSTFL

SEQ ID NO: 9892 - protein, 1177 aa, Artificial Sequence
  SARS-CoV-2/China/WF0028/2020__EPI_ISL_413791 spike protein (1-1147)(K986P_V987P_P1069F) Foldon construct
MFVFLVLLPLVSSQCVNLTTRTQLPPAYTNSFTRGVYYPDKVFRSSVLHSTQDLFLPFFSNVTWFHAIHVSGTNGTKRFDNPVLPFNDGVYFASTEKSNIIRGWIFGTTLDSKTQSLLIVNNATNVVIKVCEFQFCNDPFLGVYYHKNNKSWMESEFRVYSSANNCTFEYVSQPFLMDLEGKQGNFKNLREFVFKNIDGYFKIYSKHTPINLVRDLPQGFSALEPLVDLPIGINITRFQTLLALHRSYLTPGDSSSGWTAGAAAYYVGYLQPRTFLLKYNENGTITDAVDCALDPLSETKCTLKSFTVEKGIYQTSNFRVQPTESIVRFPNITNLCPFGEVFNATRFASVYAWNRKRISNCVADYSVLYNSASFSTFKCYGVSPTKLNDLCFTNVYADSFVIRGDEVRQIAPGQTGKIADYNYKLPDDFTGCVIAWNSNNLDSKVGGNYNYLYRLFRKSNLKPFERDISTEIYQAGSTPCNGVEGFNCYFPLQSYGFQPTNGVGYQPYRVVVLSFELLHAPATVCGPKKSTNLVKNKCVNFNFNGLTGTGVLTESNKKFLPFQQFGRDIADTTDAVRDPQTLEILDITPCSFGGVSVITPGTNTSNQVAVLYQDVNCTEVPVAIHADQLTPTWRVYSTGSNVFQTRAGCLIGAEHVNNSYECDIPIGAGICASYQTQTNSPRRARSVASQSIIAYTMSLGAENSVAYSNNSIAIPTNFTISVTTEILPVSMTKTSVDCTMYICGDSTECSNLLLQYGSFCTQLNRALTGIAVEQDKNTQEVFAQVKQIYKTPPIKDFGGFNFSQILPDPSKPSKRSFIEDLLFNKVTLADAGFIKQYGDCLGDIAARDLICAQKFNGLTVLPPLLTDEMIAQYTSALLAGTITSGWTFGAGAALQIPFAMQMAYRFNGIGVTQNVLYENQKLIANQFNSAIGKIQDSLSSTASALGKLQDVVNQNAQALNTLVKQLSSNFGAISSVLNDILSRLDPPEAEVQIDRLITGRLQSLQTYVTQQLIRAAEIRASANLAATKMSECVLGQSKRVDFCGKGYHLMSFPQSAPHGVVFLHVTYVFAQEKNFTTAPAICHDGKAHFPREGVFVSNGTHWFVTQRNFYEPQIITTDNTFVSGNCDVVIGIVNNTVYDPLQPELESGGSGYIPEAPRDGQAYVRKDGEWVLLSTFL

SEQ ID NO: 9893 - protein, 1177 aa, Artificial Sequence
  SARS-CoV-2/2019-nCoV/USA-CruiseA-18/2020__MT159716.1 spike protein (1-1147)(K986P_V987P_P1069F) Foldon construct
MFVFLVLLPLVSSQCVNLTTRTQLPPAYTNSFTRGVYYPDKVFRSSVLHSTQDLFLPFFSNVTWFHAIHVSGTNGTKRFDNPVLPFNDGVYFASTEKSNIIRGWIFGTTLDSKTQSLLIVNNATNVVIKVCEFQFCNDPFLGVYYHKNNKSWMESELRVYSSANNCTFEYVSQPFLMDLEGKQGNFKNLREFVFKNIDGYFKIYSKHTPINLVRDLPQGFSALEPLVDLPIGINITRFQTLLALHRSYLTPGDSSSGWTAGAAAYYVGYLQPRTFLLKYNENGTITDAVDCALDPLSETKCTLKSFTVEKGIYQTSNFRVQPTESIVRFPNITNLCPFGEVFNATRFASVYAWNRKRISNCVADYSVLYNSASFSTFKCYGVSPTKLNDLCFTNVYADSFVIRGDEVRQIAPGQTGKIADYNYKLPDDFTGCVIAWNSNNLDSKVGGNYNYLYRLFRKSNLKPFERDISTEIYQAGSTPCNGVEGFNCYFPLQSYGFQPTNGVGYQPYRVVVLSFELLHAPATVCGPKKSTNLVKNKCVNFNFNGLTGTGVLTESNKKFLPFQQFGRDIADTTDAVRDPQTLEILDITPCSFGGVSVITPGTNTSNQVAVLYQDVNCTEVPVAIHADQLTPTWRVYSTGSNVFQTRAGCLIGAEHVNNSYECDIPIGAGICASYQTQTNSPRRARSVASQSIIAYTMSLGAENSVAYSNNSIAIPTNFTISVTTEILPVSMTKTSVDCTMYICGDSTECSNLLLQYGSFCTQLNRALTGIAVEQDKNTQEVFAQVKQIYKTPPIKDFGGFNFSQILPDPSKPSKRSFIEDLLFNKVTLADAGFIKQYGDCLGDIAARDLICAQKFNGLTVLPPLLTDEMIAQYTSALLAGTITSGWTFGAGAALQIPFAMQMAYRFNGIGVTQNVLYENQKLIANQFNSAIGKIQDSLSSTASALGKLQDVVNQNAQALNTLVKQLSSNFGAISSVLNDILSRLDPPEAEVQIDRLITGRLQSLQTYVTQQLIRAAEIRASANLAATKMSECVLGQSKRVDFCGKGYHLMSFPQSAPHGVVFLHVTYVFAQEKNFTTAPAICHDGKAHFPREGVFVSNGTHWFVTQRNFYEPQIITTDNTFVSGNCDVVIGIVNNTVYDPLQPELDSGGSGYIPEAPRDGQAYVRKDGEWVLLSTFL

SEQ ID NO: 9894 - protein, 1177 aa, Artificial Sequence
  SARS-CoV-2/SARS-CoV-2/Yunnan-01/human/2020/CHN__MT049951.1 spike protein (1-1147)(K986P_V987P_P1069F) Foldon construct
MFVFLVLLPLVSSQCVNLTTRTQLPPANTNSFTRGVYYPDKVFRSSVLHSTQDLFLPFFSNVTWFHAIHVSGTNGTKRFDNPVLPFNDGVYFASTEKSNIIRGWIFGTTLDSKTQSLLIVNNATNVVIKVCEFQFCNDPFLGVYYHKNNKSWMESEFRVYSSANNCTFEYVSQPFLMDLEGKQGNFKNLREFVFKNIDGYFKIYSKHTPINLVRDLPQGFSALEPLVDLPIGINITRFQTLLALHRSYLTPGDSSSGWTAGAAAYYVGYLQPRTFLLKYNENGTITDAVDCALDPLSETKCTLKSFTVEKGIYQTSNFRVQPTESIVRFPNITNLCPFGEVFNATRFASVYAWNRKRISNCVADYSVLYNSASFSTFKCYGVSPTKLNDLCFTNVYADSFVIRGDEVRQIAPGQTGKIADYNYKLPDDFTGCVIAWNSNNLDSKVGGNYNYLYRLFRKSNLKPFERDISTEIYQAGSTPCNGVEGFNCYFPLQSYGFQPTNGVGYQPYRVVVLSFELLHAPATVCGPKKSTNLVKNKCVNFNFNGLTGTGVLTESNKKFLPFQQFGRDIADTTDAVRDPQTLEILDITPCSFGGVSVITPGTNTSNQVAVLYQDVNCTEVPVAIHADQLTPTWRVYSTGSNVFQTRAGCLIGAEHVNNSYECDIPIGAGICASYQTQTNSPRRARSVASQSIIAYTMSLGAENSVAYSNNSIAIPTNFTISVTTEILPVSMTKTSVDCTMYICGDSTECSNLLLQYGSFCTQLNRALTGIAVEQDKNTQEVFAQVKQIYKTPPIKDFGGFNFSQILPDPSKPSKRSFIEDLLFNKVTLADAGFIKQYGDCLGDIAARDLICAQKFNGLTVLPPLLTDEMIAQYTSALLAGTITSGWTFGAGAALQIPFAMQMAYRFNGIGVTQNVLYENQKLIANQFNSAIGKIQDSLSSTASALGKLQDVVNQNAQALNTLVKQLSSNFGAISSVLNDILSRLDPPEAEVQIDRLITGRLQSLQTYVTQQLIRAAEIRASANLAATKMSECVLGQSKRVDFCGKGYHLMSFPQSAPHGVVFLHVTYVFAQEKNFTTAPAICHDGKAHFPREGVFVSNGTHWFVTQRNFYEPQIITTDNTFVSGNCDVVIGIVNNTVYDPLQPELDSGGSGYIPEAPRDGQAYVRKDGEWVLLSTFL

SEQ ID NO: 9895 - protein, 1177 aa, Artificial Sequence
  SARS-CoV-2/USA/WA-UW292/2020__EPI_ISL_418077 spike protein (1-1147)(K986P_V987P_P1069F) Foldon construct
MFVFLVLLPLVSSQCVNLTTRTQLPPAYTNSFTRGVYYPDKVFRSSVLHSTQDLFLPFFSNVTWFHAIHVSGTNGTKRFDNPVLPFNDGVYFASTEKSNIIRGWIFGTTLDSKTQSLLIVNNATNVVIKVCEFQFCNDPFLGVYYHKNNKSWMESEFRVYSSANNCTFEYVSQPFLMDLEGKQGNFKNLREFVFKNIDGYFKIYSKHTPINLVRDLPQGFSALEPLVDLPIGINITRFQTLLALHRSYLTPGDSSSGWTAGAAAYYVGYLQPRTFLLKYNENGTITDAVDCALDPLSETKCTLKSFTVEKGIYQTSNFRVQPTESIVRFPNITNLCPFGEVFNATRFASVYAWNRKRISNCVADYSVLYNSASFSTFKCYGVSPTKLNDLCFTNVYADSFVIRGDEVRQIAPGQTGKIADYNYKLPDDFTGCVIAWNSNNLDSKVGGNYNYLYRLFRKSNLKPFERDISTEIYQASSTPCNGVEGFNCYFPLQSYGFQPTNGVGYQPYRVVVLSFELLHAPATVCGPKKSTNLVKNKCVNFNFNGLTGTGVLTESNKKFLPFQQFGRDIADTTDAVRDPQTLEILDITPCSFGGVSVITPGTNTSNQVAVLYQDVNCTEVPVAIHADQLTPTWRVYSTGSNVFQTRAGCLIGAEHVNNSYECDIPIGAGICASYQTQTNSPRRARSVASQSIIAYTMSLGAENSVAYSNNSIAIPTNFTISVTTEILPVSMTKTSVDCTMYICGDSTECSNLLLQYGSFCTQLNRALTGIAVEQDKNTQEVFAQVKQIYKTPPIKDFGGFNFSQILPDPSKPSKRSFIEDLLFNKVTLADAGFIKQYGDCLGDIAARDLICAQKFNGLTVLPPLLTDEMIAQYTSALLAGTITSGWTFGAGAALQIPFAMQMAYRFNGIGVTQNVLYENQKLIANQFNSAIGKIQDSLSSTASALGKLQDVVNQNAQALNTLVKQLSSNFGAISSVLNDILSRLDPPEAEVQIDRLITGRLQSLQTYVTQQLIRAAEIRASANLAATKMSECVLGQSKRVDFCGKGYHLMSFPQSAPHGVVFLHVTYVFAQEKNFTTAPAICHDGKAHFPREGVFVSNGTHWFVTQRNFYEPQIITTDNTFVSGNCDVVIGIVNNTVYDPLQPELDSGGSGYIPEAPRDGQAYVRKDGEWVLLSTFL

SEQ ID NO: 9896 - protein, 1177 aa, Artificial Sequence
  SARS-CoV-2/Iceland/192/2020__EPI_ISL_417819 spike protein (1-1147)(K986P_V987P_P1069F) Foldon construct
MFVFFVLLPLVSSQCVNLTTRTQLPPAYTNSFTRGVYYPDKVFRSSVLHSTQDLFLPFFSNVTWFHAIHVSGTNGTKRFDNPVLPFNDGVYFASTEKSNIIRGWIFGTTLDSKTQSLLIVNNATNVVIKVCEFQFCNDPFLGVYYHKNNKSWMESEFRVYSSANNCTFEYVSQPFLMDLEGKQGNFKNLREFVFKNIDGYFKIYSKHTPINLVRDLPQGFSALEPLVDLPIGINITRFQTLLALHRSYLTPGDSSSGWTAGAAAYYVGYLQPRTFLLKYNENGTITDAVDCALDPLSETKCTLKSFTVEKGIYQTSNFRVQPTESIVRFPNITNLCPFGEVFNATRFASVYAWNRKRISNCVADYSVLYNSASFSTFKCYGVSPTKLNDLCFTNVYADSFVIRGDEVRQIAPGQTGKIADYNYKLPDDFTGCVIAWNSNNLDSKVGGNYNYLYRLFRKSNLKPFERDISTEIYQAGSTPCNGVEGFNCYFPLQSYGFQPTNGVGYQPYRVVVLSFELLHAPATVCGPKKSTNLVKNKCVNFNFNGLTGTGVLTESNKKFLPFQQFGRDIADTTDAVRDPQTLEILDITPCSFGGVSVITPGTNTSNQVAVLYQGVNCTEVPVAIHADQLTPTWRVYSTGSNVFQTRAGCLIGAEHVNNSYECDIPIGAGICASYQTQTNSPRRARSVASQSIIAYTMSLGAENSVAYSNNSIAIPTNFTISVTTEILPVSMTKTSVDCTMYICGDSTECSNLLLQYGSFCTQLNRALTGIAVEQDKNTQEVFAQVKQIYKTPPIKDFGGFNFSQILPDPSKPSKRSFIEDLLFNKVTLADAGFIKQYGDCLGDIAARDLICAQKFNGLTVLPPLLTDEMIAQYTSALLAGTITSGWTFGAGAALQIPFAMQMAYRFNGIGVTQNVLYENQKLIANQFNSAIGKIQDSLSSTASALGKLQDVVNQNAQALNTLVKQLSSNFGAISSVLNDILSRLDPPEAEVQIDRLITGRLQSLQTYVTQQLIRAAEIRASANLAATKMSECVLGQSKRVDFCGKGYHLMSFPQSAPHGVVFLHVTYVFAQEKNFTTAPAICHDGKAHFPREGVFVSNGTHWFVTQRNFYEPQIITTDNTFVSGNCDVVIGIVNNTVYDPLQPELDSGGSGYIPEAPRDGQAYVRKDGEWVLLSTFL

SEQ ID NO: 9897 - protein, 1177 aa, Artificial Sequence
  SARS-CoV-2/Belgium/ULG-6939/2020__EPI_ISL_417020 spike protein (1-1147)(K986P_V987P_P1069F) Foldon construct
MFVFLVLLPLVSSQCVNLTTRTQLPPAYTNSFTRGVYYPDKVFRSSVLHSTQDLFLPFFSNVTWFHAIHVSGTNGTKRFDNPVLPFNDGVYFASTEKSNIIRGWIFGTTLDSKTQSLLIVNNATNVVIKVCEFQFCNDPFLGVYYHKNNKSWMESEFRVYSSANNCTFEYVSQPFLMDLEGKQGNFKNLREFVFKNIDGYFKIYSKHTPINLVRDLPQGFSALEPLVDLPIGINITRFQTLLALHRSYLTPGDSSSGWTAGAAAYYVGYLQPRTFLLKYNENGTITDAVDCALDPLSETKCTLKSFTVEKGIYQTSNFRVQPTESIVRFPNITNLCPFGEVFNATRFASVYAWNRKRISNCVADYSVLYNSASFSTFKCYGVSPTKLNDLCFTNVYADSFVIRGDEVRQIAPGQTGKIADYNYKLPDDFTGCVIAWNSNNLDSKVGGNYNYLYRLFRKSNLKPFERDISTEIYQAGSTPCNGVEGFNCYFPLQSYGFQPTNGVGYQPYRVVVLSFELLHAPATVCGPKKSTNLVKNKCVNFNFNGLTGTGVLTESNKKFLPFQQFGRDIADTTDAVRDPQTLEILDITPCSFGGVSVITPGTNTSNQVAVLYQGVNCTEVPVAIHADQLTPTWRVYSTGSNVFQTRAGCLIGAEHVNNSYECDIPIGAGICASYQTQTNSPRRARSVASQSIIAYTMSLGAENSVVYSNNSIAIPTNFTISVTTEILPVSMTKTSVDCTMYICGDSTECSNLLLQYGSFCTQLNRALTGIAVEQDKNTQEVFAQVKQIYKTPPIKDFGGFNFSQILPDPSKPSKRSFIEDLLFNKVTLADAGFIKQYGDCLGDIAARDLICAQKFNGLTVLPPLLTDEMIAQYTSALLAGTITSGWTFGAGAALQIPFAMQMAYRFNGIGVTQNVLYENQKLIANQFNSAIGKIQDSLSSTASALGKLQDVVNQNAQALNTLVKQLSSNFGAISSVLNDILSRLDPPEAEVQIDRLITGRLQSLQTYVTQQLIRAAEIRASANLAATKMSECVLGQSKRVDFCGKGYHLMSFPQSAPHGVVFLHVTYVFAQEKNFTTAPAICHDGKAHFPREGVFVSNGTHWFVTQRNFYEPQIITTDNTFVSGNCDVVIGIVNNTVYDPLQPELDSGGSGYIPEAPRDGQAYVRKDGEWVLLSTFL

SEQ ID NO: 9898 - protein, 1177 aa, Artificial Sequence
  SARS-CoV-2/France/HF2496/2020__EPI_ISL_418231 spike protein (1-1147)(K986P_V987P_P1069F) Foldon construct
MFVFLVLLPLVSSQCVNLTTRTQLPPAYTNSFTRGVYYPDKVFRSSVLHSTQDLFLPFFSNVTWFHAIHVSGTNGTKRFDNPVLPFNDGVYFASTEKSNIIRGWIFGTTLDSKTQSLLIVNNATNVVIKVCEFQFCNDPFLGVYYHKNNKSWMESEFRVYSSANNCTFEYVSQPFLMDLEGKQGNFKNLREFVFKNIDGYFKIYSKHTPINLVRDLPQGFSALEPLVDLPIGINITRFQTLLALHRSYLTPGDSSSGWTAGAAAYYVGYLQPRTFLLKYNENGTITDAVDCALDPLSETKCTLKSFTVEKGIYQTSNFRVQPTESIVRFPNITNLCPFGEVFNATRFASVYAWNRKRISNCVADYSVLYNSASFSTFKCYGVSPTKLNDLCFTNVYADSFVIRGDEVRQIAPGQTGKIADYNYKLPDDFTGCVIAWNSNNLDSKVGGNYNYLYRLFRKSNLKPFERDISTEIYQAGSTPCNGVEGFNCYFPLQSYGFQPTNGVGYQPYRVVVLSFELLHAPATVCGPKKSTNLVKNKCVNFNFNGLTGTGVLTESNKKFLPFQQFGRDIADTTDAVRDPQTLEILDITPCSFGGVSVITPGTNTSNQVAVLYQGVNCTEVPVAIHADQLTPTWRVYSTGSNVFQTRAGCLIGAEHVNNSYECDIPIGAGICASYQTQTNSPRRARSVASQSIIAYTMSLGAENSVAYSNNSIAIPTNFTISVTTEILPVSMTKTSVDCTMYICGDSTECSNLLLQYGSFCTQLNRALTGIAVEQDKNTQEVFAQVKQIYKTPPIKDFGGFNFSQILPDPSKPSKRSFIEDLLFNKVTLADAGFIKQYGDCLGDIVARDLICAQKFNGLTVLPPLLTDEMIAQYTSALLAGTITSGWTFGAGAALQIPFAMQMAYRFNGIGVTQNVLYENQKLIANQFNSAIGKIQDSLSSTASALGKLQDVVNQNAQALNTLVKQLSSNFGAISSVLNDILSRLDPPEAEVQIDRLITGRLQSLQTYVTQQLIRAAEIRASANLAATKMSECVLGQSKRVDFCGKGYHLMSFPQSAPHGVVFLHVTYVFAQEKNFTTAPAICHDGKAHFPREGVFVSNGTHWFVTQRNFYEPQIITTDNTFVSGNCDVVIGIVNNTVYDPLQPELDSGGSGYIPEAPRDGQAYVRKDGEWVLLSTFL

SEQ ID NO: 9899 - protein, 1177 aa, Artificial Sequence
  SARS-CoV-2/USA/WA-UW291/2020__EPI_ISL_418076 spike protein (1-1147)(K986P_V987P_P1069F) Foldon construct
MFVFLVLLPLVSSQCVNLTTRTQLPPAYTNSFTRGVYYPDKVFRSSVLHSTQDLFLPFFSNVTWFHAIHVSGTNGTKRFDNPVLPFNDGVYFASTEKSNIIRGWIFGTTLDSKTQSLLIVNNATNVVIKVCEFQFCNDPFLGVYYHKNNKSWMESEFRVYSSANNCTFEYVSQPFLMDLEGKQGNFKNLREFVFKNIDGYFKIYSKHTPINLVRDLPQGFSALEPLVDLPIGINITRFQTLLALHRSYLTPGDSSSGWTAGAAAYYVGYLQPRTFLLKYNENGTITDAVDCALDPLSETKCTLKSFTVEKGIYQTSNFRVQPTESIVRFPNITNLCPFGEVFNATRFASVYAWNRKRISNCVADYSVLYNSASFSTFKCYGVSPTKLNDLCFTNVYADSFVIRGDEVRQIAPGQTGKIADYNYKLPDDFTGCVIAWNSNNLDSKVGGNYNYLYRLFRKSNLKPFERDISTEIYQAGSTPCNGVEGFNCYFPLQSYGFQPTNGVGYQPYRVVVLSFELLHAPATVCGPKKSTNLVKNKCVNFNFNGLTGTGVLTESNKKFLPFQQFGRDIADTTDAVRDPQTLEILDITPCSFGGVSVITPGTNTSNQVAVLYQGVNCTEVPVAIHADQLTPTWRVYSTGSNVFQTRAGCLIGAEHVNNSYECDIPIGAGICASYQTQTNSPRRARSVASQSIIAYTMSLGAENSVAYSNNSIAIPTNFTISVTTEILPVSMTKTSVDCTMYICGDSTECSNLLLQYGSFCTQLNRALTGIAVEQDKNTQEVFAQVKQIYKTPPIKDFGGFNFSQILPDPSKPSKRSFIEDLLFNKVTLADAGFIKQYGDCLGDIAARDLICAQKFNGLTVLPPLLTDEMIAQYTSALLAGTITSGWTFGAGAALQIPFAMQMAYRFNGIGVTQNVLYENQKLIANQFNSAIGKIQYSLSSTASALGKLQDVVNQNAQALNTLVKQLSSNFGAISSVLNDILSRLDPPEAEVQIDRLITGRLQSLQTYVTQQLIRAAEIRASANLAATKMSECVLGQSKRVDFCGKGYHLMSFPQSAPHGVVFLHVTYVFAQEKNFTTAPAICHDGKAHFPREGVFVSNGTHWFVTQRNFYEPQIITTDNTFVSGNCDVVIGIVNNTVYDPLQPELDSGGSGYIPEAPRDGQAYVRKDGEWVLLSTFL

SEQ ID NO: 9900 - protein, 1177 aa, Artificial Sequence; identical to SEQ ID NO: 9863
  SARS-CoV-2/Portugal/PT0034/2020__EPI_ISL_418019 spike protein (1-1147)(K986P_V987P_P1069F) Foldon construct

SEQ ID NO: 9901 - protein, 1177 aa, Artificial Sequence; identical to SEQ ID NO: 9855
  SARS-CoV-2/Iceland/202/2020__EPI_ISL_417750 spike protein (1-1147)(K986P_V987P_P1069F) Foldon construct

SEQ ID NO: 9902 - protein, 1177 aa, Artificial Sequence
  SARS-CoV-2/USA/WA-UW261/2020__EPI_ISL_418046 spike protein (1-1147)(K986P_V987P_P1069F) Foldon construct
MFVFLVLLPLVSSQCVNLTTRTQLPPAYTNSFTRGVYYPDKVFRSSVLHSTQDLFLPFFSNVTWFHAIHVSGTNGTKRFDNPVLPFNDGVYFASTEKSNIIRGWIFGTTLDSKTQSLLIVNNATNVVIKVCEFQFCNDPFLGVYYHKNNKSWMESEFRVYSSANNCTFEYVSQPFLMDLEGKQGNFKNLREFVFKNIDGYFKIYSKHTPINLVRDLPQGFSALEPLVDLPIGINITRFQTLLALHRSYLTPGDSSSGWTAGAAAYYVGYLQPRTFLLKYNENGTITDAVDCALDPLSETKCTLKSFTVEKGIYQTSNFRVQPTESIVRFPNITNLCPFGEVFNATRFTSVYAWNRKRISNCVADYSVLYNSASFSTFKCYGVSPTKLNDLCFTNVYADSFVIRGDEVRQIAPGQTGKIADYNYKLPDDFTGCVIAWNSNNLDSKVGGNYNYLYRLFRKSNLKPFERDISTEIYQAGSTPCNGVEGFNCYFPLQSYGFQPTNGVGYQPYRVVVLSFELLHAPATVCGPKKSTNLVKNKCVNFNFNGLTGTGVLTESNKKFLPFQQFGRDIADTTDAVRDPQTLEILDITPCSFGGVSVITPGTNTSNQVAVLYQDVNCTEVPVAIHADQLTPTWRVYSTGSNVFQTRAGCLIGAEHVNNSYECDIPIGAGICASYQTQTNSPRRARSVASQSIIAYTMSLGAENSVAYSNNSIAIPTNFTISVTTEILPVSMTKTSVDCTMYICGDSTECSNLLLQYGSFCTQLNRALTGIAVEQDKNTQEVFAQVKQIYKTPPIKDFGGFNFSQILPDPSKPSKRSFIEDLLFNKVTLADAGFIKQYGDCLGDIAARDLICAQKFNGLTVLPPLLTDEMIAQYTSALLAGTITSGWTFGAGAALQIPFAMQMAYRFNGIGVTQNVLYENQKLIANQFNSAIGKIQDSLSSTASALGKLQDVVNQNAQALNTLVKQLSSNFGAISSVLNDILSRLDPPEAEVQIDRLITGRLQSLQTYVTQQLIRAAEIRASANLAATKMSECVLGQSKRVDFCGKGYHLMSFPQSAPHGVVFLHVTYVFAQEKNFTTAPAICHDGKAHFPREGVFVSNGTHWFVTQRNFYEPQIITTDNTFVSGNCDVVIGIVNNTVYDPLQPELDSGGSGYIPEAPRDGQAYVRKDGEWVLLSTFL

SEQ ID NO: 9903 - protein, 1177 aa, Artificial Sequence
  SARS-CoV-2/Portugal/PT0035/2020__EPI_ISL_418020 spike protein (1-1147)(K986P_V987P_P1069F) Foldon construct
MFVFLVLLPLVSSQCVNLTTRTQLPPAYTNSFTRGVYYPDKVFRSSVLHSTQDLFLPFFSNVTWFHAIHVSGTNGTKRFDNPVLPFNDGVYFASTEKSNIIRGWIFGTTLDSKTQSLLIVNNATNVVIKVCEFQFCNDPFLGVYYHKNNKSWMESEFRVYSSANNCTFEYVSQPFLMDLEGKQGNFKNLREFVFKNIDGYFKIYSKHTPINLVRDLPQGFSALEPLVDLPIGINITRFQTLLALHRSYLTPGDSSSGWTAGAAAYYVGYLQPRTFLLKYNENGTITDAVDCALDPLSETKCTLKSFTVEKGIYQTSNFRVQPTESIVRFPNITNLCPFGEVFNATRFASVYAWNRKRISNCVADYSVLYNSASFSTFKCYGVSPTKLNDLCFTNVYADSFVIRGDEVRQIAPGQTGKIADYNYKLPDDFTGCVIAWNSNNLDSKVGGNYNYLYRLFRKSNLKPFERDISTEIYQAGSTPCNGVEGFNCYFPLQSYGFQPTNGVGYQPYRVVVLSFELLHAPATVCGPKKSTNLVKNKCVNFNFNGLTGTGVLTESNKKFLPFQQFGRDIADTTDAVRDPQTLEILDITPCSFGGVSVITPGTNTSNQVAVLYQDVNCTEVPVAIHADQLTPTWRVYSTGSNVFQTRAGCLIGAEHVNNSYECDIPIGAGICASYQTQTNSPRRARSVASQSIIAYTMSLGAENSVAYSNNSIAIPTNFTISVTTEILPVSMTKTSVDCTMYICGDSTECSNLLLQYGSFCTQLNRALTGIAVEQDKNTQEVFAQVKQIYKTPPIKDFGGFNFSQILPDPSKPSKRSFIEDLLFNKVTLADAGFIKQYGDCLGDISARDLICAQKFNGLTVLPPLLTDEMIAQYTSALLAGTITSGWTFGAGAALQIPFAMQMAYRFNGIGVTQNVLYENQKLIANQFNSAIGKIQDSLSSTASALGKLQDVVNQNAQALNTLVKQLSSNFGAISSVLNDILSRLDPPEAEVQIDRLITGRLQSLQTYVTQQLIRAAEIRASANLAATKMSECVLGQSKRVDFCGKGYHLMSFPQSAPHGVVFLHVTYVFAQEKNFTTAPAICHDGKAHFPREGVFVSNGTHWFVTQRNFYEPQIITTDNTFVSGNCDVVIGIVNNTVYDPLQPELDSGGSGYIPEAPRDGQAYVRKDGEWVLLSTFL

SEQ ID NO: 9904 - protein, 1177 aa, Artificial Sequence
  SARS-CoV-2/USA/NY-NYUMC7/2020__EPI_ISL_418192 spike protein (1-1147)(K986P_V987P_P1069F) Foldon construct
MFVFLVLLPLVSSQCVNLTTRTQLPPAYTNSFTRGVYYPDKVFRSSVLHSTQDLFLPFFSNVTWFHAIHVSGTNGTKRFDNPVLPFNDGVYFASTEKSNIIRGWIFGTTLDSKTQSLLIVNNATNVVIKVCEFQFCNDPFLGVYHHKNNKSWMESEFRVYSSANNCTFEYVSQPFLMDLEGKQGNFKNLREFVFKNIDGYFKIYSKHTPINLVRDLPQGFSALEPLVDLPIGINITRFQTLLALHRSYLTPGDSSSGWTAGAAAYYVGYLQPRTFLLKYNENGTITDAVDCALDPLSETKCTLKSFTVEKGIYQTSNFRVQPTESIVRFPNITNLCPFGEVFNATRFASVYAWNRKRISNCVADYSVLYNSASFSTFKCYGVSPTKLNDLCFTNVYADSFVIRGDEVRQIAPGQTGKIADYNYKLPDDFTGCVIAWNSNNLDSKVGGNYNYLYRLFRKSNLKPFERDISTEIYQAGSTPCNGVEGFNCYFPLQSYGFQPTNGVGYQPYRVVVLSFELLHAPATVCGPKKSTNLVKNKCVNFNFNGLTGTGVLTESNKKFLPFQQFGRDIADTTDAVRDPQTLEILDITPCSFGGVSVITPGTNTSNQVAVLYQGVNCTEVPVAIHADQLTPTWRVYSTGSNVFQTRAGCLIGAEHVNNSYECDIPIGAGICASYQTQTNSPRRARSVASQSIIAYTMSLGAENSVAYSNNSIAIPTNFTISVTTEILPVSMTKTSVDCTMYICGDSTECSNLLLQYGSFCTQLNRALTGIAVEQDKNTQEVFAQVKQIYKTPPIKDFGGFNFSQILPDPSKPSKRSFIEDLLFNKVTLADAGFIKQYGDCLGDIAARDLICAQKFNGLTVLPPLLTDEMIAQYTSALLAGTITSGWTFGAGAALQIPFAMQMAYRFNGIGVTQNVLYENQKLIANQFNSAIGKIQDSLSSTASALGKLQDVVNQNAQALNTLVKQLSSNFGAISSVLNDILSRLDPPEAEVQIDRLITGRLQSLQTYVTQQLIRAAEIRASANLAATKMSECVLGQSKRVDFCGKGYHLMSFPQSAPHGVVFLHVTYVFAQEKNFTTAPAICHDGKAHFPREGVFVSNGTHWFVTQRNFYEPQIITTDNTFVSGNCDVVIGIVNNTVYDPLQPELDSGGSGYIPEAPRDGQAYVRKDGEWVLLSTFL

SEQ ID NO: 9905 - protein, 1177 aa, Artificial Sequence
  SARS-CoV-2/Iceland/189/2020__EPI_ISL_417709 spike protein (1-1147)(K986P_V987P_P1069F) Foldon construct
MFVFLVLLPLVSSQCVNLTTRTQLPPAYTNSFTRGVYYPDKVFRSSVLHSTQDLFLPFFSNVTWFHAIHVSGTNGTKRFDNPVLPFNDGVYFASTEKSNIIRGWIFGTTLDSKTQSLLIVNNATNVVIKVCEFQFCNDPFLGVYYHKNNKSWMESEFRVYSSANNCTFEYVSQPFLMDLEGKQGNFKNLREFVFKNIDGYFKIYSKHTPINLVRDLPQGFSALEPLVDLPIGINITRFQTLLALHRSYLTPGDSSSGWTAGAAAYYVGYLQPRTFLLKYNENGTITDAVDCALDPLSETKCTLKSFTVEKGIYQTSNFRVQPTESIVRFPNITNLCPFGEVFNATRFASVYAWNRKRISNCVADYSVLYNSASFSTFKCYGVSPTKLNDLCFTNVYADSFVIRGDEVRQIAPGQTGKIADYNYKLPDDFTGCVIAWNSNNLDSKVGGNYNYLYRLFRKSNLKPFERDISTEIYQAGSTPCNGVEGFNCYFPLQSYGFQPTNGVGYQPYRVVVLSFELLHAPATVCGPKKSTNLVKNKCVNFNFNGLTGTGVLTESNKKFLPFQQFGRDIADTTDAVRDPQTLEILDITPCSFGGVSVITPGTNTSNQVAVLYQGVNCTEVPVAIHADQLTPTWRVYSTGSNVFQTRAGCLIGAEHVNNSYECDIPIGAGICASYQTQTNSPRRARSVASQSIIAYTMSLGAENSVAYSNNSIAIPTNFTISVTTEILPVSMTKTSVDCTMYICGDSTECSNLLLQYGSFCTQLNRALTGIAVEQDKNTQEVFAQVKQIYKTPPIKDFGGFNFSQILPDPSKPSKRSFIEDLLFNKVTLADAGFTKQYGDCLGDIAARDLICAQKFNGLTVLPPLLTDEMIAQYTSALLAGTITSGWTFGAGAALQIPFAMQMAYRFNGIGVTQNVLYENQKLIANQFNSAIGKIQDSLSSTASALGKLQDVVNQNAQALNTLVKQLSSNFGAISSVLNDILSRLDPPEAEVQIDRLITGRLQSLQTYVTQQLIRAAEIRASANLAATKMSECVLGQSKRVDFCGKGYHLMSFPQSAPHGVVFLHVTYVFAQEKNFTTAPAICHDGKAHFPREGVFVSNGTHWFVTQRNFYEPQIITTDNTFVSGNCDVVIGIVNNTVYDPLQPELDSGGSGYIPEAPRDGQAYVRKDGEWVLLSTFL

SEQ ID NO: 9906 - protein, 1177 aa, Artificial Sequence
  SARS-CoV-2/Australia/NSW56/2020__EPI_ISL_417408 spike protein (1-1147)(K986P_V987P_P1069F) Foldon construct
MFVFLVLLPLVSSQCVNLTTRTQLPPAYTNSFTRGVYYPDKVFRSSVLHSTQDLFLPFFSNVTWFHAIHVSGTNGTKRFDNPVLPFNDGVYFASTEKSNIIRGWIFGTTLDSKTQSLLIVNNATNVVIKVCEFQFCNDPFLGVYYHKNNKSWMESEFRVYSSANNCTFEYVSQPFLMDLEGKQGNFKNLREFVFKNIDGYFKIYSKHTPINLVRDLPQGFSALEPLVDLPIGINITRFQTLLALHRSYLTPGDSSSGWTAGAAAYYVGYLQPRTFLLKYNENGTITDAVDCALDPLSETKCTLKSFTVEKGIYQTSNFRVQPTESIVRFPNITNLCPFGEVFNATRFASVYAWNRKRISNCVADYSVLYNSASFSTFKCYGVSPTKLNDLCFTNVYADSFVIRGDEVRQIAPGQTGKIADYNYKLPDDFTGCVIAWNSNNLDSKVGGNYNYLYRLFRKSNLKPFERDISTEIYQAGSTPCNGVEGFNCYFPLQSYGFQPTNGVGYQPYRVVVLSFELLHAPATVCGPKKSTNLVKNKCVNFNFNGLTGTGVLTESNKKFLPFQQFGRDIADTTDAVRDPQTLEILDITPCSFGGVSVITPGTNTSNQVAVLYQDVNCTEVPVAIHADQLTPTWRVYSTGSNVFQTRAGCLIGAEHVNNSYECDIPIGAGICASYQTQTNSPRRARSVASQSIIAYTMSLGAENSVAYSNNSIAIPTNFTISVTTEILPVSMTKTSVDCTMYICGDSTECSNLLLQYGSFCTQLNRALTGIAVEQDKNTQEVFAQVKQIYKTPPIKDFGGFNFSQILPDSSKPSKRSFIEDLLFNKVTLADAGFIKQYGDCLGDIAARDLICAQKFNGLTVLPPLLTDEMIAQYTSALLAGTITSGWTFGAGAALQIPFAMQMAYRFNGIGVTQNVLYENQKLIANQFNSAIGKIQDSLSSTASALGKLQDVVNQNAQALNTLVKQLSSNFGAISSVLNDILSRLDPPEAEVQIDRLITGRLQSLQTYVTQQLIRAAEIRASANLAATKMSECVLGQSKRVDFCGKGYHLMSFPQSAPHGVVFLHVTYVFAQEKNFTTAPAICHDGKAHFPREGVFVSNGTHWFVTQRNFYEPQIITTDNTFVSGNCDVVIGIVNNTVYDPLQPELDSGGSGYIPEAPRDGQAYVRKDGEWVLLSTFL

SEQ ID NO: 9907 - protein, 1177 aa, Artificial Sequence
  SARS-CoV-2/Iceland/280/2020__EPI_ISL_417608 spike protein (1-1147)(K986P_V987P_P1069F) Foldon construct
MFVFLVLLPLVSSQCVNLTTRTQLPPAYTNSFTRGVYYPDKVFRSSVLHSTQDLFLPFFSNVTWFHAIHVSGTNGTKRFDNPVLPFNDGVYFASTEKSNIIRGWIFGTTLDSKTQSLLIVNNATNVVIKVCEFQFCNDPFLGVYYHKNNKSWMESEFRVYSSANNCTFEYVSQPFLMDLEGKQGNFKNLREFVFKNIDGYFKIYSKHTPINLVRDLPQGFSALEPLVDLPIGINITRFQTLLALHRSYLTPGDSSSGWTAGAAAYYVGYLQPRTFLLKYNENGTITDAVDCALDPLSETKCTLKSFTVEKGIYQTSNFRVQPTESIVRFPNITNLCPFGEVFNATRFASVYAWNRKRISNCVADYSVLYNSASFSTFKCYGVSPTKLNDLCFTNVYADSFVIRGDEVRQIAPGQTGKIADYNYKLPDDFTGCVIAWNSNNLDSKVGGNYNYLYRLFRKSNLKPFERDISTEIYQAGSTPCNGVEGFNCYFPLQSYGFQPTNGVGYQPYRVVVLSFELLHAPATVCGPKKSTNLVKNKCVNFNFNGLTGTGVLTESNKKFLPFQQFGRDIADTTDAVRDPQTLEILDITPCSFGGVSVITPGTNTSNQVAVLYQGVNCTEVPVAIHADQLTPTWRVYSTGSNVFQTRAGCLIGAEHVNNSYECDIPIGAGICASYHTQTNSPRRARSVASQSIIAYTMSLGAENSVAYSNNSIAIPTNFTISVTTEILPVSMTKTSVDCTMYICGDSTECSNLLLQYGSFCTQLNRALTGIAVEQDKNTQEVFAQVKQIYKTPPIKDFGGFNFSQILPDPSKPSKRSFIEDLLFNKVTLADAGFIKQYGDCLGDIAARDLICAQKFNGLTVLPPLLTDEMIAQYTSALLAGTITSGWTFGAGAALQIPFAMQMAYRFNGIGVTQNVLYENQKLIANQFNSAIGKIQDSLSSTASALGKLQDVVNQNAQALNTLVKQLSSNFGAISSVLNDILSRLDPPEAEVQIDRLITGRLQSLQTYVTQQLIRAAEIRASANLAATKMSECVLGQSKRVDFCGKGYHLMSFPQSAPHGVVFLHVTYVFAQEKNFTTAPAICHDGKAHFPREGVFVSNGTHWFVTQRNFYEPQIITTDNTFVSGNCDVVIGIVNNTVYDPLQPELDSGGSGYIPEAPRDGQAYVRKDGEWVLLSTFL

SEQ ID NO: 9908 - protein, 1177 aa, Artificial Sequence; identical to SEQ ID NO: 9863
  SARS-CoV-2/Iceland/247/2020__EPI_ISL_417575 spike protein (1-1147)(K986P_V987P_P1069F) Foldon construct

SEQ ID NO: 9909 - protein, 1177 aa, Artificial Sequence
  SARS-CoV-2/Iceland/238/2020__EPI_ISL_417566 spike protein (1-1147)(K986P_V987P_P1069F) Foldon construct
MFVFLVLLPLVSSQCVNLTTRTQLPPAYTNSFTRGVYYPDKVFRSSVLHSTQDLFLPFFSNVTWFHAIHVSGTNGTKRFDNPVLPFNDGVYFASTEKSNIIRGWIFGTTLDSKTQSLLIVNNATNVVIKVCEFQFCNDPFLGVYYHKNNKSWMESEFRVYSSANNCTFEYVSQPFLMDLEGKQGNFKNLREFVFKNIDGYFKIYSKHTPINLVRDLPQGFSALEPLVDLPIGINITRFQTLLALHRSYLTPGDSSSGWTAGAAAYYVGYLQPRTFLLKYNENGTITDAVDCALDPLSETKCTLKSFTVEKGIYQTSNFRVQPTESIVRFPNITNLCPFGEVFNATRFASVYAWNRKRISNCVADYSVLYNSASFSTFKCYGVSPTKLNDLCFTNVYADSFVIRGDEVRQIAPGQTGKIADYNYKLPDDFTGCVIAWNSNNLDSKVGGNYNYLYRLFRKSNLKPFERDISTEIYQAGSTPCNGVEGFNCYFPLQSYGFQPTNGVGYQPYRVVVLSFELLHAPATVCGPKKSTNLVKNKCVNFNFNGLTGTGVLTESNKKFLPFQQFGRDIADTTDAVRDPQTLEILDITPCSFGGVSVITPGTNTSNQVAVLYQGVNCTEVPVAIHADQLTPTWRVYSTGSNVFQTRAGCLIGAEHVNNSYECDIPIGAGICASYQTQTNSPRRARSVASQSIIAYTMSLGAENSVAYSNNSIAIPTNFTISVTTEILPVSMTKTSVDCTMYICGDSTECSNLLLQYGSFCTQLNRALTGIAVEQDKNTQEVFAQVKQIYKTPPIKDFGGFNFSQILPDPSKPSKRSFIEDLLFNKVTLADVGFIKQYGDCLGDIAARDLICAQKFNGLTVLPPLLTDEMIAQYTSALLAGTITSGWTFGAGAALQIPFAMQMAYRFNGIGVTQNVLYENQKLIANQFNSAIGKIQDSLSSTASALGKLQDVVNQNAQALNTLVKQLSSNFGAISSVLNDILSRLDPPEAEVQIDRLITGRLQSLQTYVTQQLIRAAEIRASANLAATKMSECVLGQSKRVDFCGKGYHLMSFPQSAPHGVVFLHVTYVFAQEKNFTTAPAICHDGKAHFPREGVFVSNGTHWFVTQRNFYEPQIITTDNTFVSGNCDVVIGIVNNTVYDPLQPELDSGGSGYIPEAPRDGQAYVRKDGEWVLLSTFL

SEQ ID NO: 9910 - protein, 1177 aa, Artificial Sequence
  SARS-CoV-2/Greece/16/2020__EPI_ISL_418265 spike protein (1-1147)(K986P_V987P_P1069F) Foldon construct
MFVFLVLLPLVSSQCVNLTTRTQLPPAYTNSFTRGVYYPDKVFRSSVLHSTQDLFLPFFSNVTWFHAIHVSGTNGTKRFDNPVLPFNDGVYFASTEKSNIIRGWIFGTTLDSKTQSLLIVNNATNVVIKVCEFQFCNDPFLGVYYHKNNKSWMESEFRVYSSANNCTFEYVSQPFLMDLEGKQGNFKNLREFVFKNVDGYFKIYSKHTPINLVRDLPQGFSALEPLVDLPIGINITRFQTLLALHRSYLTPGDSSSGWTAGAAAYYVGYLQPRTFLLKYNENGTITDAVDCALDPLSETKCTLKSFTVEKGIYQTSNFRVQPTESIVRFPNITNLCPFGEVFNATRFASVYAWNRKRISNCVADYSVLYNSASFSTFKCYGVSPTKLNDLCFTNVYADSFVIRGDEVRQIAPGQTGKIADYNYKLPDDFTGCVIAWNSNNLDSKVGGNYNYLYRLFRKSNLKPFERDISTEIYQAGSTPCNGVEGFNCYFPLQSYGFQPTNGVGYQPYRVVVLSFELLHAPATVCGPKKSTNLVKNKCVNFNFNGLTGTGVLTESNKKFLPFQQFGRDIADTTDAVRDPQTLEILDITPCSFGGVSVITPGTNTSNQVAVLYQDVNCTEVPVAIHADQLTPTWRVYSTGSNVFQTRAGCLIGAEHVNNSYECDIPIGAGICASYQTQTNSPRRARSVASQSIIAYTMSLGAENSVAYSNNSIAIPTNFTISVTTEILPVSMTKTSVDCTMYICGDSTECSNLLLQYGSFCTQLNRALTGIAVEQDKNTQEVFAQVKQIYKTPPIKDFGGFNFSQILPDPSKPSKRSFIEDLLFNKVTLADAGFIKQYGDCLGDIAARDLICAQKFNGLTVLPPLLTDEMIAQYTSALLAGTITSGWTFGAGAALQIPFAMQMAYRFNGIGVTQNVLYENQKLIANQFNSAIGKIQDSLSSTASALGKLQDVVNQNAQALNTLVKQLSSNFGAISSVLNDILSRLDPPEAEVQIDRLITGRLQSLQTYVTQQLIRAAEIRASANLAATKMSECVLGQSKRVDFCGKGYHLMSFPQSAPHGVVFLHVTYVFAQEKNFTTAPAICHDGKAHFPREGVFVSNGTHWFVTQRNFYEPQIITTDNTFVSGNCDVVIGIVNNTVYDPLQPELDSGGSGYIPEAPRDGQAYVRKDGEWVLLSTFL

SEQ ID NO: 9911 - protein, 1177 aa, Artificial Sequence
  SARS-CoV-2/Iceland/319/2020__EPI_ISL_417648 spike protein (1-1147)(K986P_V987P_P1069F) Foldon construct
MFVFLVLLPLVSSQCVNLTTRTQLPPAYTNSFTRGVYYPDKVFRSSVLHSTQDLFLPFFSNVTWFHAIHVSGTNGTKRFDNPVLPFNDGVYFASTEKSNIIRGWIFGTTLDSKTQSLLIVNNATNVVIKVCEFQFCNDPFLGVYYHKNNKSWMESEFRVYSSANNCTFEYVSQPFLIDLEGKQGNFKNLREFVFKNIDGYFKIYSKHTPINLVRDLPQGFSALEPLVDLPIGINITRFQTLLALHRSYLTPGDSSSGWTAGAAAYYVGYLQPRTFLLKYNENGTITDAVDCALDPLSETKCTLKSFTVEKGIYQTSNFRVQPTESIVRFPNITNLCPFGEVFNATRFASVYAWNRKRISNCVADYSVLYNSASFSTFKCYGVSPTKLNDLCFTNVYADSFVIRGDEVRQIAPGQTGKIADYNYKLPDDFTGCVIAWNSNNLDSKVGGNYNYLYRLFRKSNLKPFERDISTEIYQAGSTPCNGVEGFNCYFPLQSYGFQPTNGVGYQPYRVVVLSFELLHAPATVCGPKKSTNLVKNKCVNFNFNGLTGTGVLTESNKKFLPFQQFGRDIADTTDAVRDPQTLEILDITPCSFGGVSVITPGTNTSNQVAVLYQGVNCTEVPVAIHADQLTPTWRVYSTGSNVFQTRAGCLIGAEHVNNSYECDIPIGAGICASYQTQTNSPRRARSVASQSIIAYTMSLGAENSVAYSNNSIAIPTNFTISVTTEILPVSMTKTSVDCTMYICGDSTECSNLLLQYGSFCTQLNRALTGIAVEQDKNTQEVFAQVKQIYKTPPIKDFGGFNFSQILPDPSKPSKRSFIEDLLFNKVTLADAGFIKQYGDCLGDIAARDLICAQKFNGLTVLPPLLTDEMIAQYTSALLAGTITSGWTFGAGAALQIPFAMQMAYRFNGIGVTQNVLYENQKLIANQFNSAIGKIQDSLSSTASALGKLQDVVNQNAQALNTLVKQLSSNFGAISSVLNDILSRLDPPEAEVQIDRLITGRLQSLQTYVTQQLIRAAEIRASANLAATKMSECVLGQSKRVDFCGKGYHLMSFPQSAPHGVVFLHVTYVFAQEKNFTTAPAICHDGKAHFPREGVFVSNGTHWFVTQRNFYEPQIITTDNTFVSGNCDVVIGIVNNTVYDPLQPELDSGGSGYIPEAPRDGQAYVRKDGEWVLLSTFL

SEQ ID NO: 9912 - protein, 1177 aa, Artificial Sequence
  SARS-CoV-2/Congo/94/2020__EPI_ISL_417947 spike protein (1-1147)(K986P_V987P_P1069F) Foldon construct
MFVFLVLLPLVSSQCVNLTTRTQLPPAYTNSFTRGVYYPDKVFRSSVLHSTQDLFLPFFSNVTWFHAIHVSGTNGTKRFDNPVLPFNDGVYFASTEKSNIIRGWIFGTTLDSKTQSLLIVNNATNVVIKVCEFQFCNDPFLGVYYHKNNKSWMESEFRVYSSANNCTFEYVSQPFLMDLEGKQGNFKNLREFVFKNIDGYFKIYSKHTPINLVRDLPQGFSALEPLVDLPIGINITRFQTLLALHRSYLTPGDSSSGWTAGAAAYYVGYLQPRTFLLKYNENGTITDAVDCALDPLSETKCTLKSFTVEKGIYQTSNFRVQPTESIVRFPNITNLCPFGEVFNATRFASVYAWNRKRISNCVADYSVLYNSASFSTFKCYGVSPTKLNDLCFTNVYADSFVIRGDEVRQIAPGQTGKIADYNYKLPDDFTGCVIAWNSNNLDSKVGGNYNYLYRLFRKSNLKPFERDISTEIYQAGSTPCNGVEGFNCYFPLQSYGFQPTNGVGYQPYRVVVLSFELLHAPATVCGPKKSTNLVKNKCVNFNFNGLTGTGVLTESNKKFLPFQQFGRDIADTTDAVRDPQTLEILDITPCSFGGVSVITPGTNTSNQVAVLYQGVNCTEVPVAIHADQLTPTWRVYSTGSNVFQTRAGCLIGAEHVNNSYECDIPIGAGICASYQTQTNSPRRARSVASQSIIAYTMSLGAENSVAYSNNSIAIPTNFTISVTTEILPVSMTKTSVDCTMYICGDSTECSNLLLQYGSFCTQLNRALTGIAVEQDKNTQEVFAQVKQIYKTPPIKDFGGFNFSQILPDPSKPSKRSFIEDILFNKVTLADAGFIKQYGDCLGDIAARDLICAQKFNGLTVLPPLLTDEMIAQYTSALLAGTITSGWTFGAGAALQIPFAMQMAYRFNGIGVTQNVLYENQKLIANQFNSAIGKIQDSLSSTASALGKLQDVVNQNAQALNTLVKQLSSNFGAISSVLNDILSRLDPPEAEVQIDRLITGRLQSLQTYVTQQLIRAAEIRASANLAATKMSECVLGQSKRVDFCGKGYHLMSFPQSAPHGVVFLHVTYVFAQEKNFTTAPAICHDGKAHFPREGVFVSNGTHWFVTQRNFYEPQIITTDNTFVSGNCDVVIGIVNNTVYDPLQPELDSGGSGYIPEAPRDGQAYVRKDGEWVLLSTFL

SEQ ID NO: 9913 - protein, 1177 aa, Artificial Sequence
  SARS-CoV-2/Congo/158/2020__EPI_ISL_417950 spike protein (1-1147)(K986P_V987P_P1069F) Foldon construct
MFVFLVLLPLVSSQCVNLTTRTQLPPAYTNSFTRGVYYPDKVFRSSVLHSTQDLFLPFFSNVTWFHAIHVSGTNGTKRFDNPVLPFNDGVYFASTEKSNIIRGWIFGTTLDSKTQSLLIVNNATNVVIKVCEFQFCNDPFLGVYYHKNNKSWMESEFRVYSSANNCTFEYVSQPFLMDLEGKQGNFKNLREFVFKNIDGYFKIYSKHTPINLVRDLPQGFSALEPLVDLPIGINITRFQTLLALHRSYLTPGDSSSGWTAGAAAYYVGYLQPRTFLLKYNENGTITDAVDCALDPLSETKCTLKSFTVEKGIYQTSNFRVQPTESIVRFPNITNLCPFGEVFNATRFASVYAWNRKRISNCVADYSVLYNSASFSTFKCYGVSPTKLNDLCFTNVYADSFVIRGDEVRQIAPGQTGKIADYNYKLPDDFTGCVIAWNSNNLDSKVGGNYNYLYRLFRKSNLKPFERDISTEIYQAGSTPCNGVEGFNCYFPLQSYGFQPTNGVGYQPYRVVVLSFELLHAPATVCGPKKSTNLVKNKCVNFNFNGLTGTGVLTESNKKFLPFQQFGRDIADTTDAVRDPQTLEILDITPCSFGGVSVITPGTNTSNQVAVLYQDVNCTEVPVAIHADQLTPTWRVYSTGSNVFQTRAGCLIGAEHVNNSYECDIPIGAGICASYQTQTNSPRRARSVASQSIIAYTMSLGAENSVAYSNNSIAIPTNFTISVTTEILPVSMTKTSVDCTMYICGDSTECSNLLLQYGSFCTQLNRALTGIAVEQDKNTQEVFAQVKQIYKTPPIKDFGGFNFSQILPDPSKPSKRSFIEDLLFNKVTLADAGFIKQYGDCLGDIAARDLICAQKFNGLTVLPPLLTDEMIAQYTSALLAGTITSGWTFGAGAALQIPFAMQMAYRFNGIGVTQNVLYENQKLIANQFNSAIGKIQDSLSSTASALGKLQDVVNQNAQALNTLVKQLSSNFGAISSVLNDILSRLDPPEAEVQIDRLITGRLQSLQTYVTQQLIRAAEIRASANLAATKMSECVLGQSKRVDFCGKGYHLMSFPQSAPHGVVFLHVTYVFAQEKNFTTAPAICHDGKAHFPREGVFVSNGTHWFVTQRNFYEPQIITTDNTFLSGNCDVVIGIVNNTVYDPLQPELDSGGSGYIPEAPRDGQAYVRKDGEWVLLSTFL

SEQ ID NO: 9914 - protein, 1177 aa, Artificial Sequence
  SARS-CoV-2/USA/UT-00034/2020__EPI_ISL_417977 spike protein (1-1147)(K986P_V987P_P1069F) Foldon construct
MFVFLVLLPLVSSQCVNLTTRTQLPPAYTNSFTRGVYYPDKVFRSSVLHSTQDLFLPFFSNVTWFHAIHVSGTNGTKRFDNPVLPFNDGVYFASTEKSNIIRGWIFGTTLDSKTQSLLIVNNATNVVIKVCEFQFCNDPFLGVYYYKNNKSWMESEFRVYSSANNCTFEYVSQPFLMDLEGKQGNFKNLREFVFKNIDGYFKIYSKHTPINLVRDLPQGFSALEPLVDLPIGINITRFQTLLALHRSYLTPGDSSSGWTAGAAAYYVGYLQPRTFLLKYNENGTITDAVDCALDPLSETKCTLKSFTVEKGIYQTSNFRVQPTESIVRFPNITNLCPFGEVFNATRFASVYAWNRKRISNCVADYSVLYNSASFSTFKCYGVSPTKLNDLCFTNVYADSFVIRGDEVRQIAPGQTGKIADYNYKLPDDFTGCVIAWNSNNLDSKVGGNYNYLYRLFRKSNLKPFERDISTEIYQAGSTPCNGVEGFNCYFPLQSYGFQPTNGVGYQPYRVVVLSFELLHAPATVCGPKKSTNLVKNKCVNFNFNGLTGTGVLTESNKKFLPFQQFGRDIADTTDAVRDPQTLEILDITPCSFGGVSVITPGTNTSNQVAVLYQGVNCTEVPVAIHADQLTPTWRVYSTGSNVFQTRAGCLIGAEHVNNSYECDIPIGAGICASYQTQTNSPRRARSVASQSIIAYTMSLGAENSVAYSNNSIAIPTNFTISVTTEILPVSMTKTSVDCTMYICGDSTECSNLLLQYGSFCTQLNRALTGIAVEQDKNTQEVFAQVKQIYKTPPIKDFGGFNFSQILPDPSKPSKRSFIEDLLFNKVTLADAGFIKQYGDCLGDIAARDLICAQKFNGLTVLPPLLTDEMIAQYTSALLAGTITSGWTFGAGAALQIPFAMQMAYRFNGIGVTQNVLYENQKLIANQFNSAIGKIQDSLSSTASALGKLQDVVNQNAQALNTLVKQLSSNFGAISSVLNDILSRLDPPEAEVQIDRLITGRLQSLQTYVTQQLIRAAEIRASANLAATKMSECVLGQSKRVDFCGKGYHLMSFPQSAPHGVVFLHVTYVFAQEKNFTTAPAICHDGKAHFPREGVFVSNGTHWFVTQRNFYEPQIITTDNTFVSGNCDVVIGIVNNTVYDPLQPELDSGGSGYIPEAPRDGQAYVRKDGEWVLLSTFL

SEQ ID NO: 9915 - protein, 1177 aa, Artificial Sequence
  SARS-CoV-2/USA/UT-00033/2020__EPI_ISL_417976 spike protein (1-1147)(K986P_V987P_P1069F) Foldon construct
MFVFLVLLPLVSSQCVNLTTRTQLPPAYTNSFTRGVYYPDKVFRSSVLHSTQDLFLPFFSNVTWFHAIHVSGTNGTKRFDNPVLPFNDGVYFASTEKSNIIRGWIFGTTLDSKTQSLLIVNNATNVVIKVCEFQFCNDPFLGVYYHKNNKSWMESEFRVYSSANNCTFEYVSQPFLMDLEGKQGNFKNLREFVFKNIDGYFKIYSKHTPINLVRDLPQGFSALEPLVDLPIGINITRFQTLLALHRSYLTPGDSSSGLTAGAAAYYVGYLQPRTFLLKYNENGTITDAVDCALDPLSETKCTLKSFTVEKGIYQTSNFRVQPTESIVRFPNITNLCPFGEVFNATRFASVYAWNRKRISNCVADYSVLYNSASFSTFKCYGVSPTKLNDLCFTNVYADSFVIRGDEVRQIAPGQTGKIADYNYKLPDDFTGCVIAWNSNNLDSKVGGNYNYLYRLFRKSNLKPFERDISTEIYQAGSTPCNGVEGFNCYFPLQSYGFQPTNGVGYQPYRVVVLSFELLHAPATVCGPKKSTNLVKNKCVNFNFNGLTGTGVLTESNKKFLPFQQFGRDIADTTDAVRDPQTLEILDITPCSFGGVSVITPGTNTSNQVAVLYQGVNCTEVPVAIHADQLTPTWRVYSTGSNVFQTRAGCLIGAEHVNNSYECDIPIGAGICASYQTQTNSPRRARSVASQSIIAYTMSLGAENSVAYSNNSIAIPTNFTISVTTEILPVSMTKTSVDCTMYICGDSTECSNLLLQYGSFCTQLNRALTGIAVEQDKNTQEVFAQVKQIYKTPPIKDFGGFNFSQILPDPSKPSKRSFIEDLLFNKVTLADAGFIKQYGDCLGDIAARDLICAQKFNGLTVLPPLLTDEMIAQYTSALLAGTITSGWTFGAGAALQIPFAMQMAYRFNGIGVTQNVLYENQKLIANQFNSAIGKIQDSLSSTASALGKLQDVVNQNAQALNTLVKQLSSNFGAISSVLNDILSRLDPPEAEVQIDRLITGRLQSLQTYVTQQLIRAAEIRASANLAATKMSECVLGQSKRVDFCGKGYHLMSFPQSAPHGVVFLHVTYVFAQEKNFTTAPAICHDGKAHFPREGVFVSNGTHWFVTQRNFYEPQIITTDNTFVSGNCDVVIGIVNNTVYDPLQPELDSGGSGYIPEAPRDGQAYVRKDGEWVLLSTFL

SEQ ID NO: 9916 - protein, 1177 aa, Artificial Sequence
  SARS-CoV-2/USA/WI-13/2020__EPI_ISL_417516 spike protein (1-1147)(K986P_V987P_P1069F) Foldon construct
MFVFLVLLPLVSSQCVNLTTRTQLPPAYTNSFTRGVYYPDKVFRSSVLHSTQDLFLPFFSNVTWFHAIHVSGTNGTKRFDNPVLPFNDGVYFASTEKSNIIRGWIFGTTLDSKTQSLLIVNNATNVVIKVCEFQFCNDPFLGVYYHKNNKSWMESEFRVYSSANNCTFEYVSQPFLMDLEGKQGNFKNLREFVFKNIDGYFKIYSKHTPINLVRDLPQGFSALEPLVDLPIGINITRFQTLLALHRSYLTPGDSSSGWTAGAAAYYVGYLQPRTFLLKYNENGTITDAVDCALDPLSETKCTLKSFTVEKGIYQTSNFRVLPTESIVRFPNITNLCPFGEVFNATRFASVYAWNRKRISNCVADYSVLYNSASFSTFKCYGVSPTKLNDLCFTNVYADSFVIRGDEVRQIAPGQTGKIADYNYKLPDDFTGCVIAWNSNNLDSKVGGNYNYLYRLFRKSNLKPFERDISTEIYQAGSTPCNGVEGFNCYFPLQSYGFQPTNGVGYQPYRVVVLSFELLHAPATVCGPKKSTNLVKNKCVNFNFNGLTGTGVLTESNKKFLPFQQFGRDIADTTDAVRDPQTLEILDITPCSFGGVSVITPGTNTSNQVAVLYQGVNCTEVPVAIHADQLTPTWRVYSTGSNVFQTRAGCLIGAEHVNNSYECDIPIGAGICASYQTQTNSPRRARSVASQSIIAYTMSLGAENSVAYSNNSIAIPTNFTISVTTEILPVSMTKTSVDCTMYICGDSTECSNLLLQYGSFCTQLNRALTGIAVEQDKNTQEVFAQVKQIYKTPPIKDFGGFNFSQILPDPSKPSKRSFIEDLLFNKVTLADAGFIKQYGDCLGDIAARDLICAQKFNGLTVLPPLLTDEMIAQYTSALLAGTITSGWTFGAGAALQIPFAMQMAYRFNGIGVTQNVLYENQKLIANQFNSAIGKIQDSLSSTASALGKLQDVVNQNAQALNTLVKQLSSNFGAISSVLNDILSRLDPPEAEVQIDRLITGRLQSLQTYVTQQLIRAAEIRASANLAATKMSECVLGQSKRVDFCGKGYHLMSFPQSAPHGVVFLHVTYVFAQEKNFTTAPAICHDGKAHFPREGVFVSNGTHWFVTQRNFYEPQIITTDNTFVSGNCDVVIGIVNNTVYDPLQPELDSGGSGYIPEAPRDGQAYVRKDGEWVLLSTFL

SEQ ID NO: 9917 - protein, 1176 aa, Artificial Sequence
  SARS-CoV-2/India/1-27/2020__EPI_ISL_413522 spike protein (1-1146)(K985P_V986P_P1068F) Foldon construct
MFVFLVLLPLVSSQCVNLTTRTQLPPAYTNSFTRGVYYPDKVFRSSVLHSTQDLFLPFFSNVTWFHAIHVSGTNGTKRFDNPVLPFNDGVYFASTEKSNIIRGWIFGTTLDSKTQSLLIVNNATNVVIKVCEFQFCNDPFLGVYHKNNKSWMESEFRVYSSANNCTFEYVSQPFLMDLEGKQGNFKNLREFVFKNIDGYFKIYSKHTPINLVRDLPQGFSALEPLVDLPIGINITRFQTLLALHRSYLTPGDSSSGWTAGAAAYYVGYLQPRTFLLKYNENGTITDAVDCALDPLSETKCTLKSFTVEKGIYQTSNFRVQPTESIVRFPNITNLCPFGEVFNATRFASVYAWNRKRISNCVADYSVLYNSASFSTFKCYGVSPTKLNDLCFTNVYADSFVIRGDEVIQIAPGQTGKIADYNYKLPDDFTGCVIAWNSNNLDSKVGGNYNYLYRLFRKSNLKPFERDISTEIYQAGSTPCNGVEGFNCYFPLQSYGFQPTNGVGYQPYRVVVLSFELLHAPATVCGPKKSTNLVKNKCVNFNFNGLTGTGVLTESNKKFLPFQQFGRDIADTTDAVRDPQTLEILDITPCSFGGVSVITPGTNTSNQVAVLYQDVNCTEVPVAIHADQLTPTWRVYSTGSNVFQTRAGCLIGAEHVNNSYECDIPIGAGICASYQTQTNSPRRARSVASQSIIAYTMSLGAENSVAYSNNSIAIPTNFTISVTTEILPVSMTKTSVDCTMYICGDSTECSNLLLQYGSFCTQLNRALTGIAVEQDKNTQEVFAQVKQIYKTPPIKDFGGFNFSQILPDPSKPSKRSFIEDLLFNKVTLADAGFIKQYGDCLGDIAARDLICAQKFNGLTVLPPLLTDEMIAQYTSALLAGTITSGWTFGAGAALQIPFAMQMAYRFNGIGVTQNVLYENQKLIANQFNSAIGKIQDSLSSTASALGKLQDVVNQNAQALNTLVKQLSSNFGAISSVLNDILSRLDPPEAEVQIDRLITGRLQSLQTYVTQQLIRAAEIRASANLAATKMSECVLGQSKRVDFCGKGYHLMSFPQSAPHGVVFLHVTYVFAQEKNFTTAPAICHDGKAHFPREGVFVSNGTHWFVTQRNFYEPQIITTDNTFVSGNCDVVIGIVNNTVYDPLQPELDSGGSGYIPEAPRDGQAYVRKDGEWVLLSTFL

SEQ ID NO: 9918 - protein, 1171 aa, Artificial Sequence
  SARS-CoV-2/pangolin/Guangxi/P4L/2017__EPI_ISL_410538 spike protein (1-1141)(K980P_V981P_P1063F) Foldon construct
MFVFLFVLPLVSSQCVNLTTRTGIPPGYTNSSTRGVYYPDKVFRSSILHLTQDLFLPFFSNVTWFNTINYQGGFKKFDNPVLPFNDGVYFASTEKSNIIRGWIFGTTLDARTQSLLIVNNATNVVIKVCEFQFCTDPFLGVYYHNNNKTWVENEFRVYSSANNCTFEYISQPFLMDLEGKQGNFKNLREFVFKNVDGYFKIYSKHTPIDLVRDLPRGFAALEPLVDLPIGINITRFQTLLALHRSYLTPGNLESGWTTGAAAYYVGYLQQRTFLLSYNQNGTITDAVDCSLDPLSETKCTLKSLTVEKGIYQTSNFRVQPTISIVRFPNITNLCPFGEVFNASKFASVYAWNRKRISNCVADYSVLYNSTSFSTFKCYGVSPTKLNDLCFTNVYADSFVVKGDEVRQIAPGQTGVIADYNYKLPDDFTGCVIAWNSVKQDALTGGNYGYLYRLFRKSKLKPFERDISTEIYQAGSTPCNGQVGLNCYYPLERYGFHPTTGVNYQPFRVVVLSFELLNGPATVCGPKLSTTLVKDKCVNFNFNGLTGTGVLTTSKKQFLPFQQFGRDISDTTDAVRDPQTLEILDITPCSFGGVSVITPGTNTSNQVAVLYQDVNCTEVPMAIHAEQLTPAWRVYSAGANVFQTRAGCLVGAEHVNNSYECDIPVGAGICASYHSMSSLRSVNQRSIIAYTMSLGAENSVAYSNNSIAIPTNFTISVTTEILPVSMTKTSVDCTMYICGDSIECSNLLLQYGSFCTQLNRALTGIAVEQDKNTQEVFAQVKQIYKTPPIKDFGGFNFSQILPDPSKPSKRSFIEDLLFNKVTLADAGFIKQYGDCLGDIAARDLICAQKFNGLTVLPPLLTDEMIAQYTSALLAGTITSGWTFGAGAALQIPFAMQMAYRFNGIGVTQNVLYENQKLIANQFNSAIGKIQDSLSSTASALGKLQDVVNQNAQALNTLVKQLSSNFGAISSVLNDILSRLDPPEAEVQIDRLITGRLQSLQTYVTQQLIRAAEIRASANLAATKMSECVLGQSKRVDFCGKGYHLMSFPQSAPHGVVFLHVTYVFAQEKNFTTAPAICHEGKAHFPREGVFVSNGTHWFITQRNFYEPQIITTDNTFVSGSCDVVIGIVNNTVYDPLQPELDSGGSGYIPEAPRDGQAYVRKDGEWVLLSTFL

SEQ ID NO: 9919 - protein, 1171 aa, Artificial Sequence
  SARS-CoV-2/pangolin/Guangxi/P5L/2017__EPI_ISL_410540 spike protein (1-1141)(K980P_V981P_P1063F) Foldon construct
MFVFLFVLPLVSSQCVNLTTRTGIPPGYTNSSTRGVYYPDKVFRSSILHLTQDLFLPFFSNVTWFNTINYQGGFKKFDNPVLPFNDGVYFASTEKSNIIRGWIFGTTLDARTQSLLIVNNATNVVIKVCEFQFCTDPFLGVYYHNNNKTWVENEFRVYSSANNCTFEYISQPFLMDLEGKQGNFKNLREFVFKNVDGYFKIYSKHTPIDLVRDLPRGFAALEPLVDLPIGINITRFQTLLALHRSYLTPGKLESGWTTGAAAYYVGYLQQRTFLLSYNQNGTITDAVDCSLDPLSETKCTLKSLTVEKGIYQTSNFRVQPTISIVRFPNITNLCPFGEVFNASKFASVYAWNRKRISNCVADYSVLYNSTSFSTFKCYGVSPTKLNDLCFTNVYADSFVVKGDEVRQIAPGQTGVIADYNYKLPDDFTGCVIAWNSVKQDALTGGNYGYLYRLFRKSKLKPFERDISTEIYQAGSTPCNGQVGLNCYYPLERYGFHPTTGVNYQPFRVVVLSFELLNGPATVCGPKLSTTLVKDKCVNFNFNGLTGTGVLTTSKKQFLPFQQFGRDISDTTDAVRDPQTLEILDITPCSFGGVSVITPGTNTSNQVAVLYQDVNCTEVPMAIHAEQLTPAWRVYSAGANVFQTRAGCLVGAEHVNNSYECDIPVGAGICASYHSMSSFRSVNQRSIIAYTMSLGAENSVAYSNNSIAIPTNFTISVTTEILPVSMTKTSVDCTMYICGDSIECSNLLLQYGSFCTQLNRALTGIAVEQDKNTQEVFAQVKQIYKTPPIKDFGGFNFSQILPDPSKPSKRSFIEDLLFNKVTLADAGFIKQYGDCLGDIAARDLICAQKFNGLTVLPPLLTDEMIAQYTSALLAGTITSGWTFGAGAALQIPFAMQMAYRFNGIGVTQNVLYENQKLIANQFNSAIGKIQDSLSSTASALGKLQDVVNQNAQALNTLVKQLSSNFGAISSVLNDILSRLDPPEAEVQIDRLITGRLQSLQTYVTQQLIRAAEIRASANLAATKMSECVLGQSKRVDFCGKGYHLMSFPQSAPHGVVFLHVTYVFAQEKNFTTAPAICHEGKAHFPREGVFVSNGTHWFITQRNFYEPQIITTDNTFVSGSCDVVIGIVNNTVYDPLQPELDSGGSGYIPEAPRDGQAYVRKDGEWVLLSTFL

SEQ ID NO: 9920 - protein, 1171 aa, Artificial Sequence
  SARS-CoV-2/pangolin/Guangxi/P5E/2017__EPI_ISL_410541 spike protein (1-1141)(K980P_V981P_P1063F) Foldon construct
MFVFLFVLPLVSSQCVNLTTRTGIPPGYTNSSTRGVYYPDKVFRSSILHLTQDLFLPFFSNVTWFNTITYQGGSKKFDNPVLPFNDGVYFASTEKSNIIRGWIFGTTLDARTQSLLIVNNATNVVIKVCEFQFCTDPFLGVYYHNNNKTWVENEFRVYSSANNCTFEYISQPFLMDLEGKQGNFKNLREFVFKNVDGYFKIYSKHTPIDLVRDLPRGFAALEPLVDLPIGINITRFQTLLALHRSYLTPGKLESGWTTGAAAYYVGYLQQRTFLLSYNQNGTITDAVDCSLDPLSETKCTLKSLTVEKGIYQTSNFRVQPTISIVRFPNITNLCPFGEVFNASKFASVYAWNRKRISNCVADYSVLYNSTSFSTFKCYGVSPTKLNDLCFTNVYADSFVVKGDEVRQIAPGQTGVIADYNYKLPDDFTGCVIAWNSVKQDALTGDNYGYLYRLFRKSKLKPFERDISTEIYQAGSTPCNGQVGLNCYYPLERYGFHPTTGVNYQPFRVVVLSFELLNGPATVCGPKLSTTLVKDKCVNFNFNGLTGTGVLTTSKKQFLPFQQFGRDISDTTDAVRDPQTLEILDITPCSFGGVSVITPGTNTSNQVAVLYQDVNCTEVPMAIHAEQLTPAWRVYSAGANVFQTRAGCLVGAEHVNNSYECDIPVGAGICASYHSMSSFRSVNQRSIIAYTMSLGAENSVAYSNNSIAIPTNFTISVTTEILPVSMTKTSVDCTMYICGDSIECSNLLLQYGSFCTQLNRALTGIAVEQDKNTQEVFAQVKQIYKTPPIKDFGGFNFSQILPDPSKPSKRSFIEDLLFNKVTLADAGFIKQYGDCLGDIAARDLICAQKFNGLTVLPPLLTDEMIAQYTSALLAGTITSGWTFGAGAALQIPFAMQMAYRFNGIGVTQNVLYENQKLIANQFNSAIGKIQDSLSSTASALGKLQDVVNQNAQALNTLVKQLSSNFGAISSVLNDILSRLDPPEAEVQIDRLITGRLQSLQTYVTQQLIRAAEIRASANLAATKMSECVLGQSKRVDFCGKGYHLMSFPQSAPHGVVFLHVTYVFAQEKNFTTAPAICHEGKAHFPREGVFVSNGTHWFITQRNFYEPQIITTDNTFVSGSCDVVIGIVNNTVYDPLQPELDSGGSGYIPEAPRDGQAYVRKDGEWVLLSTFL

SEQ ID NO: 9921 - protein, 1169 aa, Artificial Sequence
  SARS-CoV-2/pangolin/Guangxi/P1E/2017__EPI_ISL_410539 spike protein (1-1139)(K978P_V979P_P1061F) Foldon construct
MFVFLFVLPLVSSQCVNLTTRTGIQPGYTNSSTRGVYYPDKVFRSSILHLTQDLFLPFFSNVTWFNTINYQGGFKKFDNPVLPFNDGVYFASTEKSNIIRGWIFGTTLDARTQSLLIVNNATNVVIKVCEFQFCTDPFLGVYYHNNNKTWVENEFRVYSSANNCTFEYISQPFLMDLEGKQGNFKNLREFVFKNVDGYFKIYSKHTPIDLVRDLPRGFAALEPLVDLPIGINITRFQTLLALHRSYLTPGKLESGWTTGAAAYYVGYLQQRTFLLSYNQNGTITDAVDCSLDPLSETKCTLKSLTVEKGIYQTSNFRVQPTISIVRFPNITNLCPFGEVFNASKFASVYAWNRKRISNCVADYSVLYNSTSFSTFKCYGVSPTKLNDLCFTNVYADSFVVKGDEVRQIAPGQTGVIADYNYKLPDDFTGCVIAWNSVKQDALTGGNYLYRLFRKSKLKPFERDISTEIYQAGSTPCNGQVGLNCYYPLERYGFHPTTGVNYQPFRVVVLSFELLNGPATVCGPKLSTTLVKDKCVNFNFNGLTGTGVLTTSKKQFLPFQQFGRDISDTTDAVRDPQTLEILDITPCSFGGVSVITPGTNTSNQVAVLYQDVNCTEVPMAIHAEQLTPAWRVYSAGANVFQTRAGCLVGAEHVNNSYECDIPVGAGICASYHSMSSLRSVNQRSIIAYTMSLGAENSVAYSNNSIAIPTNFTISVTTEILPVSMTKTSVDCTMYICGDSIECSNLLLQYGSFCTQLNRALTGIAVEQDKNTQEVFAQVKQIYKTPPIKDFGGFNFSQILPDPSKPSKRSFIEDLLFNKVTLADAGFIKQYGDCLGDIAARDLICAQKFNGLTVLPPLLTDEMIAQYTSALLAGTITSGWTFGAGAALQIPFAMQMAYRFNGIGVTQNVLYENQKLIANQFNSAIGKIQDSLSSTASALGKLQDVVNQNAQALNTLVKQLSSNFGAISSVLNDILSRLDPPEAEVQIDRLITGRLQSLQTYVTQQLIRAAEIRASANLAATKMSECVLGQSKRVDFCGKGYHLMSFPQSAPHGVVFLHVTYVFAQEKNFTTAPAICHEGKAHFPREGVFVSNGTHWFITQRNFYEPQIITTDNTFVSGSCDVVIGIVNNTVYDPLQPELDSGGSGYIPEAPRDGQAYVRKDGEWVLLSTFL

SEQ ID NO: 9922 - protein, 1177 aa, Artificial Sequence
  SARS-CoV-2/Wuhan/WIV05/2019__EPI_ISL_402128 spike protein (1-1147)(K986P_V987P_ H1048Q_H1064N_ H1083N_H1101N) Foldon construct
MFVFLVLLPLVSSQCVNLTTRTQLPPAYTNSFTRGVYYPDKVFRSSVLHSTQDLFLPFFSNVTWFHAIHVSGTNGTKRFDNPVLPFNDGVYFASTEKSNIIRGWIFGTTLDSKTQSLLIVNNATNVVIKVCEFQFCNDPFLGVYYHKNNKSWMESEFRVYSSANNCTFEYVSQPFLMDLEGKQGNFKNLREFVFKNIDGYFKIYSKHTPINLVRDLPQGFSALEPLVDLPIGINITRFQTLLALHRSYLTPGDSSSGWTAGAAAYYVGYLQPRTFLLKYNENGTITDAVDCALDPLSETKCTLKSFTVEKGIYQTSNFRVQPTESIVRFPNITNLCPFGEVFNATRFASVYAWNRKRISNCVADYSVLYNSASFSTFKCYGVSPTKLNDLCFTNVYADSFVIRGDEVRQIAPGQTGKIADYNYKLPDDFTGCVIAWNSNNLDSKVGGNYNYLYRLFRKSNLKPFERDISTEIYQAGSTPCNGVEGFNCYFPLQSYGFQPTNGVGYQPYRVVVLSFELLHAPATVCGPKKSTNLVKNKCVNFNFNGLTGTGVLTESNKKFLPFQQFGRDIADTTDAVRDPQTLEILDITPCSFGGVSVITPGTNTSNQVAVLYQDVNCTEVPVAIHADQLTPTWRVYSTGSNVFQTRAGCLIGAEHVNNSYECDIPIGAGICASYQTQTNSPRRARSVASQSIIAYTMSLGAENSVAYSNNSIAIPTNFTISVTTEILPVSMTKTSVDCTMYICGDSTECSNLLLQYGSFCTQLNRALTGIAVEQDKNTQEVFAQVKQIYKTPPIKDFGGFNFSQILPDPSKPSKRSFIEDLLFNKVTLADAGFIKQYGDCLGDIAARDLICAQKFNGLTVLPPLLTDEMIAQYTSALLAGTITSGWTFGAGAALQIPFAMQMAYRFNGIGVTQNVLYENQKLIANQFNSAIGKIQDSLSSTASALGKLQDVVNQNAQALNTLVKQLSSNFGAISSVLNDILSRLDPPEAEVQIDRLITGRLQSLQTYVTQQLIRAAEIRASANLAATKMSECVLGQSKRVDFCGKGYQLMSFPQSAPHGVVFLNVTYVPAQEKNFTTAPAICNDGKAHFPREGVFVSNGTNWFVTQRNFYEPQIITTDNTFVSGNCDVVIGIVNNTVYDPLQPELDSGGSGYIPEAPRDGQAYVRKDGEWVLLSTFL

SEQ ID NO: 9923 - protein, 1173 aa, Artificial Sequence
  SARS-CoV-2/bat/Yunnan/RaTG13/2013__EPI_ISL_402131 spike protein (1-1143)(K982P_V983P_ H1044Q_H1060N_ H1079N_H1097N) Foldon construct
MFVFLVLLPLVSSQCVNLTTRTQLPPAYTNSSTRGVYYPDKVFRSSVLHLTQDLFLPFFSNVTWFHAIHVSGTNGIKRFDNPVLPFNDGVYFASTEKSNIIRGWIFGTTLDSKTQSLLIVNNATNVVIKVCEFQFCNDPFLGVYYHKNNKSWMESEFRVYSSANNCTFEYVSQPFLMDLEGKQGNFKNLREFVFKNIDGYFKIYSKHTPINLVRDLPPGFSALEPLVDLPIGINITRFQTLLALHRSYLTPGDSSSGWTAGAAAYYVGYLQPRTFLLKYNENGTITDAVDCALDPLSETKCTLKSFTVEKGIYQTSNFRVQPTDSIVRFPNITNLCPFGEVFNATTFASVYAWNRKRISNCVADYSVLYNSTSFSTFKCYGVSPTKLNDLCFTNVYADSFVITGDEVRQIAPGQTGKIADYNYKLPDDFTGCVIAWNSKHIDAKEGGNFNYLYRLFRKANLKPFERDISTEIYQAGSKPCNGQTGLNCYYPLYRYGFYPTDGVGHQPYRVVVLSFELLNAPATVCGPKKSTNLVKNKCVNFNFNGLTGTGVLTESNKKFLPFQQFGRDIADTTDAVRDPQTLEILDITPCSFGGVSVITPGTNASNQVAVLYQDVNCTEVPVAIHADQLTPTWRVYSTGSNVFQTRAGCLIGAEHVNNSYECDIPIGAGICASYQTQTNSRSVASQSIIAYTMSLGAENSVAYSNNSIAIPTNFTISVTTEILPVSMTKTSVDCTMYICGDSTECSNLLLQYGSFCTQLNRALTGIAVEQDKNTQEVFAQVKQIYKTPPIKDFGGFNFSQILPDPSKPSKRSFIEDLLFNKVTLADAGFIKQYGDCLGDIAARDLICAQKFNGLTVLPPLLTDEMIAQYTSALLAGTITSGWTFGAGAALQIPFAMQMAYRFNGIGVTQNVLYENQKLIANQFNSAIGKIQDSLSSTASALGKLQDVVNQNAQALNTLVKQLSSNFGAISSVLNDILSRLDPPEAEVQIDRLITGRLQSLQTYVTQQLIRAAEIRASANLAATKMSECVLGQSKRVDFCGKGYQLMSFPQSAPHGVVFLNVTYVPAQEKNFTTAPAICNDGKAHFPREGVFVSNGTNWFVTQRNFYEPQIITTDNTFVSGSCDVVIGIVNNTVYDPLQPELDSGGSGYIPEAPRDGQAYVRKDGEWVLLSTFL

SEQ ID NO: 9924 - protein, 1177 aa, Artificial Sequence
  SARS-CoV-2/Wuhan/HBCDC-HB-01/2019__EPI_ISL_402132 spike protein (1-1147)(K986P_V987P_ H1048Q_H1064N_ H1083N_H1101N) Foldon construct
MFVFLVLLPLVSSQCVNLTTRTQLPPAYTNSITRGVYYPDKVFRSSVLHSTQDLFLPFFSNVTWFHAIHVSGTNGTKRFDNPVLPFNDGVYFASTEKSNIIRGWIFGTTLDSKTQSLLIVNNATNVVIKVCEFQFCNDPFLGVYYHKNNKSWMESEFRVYSSANNCTFEYVSQPFLMDLEGKQGNFKNLREFVFKNIDGYFKIYSKHTPINLVRDLPQGFSALEPLVDLPIGINITRFQTLLALHRSYLTPGDSSSGWTAGAAAYYVGYLQPRTFLLKYNENGTITDAVDCALDPLSETKCTLKSFTVEKGIYQTSNFRVQPTESIVRFPNITNLCPFGEVFNATRFASVYAWNRKRISNCVADYSVLYNSASFSTFKCYGVSPTKLNDLCFTNVYADSFVIRGDEVRQIAPGQTGKIADYNYKLPDDFTGCVIAWNSNNLDSKVGGNYNYLYRLFRKSNLKPFERDISTEIYQAGSTPCNGVEGFNCYFPLQSYGFQPTNGVGYQPYRVVVLSFELLHAPATVCGPKKSTNLVKNKCVNFNFNGLTGTGVLTESNKKFLPFQQFGRDIADTTDAVRDPQTLEILDITPCSFGGVSVITPGTNTSNQVAVLYQDVNCTEVPVAIHADQLTPTWRVYSTGSNVFQTRAGCLIGAEHVNNSYECDIPIGAGICASYQTQTNSPRRARSVASQSIIAYTMSLGAENSVAYSNNSIAIPTNFTISVTTEILPVSMTKTSVDCTMYICGDSTECSNLLLQYGSFCTQLNRALTGIAVEQDKNTQEVFAQVKQIYKTPPIKDFGGFNFSQILPDPSKPSKRSFIEDLLFNKVTLADAGFIKQYGDCLGDIAARDLICAQKFNGLTVLPPLLTDEMIAQYTSALLAGTITSGWTFGAGAALQIPFAMQMAYRFNGIGVTQNVLYENQKLIANQFNSAIGKIQDSLSSTASALGKLQDVVNQNAQALNTLVKQLSSNFGAISSVLNDILSRLDPPEAEVQIDRLITGRLQSLQTYVTQQLIRAAEIRASANLAATKMSECVLGQSKRVDFCGKGYQLMSFPQSAPHGVVFLNVTYVPAQEKNFTTAPAICNDGKAHFPREGVFVSNGTNWFVTQRNFYEPQIITTDNTFVSGNCDVVIGIVNNTVYDPLQPELDSGGSGYIPEAPRDGQAYVRKDGEWVLLSTFL

SEQ ID NO: 9925 - protein, 1177 aa, Artificial Sequence
  SARS-CoV-2/Guangdong/20SF028/2020__EPI_ISL_403936 spike protein (1-1147)(K986P_V987P_ H1048Q_H1064N_ H1083N_H1101N) Foldon construct
MFVFLVLLPLVSSQCVNLTTRTQLPPAYTNSFTRGVYYPDKVFRSSVLYSTQDLFLPFFSNVTWFHAIHVSGTNGTKRFDNPVLPFNDGVYFASTEKSNIIRGWIFGTTLDSKTQSLLIVNNATNVVIKVCEFQFCNDPFLGVYYHKNNKSWMESEFRVYSSANNCTFEYVSQPFLMDLEGKQGNFKNLREFVFKNIDGYFKIYSKHTPINLVRDLPQGFSALEPLVDLPIGINITRFQTLLALHRSYLTPGDSSSGWTAGAAAYYVGYLQPRTFLLKYNENGTITDAVDCALDPLSETKCTLKSFTVEKGIYQTSNFRVQPTESIVRFPNITNLCPFGEVFNATRFASVYAWNRKRISNCVADYSVLYNSASFSTFKCYGVSPTKLNDLCFTNVYADSFVIRGDEVRQIAPGQTGKIADYNYKLPDDFTGCVIAWNSNNLDSKVGGNYNYLYRLFRKSNLKPFERDISTEIYQAGSTPCNGVEGFNCYFPLQSYGFQPTNGVGYQPYRVVVLSFELLHAPATVCGPKKSTNLVKNKCVNFNFNGLTGTGVLTESNKKFLPFQQFGRDIADTTDAVRDPQTLEILDITPCSFGGVSVITPGTNTSNQVAVLYQDVNCTEVPVAIHADQLTPTWRVYSTGSNVFQTRAGCLIGAEHVNNSYECDIPIGAGICASYQTQTNSPRRARSVASQSIIAYTMSLGAENSVAYSNNSIAIPTNFTISVTTEILPVSMTKTSVDCTMYICGDSTECSNLLLQYGSFCTQLNRALTGIAVEQDKNTQEVFAQVKQIYKTPPIKDFGGFNFSQILPDPSKPSKRSFIEDLLFNKVTLADAGFIKQYGDCLGDIAARDLICAQKFNGLTVLPPLLTDEMIAQYTSALLAGTITSGWTFGAGAALQIPFAMQMAYRFNGIGVTQNVLYENQKLIANQFNSAIGKIQDSLSSTASALGKLQDVVNQNAQALNTLVKQLSSNFGAISSVLNDILSRLDPPEAEVQIDRLITGRLQSLQTYVTQQLIRAAEIRASANLAATKMSECVLGQSKRVDFCGKGYQLMSFPQSAPHGVVFLNVTYVPAQEKNFTTAPAICNDGKAHFPREGVFVSNGTNWFVTQRNFYEPQIITTDNTFVSGNCDVVIGIVNNTVYDPLQPELDSGGSGYIPEAPRDGQAYVRKDGEWVLLSTFL

SEQ ID NO: 9926 - protein, 1177 aa, Artificial Sequence
  SARS-CoV-2/Shenzhen/SZTH-001/2020__EPI_ISL_406592 spike protein (1-1147)(K986P_V987P_ H1048Q_H1064N_ H1083N_H1101N) Foldon construct
MFVFLVLLPLVSSQCVNLTTRTQLPPAYTNSFTRGVYYPDKVFRSSVLHSTQDLFLPFFSNVTWFHAIHVSGTNGTKRFDNPVLPFNDGVYFASTEKSNIIRGWIFGTTLDSKTQSLLIVNNATNVVIKVCEFQFCNDPFLGVYYHKNNKSWMESEFRVYSSANNCTFEYVSQPFLMDLEGKQGNFKNLREFVFKNIDGYFKIYSKHTPINLVRDLPQGFSALEPLVDLPIGINITRFQTLLALHRSYLTPGDSSSGWTAGAAAYYVGYLQPRTFLLKYNENGTITDAVDCALDPLSETKCTLKSFTVEKGIYQTSNFRVQPTESIVRFPNITNLCPFGEVFNATRFASVYAWNRKRISNCVADYSVLYNSASFSTFKCYGVSPTKLNDLCFTNVYADSFVIRGDEVRQIAPGQTGKIADYNYKLPDDFTGCVIAWNSNNLDSKVGGNYNYLYRLFRKSNLKPFERDISTEIYQAGSTPCNGVEGFNCYFPLQSYGFQPTNGVGYQPYRVVVLSFELLHAPATVCGPKKSTNLVKNKCVNFNFNGLTGTGVLTESNKKFLPFQQFGRDIADTTDAVRDPQTLEILDITPCSFGGVSVITPGTNTSNQVAVLYQDVNCTEVPVAIHADQLTPTWRVYSTGSNVFQTRAGCLIGAEHVNNSYECDIPIGAGICASYQTQTNSPRRARSVASQSIIAYTMSLGAENSVAYSNNSIAIPTNFTISVTTEILPVSMTKTSVDCTMYICGDSTECSNLLLQYGSFCTQLNRALTGIAVEQDKNTQEVFAQVKQIYKTPPIKDFGGFNFSQILPDPSKPSKRSFIEDLLFNKVTLADAGFIKQYGDCLGDIAARDLICAQKFNGLTVLPPLLTDEMIAQYTSALLAGTITSGWTFGAGAALQIPFAMQMAYRFNGIGVTQNVLYENQKLIANQFNSAIGKIQDSLSSTASALGKLQDVVNQNAQALNTLVKQLSSNFGAISSVLNDILSRLDPPEAEVQIDRLITGRLQSLQTYVTQQLIRAAEIRASANLAATKMSECVLGQSKRVDFCGKGYQLMSFPQSAPHGVVFLNVTYVPAQEKNFTTAPAICNDGKAHFPREGVFVSNGTNWFVTQRNFYEPQIITTDNTFVSGNCDVLIGIVNNTVYDPLQPELDSGGSGYIPEAPRDGQAYVRKDGEWVLLSTFL

SEQ ID NO: 9927 - protein, 1177 aa, Artificial Sequence
  SARS-CoV-2/Shenzhen/SZTH-004/2020__EPI_ISL_406595 spike protein (1-1147)(K986P_V987P_ H1048Q_H1064N_ H1083N_H1101N) Foldon construct
MFVFLVLLPLVSSQCVNLTTRTQLPPAYTNSFTRGVYYPDKVFRSSVLHSTQDLFLPFFSNVTWFHAIHVSGTNGTKRFDNPVLPFNDGVYFASTEKSNIIRGWIFGTTLDSKTQSLLIVNNATNVVIKVCEFQFCNDPFLGVYYHKNNKSWMESEFRVYSSANNCTFEYVSQPFLMDLEGKQGNFKNLREFVFKNIDGYFKIYSKHTPINLVRDLPQGFSALEPLVDLPIGINITRFQTLLALHRSYLTPGDSSSGWTAGAAAYYVGYLQPRTFLLKYNENGTITDAVDCALDPLSETKCTLKSFTVEKGIYQTSNFRVQPTESIVRFPNITNLCPFGEVFNATRFASVYAWDRKRISNCVAYYSVLYNSASFSTFKCYGVSPTKLNDLCFTNVYADSFVIRGDEVRQIAPGQTGKIADYNYKLPDDFTGCVIAWNSNNLDSKVGGNYNYLYRLFRKSNLKPFERDISTEIYQAGSTPCNGVEGFNCYFPLQSYGFQPTNGVGYQPYRVVVLSFELLHAPATVCGPKKSTNLVKNKCVNFNFNGLTGTGVLTESNKKFLPFQQFGRDIADTTDAVRDPQTLEILDITPCSFGGVSVITPGTNTSNQVAVLYQDVNCTEVPVAIHADQLTPTWRVYSTGSNVFQTRAGCLIGAEHVNNSYECDIPIGAGICASYQTQTNSPRRARSVASQSIIAYTMSLGAENSVAYSNNSIAIPTNFTISVTTEILPVSMTKTSVDCTMYICGDSTECSNLLLQYGSFCTQLNRALTGIAVEQDKNTQEVFAQVKQIYKTPPIKDFGGFNFSQILPDPSKPSKRSFIEDLLFNKVTLADAGFIKQYGDCLGDIAARDLICAQKFNGLTVLPPLLTDEMIAQYTSALLAGTITSGWTFGAGAALQIPFAMQMAYRFNGIGVTQNVLYENQKLIANQFNSAIGKIQDSLSSTASALGKLQDVVNQNAQALNTLVKQLSSNFGAISSVLNDILSRLDPPEAEVQIDRLITGRLQSLQTYVTQQLIRAAEIRASANLAATKMSECVLGQSKRVDFCGKGYQLMSFPQSAPHGVVFLNVTYVPAQEKNFTTAPAICNDGKAHFPREGVFVSNGTNWFVTQRNFYEPQIITTDNTFVSGNCDVVIGIVNNTVYDPLQPELDSGGSGYIPEAPRDGQAYVRKDGEWVLLSTFL

SEQ ID NO: 9928 - protein, 1177 aa, Artificial Sequence
  SARS-CoV-2/France/IDF0372/2020__EPI_ISL_406596 spike protein (1-1147)(K986P_V987P_ H1048Q_H1064N_ H1083N_H1101N) Foldon construct
MFVFLVLLPLVSSQCVNLTTRTQLPPAYTNSFTRGVYYPDKVFRSSVLHSTQDLFLPFFSNVTWFHAIHVSGTNGTKRFDNPVLPFNDGVYFASTEKSNIIRGWIFGTTLDSKTQSLLIVNNATNVVIKVCEFQFCNDPFLGVYYHKNNKSWMESEFRVYSSANNCTFEYVSQPFLMDLEGKQGNFKNLREFVFKNIDGYFKIYSKHTPINLVRDLPQGFSALEPLVDLPIGINITRFQTLLALHRSYLTPGDSSSGWTAGAAAYYVGYLQPRTFLLKYNENGTITDAVDCALDPLSETKCTLKSFTVEKGIYQTSNFRVQPTESIVRFPNITNLCPFGEVFNATRFASVYAWNRKRISNCVADYSFLYNSASFSTFKCYGVSPTKLNDLCFTNVYADSFVIRGDEVRQIAPGQTGKIADYNYKLPDDFTGCVIAWNSNNLDSKVGGNYNYLYRLFRKSNLKPFERDISTEIYQAGSTPCNGVEGFNCYFPLQSYGFQPTNGVGYQPYRVVVLSFELLHAPATVCGPKKSTNLVKNKCVNFNFNGLTGTGVLTESNKKFLPFQQFGRDIADTTDAVRDPQTLEILDITPCSFGGVSVITPGTNTSNQVAVLYQDVNCTEVPVAIHADQLTPTWRVYSTGSNVFQTRAGCLIGAEHVNNSYECDIPIGAGICASYQTQTNSPRRARSVASQSIIAYTMSLGAENSVAYSNNSIAIPTNFTISVTTEILPVSMTKTSVDCTMYICGDSTECSNLLLQYGSFCTQLNRALTGIAVEQDKNTQEVFAQVKQIYKTPPIKDFGGFNFSQILPDPSKPSKRSFIEDLLFNKVTLADAGFIKQYGDCLGDIAARDLICAQKFNGLTVLPPLLTDEMIAQYTSALLAGTITSGWTFGAGAALQIPFAMQMAYRFNGIGVTQNVLYENQKLIANQFNSAIGKIQDSLSSTASALGKLQDVVNQNAQALNTLVKQLSSNFGAISSVLNDILSRLDPPEAEVQIDRLITGRLQSLQTYVTQQLIRAAEIRASANLAATKMSECVLGQSKRVDFCGKGYQLMSFPQSAPHGVVFLNVTYVPAQEKNFTTAPAICNDGKAHFPREGVFVSNGTNWFVTQRNFYEPQIITTDNTFVSGNCDVVIGIVNNTVYDPLQPELDSGGSGYIPEAPRDGQAYVRKDGEWVLLSTFL

SEQ ID NO: 9929 - protein, 1177 aa, Artificial Sequence
  SARS-CoV-2/Australia/VIC01/2020__EPI_ISL_406844 spike protein (1-1147)(K986P_V987P_ H1048Q_H1064N_ H1083N_H1101N) Foldon construct
MFVFLVLLPLVSSQCVNLTTRTQLPPAYTNSFTRGVYYPDKVFRSSVLHSTQDLFLPFFSNVTWFHAIHVSGTNGTKRFDNPVLPFNDGVYFASTEKSNIIRGWIFGTTLDSKTQSLLIVNNATNVVIKVCEFQFCNDPFLGVYYHKNNKSWMESEFRVYSSANNCTFEYVSQPFLMDLEGKQGNFKNLREFVFKNIDGYFKIYSKHTPINLVRDLPQGFSALEPLVDLPIGINITRFQTLLALHRRYLTPGDSSSGWTAGAAAYYVGYLQPRTFLLKYNENGTITDAVDCALDPLSETKCTLKSFTVEKGIYQTSNFRVQPTESIVRFPNITNLCPFGEVFNATRFASVYAWNRKRISNCVADYSVLYNSASFSTFKCYGVSPTKLNDLCFTNVYADSFVIRGDEVRQIAPGQTGKIADYNYKLPDDFTGCVIAWNSNNLDSKVGGNYNYLYRLFRKSNLKPFERDISTEIYQAGSTPCNGVEGFNCYFPLQSYGFQPTNGVGYQPYRVVVLSFELLHAPATVCGPKKSTNLVKNKCVNFNFNGLTGTGVLTESNKKFLPFQQFGRDIADTTDAVRDPQTLEILDITPCSFGGVSVITPGTNTSNQVAVLYQDVNCTEVPVAIHADQLTPTWRVYSTGSNVFQTRAGCLIGAEHVNNSYECDIPIGAGICASYQTQTNSPRRARSVASQSIIAYTMSLGAENSVAYSNNSIAIPTNFTISVTTEILPVSMTKTSVDCTMYICGDSTECSNLLLQYGSFCTQLNRALTGIAVEQDKNTQEVFAQVKQIYKTPPIKDFGGFNFSQILPDPSKPSKRSFIEDLLFNKVTLADAGFIKQYGDCLGDIAARDLICAQKFNGLTVLPPLLTDEMIAQYTSALLAGTITSGWTFGAGAALQIPFAMQMAYRFNGIGVTQNVLYENQKLIANQFNSAIGKIQDSLSSTASALGKLQDVVNQNAQALNTLVKQLSSNFGAISSVLNDILSRLDPPEAEVQIDRLITGRLQSLQTYVTQQLIRAAEIRASANLAATKMSECVLGQSKRVDFCGKGYQLMSFPQSAPHGVVFLNVTYVPAQEKNFTTAPAICNDGKAHFPREGVFVSNGTNWFVTQRNFYEPQIITTDNTFVSGNCDVVIGIVNNTVYDPLQPELDSGGSGYIPEAPRDGQAYVRKDGEWVLLSTFL

SEQ ID NO: 9930 - protein, 1177 aa, Artificial Sequence
  SARS-CoV-2/Germany/BavPat1/2020__EPI_ISL_406862 spike protein (1-1147)(K986P_V987P_ H1048Q_H1064N_ H1083N_H1101N) Foldon construct
MFVFLVLLPLVSSQCVNLTTRTQLPPAYTNSFTRGVYYPDKVFRSSVLHSTQDLFLPFFSNVTWFHAIHVSGTNGTKRFDNPVLPFNDGVYFASTEKSNIIRGWIFGTTLDSKTQSLLIVNNATNVVIKVCEFQFCNDPFLGVYYHKNNKSWMESEFRVYSSANNCTFEYVSQPFLMDLEGKQGNFKNLREFVFKNIDGYFKIYSKHTPINLVRDLPQGFSALEPLVDLPIGINITRFQTLLALHRSYLTPGDSSSGWTAGAAAYYVGYLQPRTFLLKYNENGTITDAVDCALDPLSETKCTLKSFTVEKGIYQTSNFRVQPTESIVRFPNITNLCPFGEVFNATRFASVYAWNRKRISNCVADYSVLYNSASFSTFKCYGVSPTKLNDLCFTNVYADSFVIRGDEVRQIAPGQTGKIADYNYKLPDDFTGCVIAWNSNNLDSKVGGNYNYLYRLFRKSNLKPFERDISTEIYQAGSTPCNGVEGFNCYFPLQSYGFQPTNGVGYQPYRVVVLSFELLHAPATVCGPKKSTNLVKNKCVNFNFNGLTGTGVLTESNKKFLPFQQFGRDIADTTDAVRDPQTLEILDITPCSFGGVSVITPGTNTSNQVAVLYQGVNCTEVPVAIHADQLTPTWRVYSTGSNVFQTRAGCLIGAEHVNNSYECDIPIGAGICASYQTQTNSPRRARSVASQSIIAYTMSLGAENSVAYSNNSIAIPTNFTISVTTEILPVSMTKTSVDCTMYICGDSTECSNLLLQYGSFCTQLNRALTGIAVEQDKNTQEVFAQVKQIYKTPPIKDFGGFNFSQILPDPSKPSKRSFIEDLLFNKVTLADAGFIKQYGDCLGDIAARDLICAQKFNGLTVLPPLLTDEMIAQYTSALLAGTITSGWTFGAGAALQIPFAMQMAYRFNGIGVTQNVLYENQKLIANQFNSAIGKIQDSLSSTASALGKLQDVVNQNAQALNTLVKQLSSNFGAISSVLNDILSRLDPPEAEVQIDRLITGRLQSLQTYVTQQLIRAAEIRASANLAATKMSECVLGQSKRVDFCGKGYQLMSFPQSAPHGVVFLNVTYVPAQEKNFTTAPAICNDGKAHFPREGVFVSNGTNWFVTQRNFYEPQIITTDNTFVSGNCDVVIGIVNNTVYDPLQPELDSGGSGYIPEAPRDGQAYVRKDGEWVLLSTFL

SEQ ID NO: 9931 - protein, 1177 aa, Artificial Sequence
  SARS-CoV-2/Wuhan/HBCDC-HB-02/2020__EPI_ISL_412978 spike protein (1-1147)(K986P_V987P_ H1048Q_H1064N_ H1083N_H1101N) Foldon construct
MFVFLVLLPLVSSQCVNLTTRTQLPPAYTNSFTRGVYYPDKVFRSSVLHSTQDLFLPFFSNVTWFHAIHVSGTNGTKRFDNPVLPFNDGVYFASTEKSNIIRGWIFGTTLDSKTQSLLIVNNATNVVIKVCEFQFCNDPFLGVYYHKNNKSWMESEFRVYSSANNCTFEYVSQPFLMDLEGKQGNFKNLREFVFKNIDGYFKIYSKHTPINLVRDLPQGFSALEPLVDLPIGINITRFQTLLALHRSYLTPGDSSSGWTAGAAAYYVGYLQPRTFLLKYNENGTITDAVDCALDPLSETKCTLKSFTVEKGIYQTSNFRVQPTESIVRFPNITNLCPFGEVFNATRFASVYAWNRKRISNCVADYSVLYNSASFSTFKCYGVSPTKLNDLCFTNVYADSFVIRGDEVRQIAPGQTGKIADYNYKLPDDFTGCVIAWNSNNLDSKVGGNYNYLYRLFRKSNLKPFERDISTEIYQAGSTPCNGVEGFNCYFPLQSYGFQPTNGVGYQPYRVVVLSFELLHAPATVCGPKKSTNLVKNKCVNFNFNGLTGTGVLTESNKKFLPFQQFGRDIADTTDAVRDPQTLEILDITPCSFGGVSVITPGTNTSNQVAVLYQDVNCTEVPVAIHADQLTPTWRVYSTGSNVFQTRAGCLIGAEHVNNSYECDIPIGAGICASYQTQTNSPRRARSVASQSIIAYTMSLGAENSVAYSNNSIAIPTNFTISVTTEILPVSMTKTSVDCTMYICGDSTECSNFLLQYGSFCTQLNRALTGIAVEQDKNTQEVFAQVKQIYKTPPIKDFGGFNFSQILPDPSKPSKRSFIEDLLFNKVTLADAGFIKQYGDCLGDIAARDLICAQKFNGLTVLPPLLTDEMIAQYTSALLAGTITSGWTFGAGAALQIPFAMQMAYRFNGIGVTQNVLYENQKLIANQFNSAIGKIQDSLSSTASALGKLQDVVNQNAQALNTLVKQLSSNFGAISSVLNDILSRLDPPEAEVQIDRLITGRLQSLQTYVTQQLIRAAEIRASANLAATKMSECVLGQSKRVDFCGKGYQLMSFPQSAPHGVVFLNVTYVPAQEKNFTTAPAICNDGKAHFPREGVFVSNGTNWFVTQRNFYEPQIITTDNTFVSGNCDVVIGIVNNTVYDPLQPELDSGGSGYIPEAPRDGQAYVRKDGEWVLLSTFL

SEQ ID NO: 9932 - protein, 1177 aa, Artificial Sequence
  SARS-CoV-2/Australia/QLD02/2020__EPI_ISL_407896 spike protein (1-1147)(K986P_V987P_ H1048Q_H1064N_ H1083N_H1101N) Foldon construct
MFVFLVLLPLVSSQCVNLTTRTQLPPAYTNSFTRGVYYPDKVFRSSVLHSTQDLFLPFFSNVTWFHAIHVSGTNGTKRFDNPVLPFNDGVYFASTEKSNIIRGWIFGTTLDSKTQSLLIVNNATNVVIKVCEFQFCNDPFLGVYYHKNNKSWMESEFRVYSSANNCTFEYVSQPFLMDLEGKQGNFKNLREFVFKNIDGYFKIYSKHTPINLVRDLPQGFSALEPLVDLPIGINITRFQTLLALHRSYLTPGDSSSGWTAGAAAYYVGYLQPRTFLLKYNENGTITDAVDCALDPLSETKCTLKSFTVEKGIYQTSNFRVQPTESIVRFPNITNLCPFGEVFNATRFASVYAWNRKRISNCVADYSVLYNSASFSTFKCYGVSPTKLNDLCFTNVYADSFVIRGDEVRQIAPGQTGKIADYNYKLPDDFTGCVIAWNSNNLDSKVGGNYNYLYRLFRKSNLKPFERDISTEIYQAGSTPCNGVEGFNCYFPLQSYGFQPTNGVGYQPYRVVVLSFELLHAPATVCGPKKSTNLVKNKCVNFNFNGLTGTGVLTESNKKFLPFQQFGRDIADTTDAVRDPQTLEILDITPCSFGGVSVITPGTNTSNQVAVLYQDVNCTEVPVAIHADQLTPTWRVYSTGSNVFQTRAGCLIGAEHVNNSYECDIPIGAGICASYQTQTNSPRRARSVASQSIIAYTMSLGAENSVAYSNNSIAIPTNFTISVTTEILPVSMTKTSVDCTMYICGDSTECSNLLLQYGSFCTQLNRALTGIAVEQDKNTQEVFAQVKQIYKTPPIKDFGGFNFSQILPDPSKPSKRSFIEDLLFNKVTLADAGFIKQYGDCLGDIAARDLICAQKFNGLTVLPPLLTDEMIAQYTSALLAGTITSGWTFGAGAALQIPFAMQMAYRFNGIGVTQNVLYENQKLIANQFNSAIGKIQDSLSSTASALGKLQDVVNQNAQALNTLVKQLSSNFGAISSVLNDILSRLDPPEAEVQIDRLITGRLQSLQTYVTQQLIRAAEIRASANLAATKMSECVLGQSKRVDFCGKGYQLMSFPQSAPHGVVFLNVTYVPAQEKNFTTAPAICNDGKAHFPREGVFVSNGTNWFVTQRNFYEPQIITTDNTFVSGNCDVVIGIVNNTVYDPLQLELDSGGSGYIPEAPRDGQAYVRKDGEWVLLSTFL

SEQ ID NO: 9933 - protein, 1177 aa, Artificial Sequence
  SARS-CoV-2/India/1-31/2020__EPI_ISL_413523 spike protein (1-1147)(K986P_V987P_ H1048Q_H1064N_ H1083N_H1101N) Foldon construct
MFVFLVLLPLVSSQCVNLTTRTQLPPAYTNSFTRGVYYPDKVFRSSVLHSTQDLFLPFFSNVTWFHAIHVSGTNGTKRFDNPVLPFNDGVYFASTEKSNIIRGWIFGTTLDSKTQSLLIVNNATNVVIKVCEFQFCNDPFLGVYYHKNNKSWMESEFRVYSSANNCTFEYVSQPFLMDLEGKQGNFKNLREFVFKNIDGYFKIYSKHTPINLVRDLPQGFSALEPLVDLPIGINITRFQTLLALHRSYLTPGDSSSGWTAGAAAYYVGYLQPRTFLLKYNENGTITDAVDCALDPLSETKCTLKSFTVEKGIYQTSNFRVQPTESIVRFPNITNLCPFGEVFNATRFASVYAWNRKRISNCVADYSVLYNSASFSTFKCYGVSPTKLNDLCFTNVYADSFVIRGDEVRQIAPGQTGKIADYNYKLPDDFTGCVIAWNSNNLDSKVGGNYNYLYRLFRKSNLKPFERDISTEIYQAGSTPCNGVEGFNCYFPLQSYGFQPTNGVGYQPYRVVVLSFELLHAPATVCGPKKSTNLVKNKCVNFNFNGLTGTGVLTESNKKFLPFQQFGRDIADTTDAVRDPQTLEILDITPCSFGGVSVITPGTNTSNQVAVLYQDVNCTEVPVAIHADQLTPTWRVYSTGSNVFQTRAGCLIGAEHVNNSYECDIPIGAGICASYQTQTNSPRRARSVASQSIIAYTMSLGAENSVAYSNNSIAIPTNFTISVTTEILPVSMTKTSVDCTMYICGDSTECSNLLLQYGSFCTQLNRALTGIAVEQDKNTQEVFAQVKQIYKTPPIKDFGGFNFSQILPDPSKPSKRSFIEDLLFNKVTLADAGFIKQYGDCLGDIAARDLICAQKFNGLTVLPPLLTDEMIAQYTSALLAGTITSGWTFGAGAALQIPFAMQMAYRFNGIGVTQNVLYENQKLIANQFNSVIGKIQDSLSSTASALGKLQDVVNQNAQALNTLVKQLSSNFGAISSVLNDILSRLDPPEAEVQIDRLITGRLQSLQTYVTQQLIRAAEIRASANLAATKMSECVLGQSKRVDFCGKGYQLMSFPQSAPHGVVFLNVTYVPAQEKNFTTAPAICNDGKAHFPREGVFVSNGTNWFVTQRNFYEPQIITTDNTFVSGNCDVVIGIVNNTVYDPLQPELDSGGSGYIPEAPRDGQAYVRKDGEWVLLSTFL

SEQ ID NO: 9934 - protein, 1177 aa, Artificial Sequence
  SARS-CoV-2/Guangdong/GD2020087-P0008/2020__EPI_ISL_413863 spike protein (1-1147)(K986P_V987P_ H1048Q_H1064N_ H1083N_H1101N) Foldon construct
MFVFLVLLPLVSSQCVNLTTRTQLPPAYTNSFTRGVYYPDKVFRSSVLHSTQDLFLPFFSNVTWFHAIHVSGTNGTKRFDNPVLPFNDGVYFASTEKSNIIRGWIFGTTLDSKTQSLLIVNNATNVVIKVCEFQFCNDPFLGVYYHKNNKSWMESEFRVYSSANNCTFEYVSQPFLMDLEGKQGNFKNLREFVFKNIDGYFKIYSKHTPINLVRDLPQGFSALEPLVDLPIGINITRFQTLLALHRSYLTPGDSSSGWTAGAAAYYVGYLQPRTFLLKYNENGTITDAVDCALDPLSETKCTLKSFTVEKGIYQTSNFRVQPTESIVRFPNITNLCPFGEVFNATRFASVYAWNRKRISNCVADYSVLYNSASFSTFKCYGVSPTKLNDLCFTNVYADSFVIRGDEVREIAPGQTGKIADYNYKLPDDFTGCVIAWNSNNLDSKVGGNYNYLYRLFRKSNLKPFERDISTEIYQAGSTPCNGVEGFNCYFPLQSYGFQPTNGVGYQPYRVVVLSFELLHAPATVCGPKKSTNLVKNKCVNFNFNGLTGTGVLTESNKKFLPFQQFGRDIADTTDAVRDPQTLEILDITPCSFGGVSVITPGTNTSNQVAVLYQDVNCTEVPVAIHADQLTPTWRVYSTGSNVFQTRAGCLIGAEHVNNSYECDIPIGAGICASYQTQTNSPRRARSVASQSIIAYTMSLGAENSVAYSNNSIAIPTNFTISVTTEILPVSMTKTSVDCTMYICGDSTECSNLLLQYGSFCTQLNRALTGIAVEQDKNTQEVFAQVKQIYKTPPIKDFGGFNFSQILPDPSKPSKRSFIEDLLFNKVTLADAGFIKQYGDCLGDIAARDLICAQKFNGLTVLPPLLTDEMIAQYTSALLAGTITSGWTFGAGAALQIPFAMQMAYRFNGIGVTQNVLYENQKLIANQFNSAIGKIQDSLSSTASALGKLQDVVNQNAQALNTLVKQLSSNFGAISSVLNDILSRLDPPEAEVQIDRLITGRLQSLQTYVTQQLIRAAEIRASANLAATKMSECVLGQSKRVDFCGKGYQLMSFPQSAPHGVVFLNVTYVPAQEKNFTTAPAICNDGKAHFPREGVFVSNGTNWFVTQRNFYEPQIITTDNTFVSGNCDVVIGIVNNTVYDPLQPELDSGGSGYIPEAPRDGQAYVRKDGEWVLLSTFL

SEQ ID NO: 9935 - protein, 1177 aa, Artificial Sequence
  SARS-CoV-2/Sweden/01/2020__EPI_ISL_411951 spike protein (1-1147)(K986P_V987P_ H1048Q_H1064N_ H1083N_H1101N) Foldon construct
MFVFLVLLPLVSSQCVNLTTRTQLPPAYTNSFTRGVYYPDKVFRSSVLHSTQDLFLPFFSNVTWFHAIHVSGTNGTKRFDNPVLPFNDGVYFASTEKSNIIRGWIFGTTLDSKTQSLLIVNNATNVVIKVCEFQFCNDPFLGVYYHKNNKSWMESEFRVYSSANNCTFEYVSQPFLMDLEGKQGNFKNLREFVFKNIDGYFKIYSKHTPINLVRDLPQGFSALEPLVDLPIGINITRFQTLLALHRSYLTPGDSSSGWTAGAAAYYVGYLQPRTFLLKYNENGTITDAVDCALDPLSETKCTLKSFTVEKGIYQTSNFRVQPTESIVRFPNITNLCPFGEVFNATRFASVYAWNRKRISNCVADYSVLYNSASFSTFKCYGVSPTKLNDLCFTNVYADSFVIRGDEVRQIAPGQTGKIADYNYKLPDDFTGCVIAWNSNNLDSKVGGNYNYLYRLFRKSNLKPFERDISTEIYQAGSTPCNGVEGFNCYFPLQSYGFQPTNGVGYQPYRVVVLSFELLHAPATVCGPKKSTNLVKNKCVNFNFNGLTGTGVLTESNKKFLPFQQFGRDIADTTDAVRDPQTLEILDITPCSFGGVSVITPGTNTSNQVAVLYQDVNCTEVPVAIHADQLTPTWRVYSTGSNVFQTRAGCLIGAEHVNNSYECDIPIGAGICASYQTQTNSPRRARSVASQSIIAYTMSLGAENSVAYSNNSIAIPTNFTISVTTEILPVSMTKTSVDCTMYICGDSTECSNLLLQYGSFCTQLNRALTGIAVEQDKNTQEVFAQVKQIYKTPPIKDCGGFNFSQILPDPSKPSKRSFIEDLLFNKVTLADAGFIKQYGDCLGDIAARDLICAQKFNGLTVLPPLLTDEMIAQYTSALLAGTITSGWTFGAGAALQIPFAMQMAYRFNGIGVTQNVLYENQKLIANQFNSAIGKIQDSLSSTASALGKLQDVVNQNAQALNTLVKQLSSNFGAISSVLNDILSRLDPPEAEVQIDRLITGRLQSLQTYVTQQLIRAAEIRASANLAATKMSECVLGQSKRVDFCGKGYQLMSFPQSAPHGVVFLNVTYVPAQEKNFTTAPAICNDGKAHFPREGVFVSNGTNWFVTQRNFYEPQIITTDNTFVSGNCDVVIGIVNNTVYDPLQPELDSGGSGYIPEAPRDGQAYVRKDGEWVLLSTFL

SEQ ID NO: 9936 - protein, 1177 aa, Artificial Sequence
  SARS-CoV-2/Tianmen/HBCDC-HB-07/2020__EPI_ISL_412983 spike protein (1-1147)(K986P_V987P_ H1048Q_H1064N_ H1083N_H1101N) Foldon construct
MFVFLVLLPLVSSQCVNLTTRTQLPPAYTNSFTRGVYYPDKVFRSSVLHSTQDLFLPFFSNVTWFHAIHVSGTNGTKRFDNPVLPFNDGVYFASTEKSNIIRGWIFGTTLDSKTQSLLIVNNATNVVIKVCEFQFCNDPFLGVYYHKNNKSWMESEFRVYSSANNCTFEYVSQPFLMDLEGKQGNFKNLREFVFKNIDGYFKIYSKHTPINLVRDLPQGFSALEPLVDLPIGINITRFQTLLALHRSYLTPGDSSSGWTAGAAAYYVGYLQPRTFLLKYNENGTITDAVDCALDPLSETKCTLKSFTVEKGIYQTSNFRVQPTESIVRFPNITNLCPFGEVFNATRFASVYAWNRKRISNCVADYSVLYNSASFSTFKCYGVSPTKLNDLCFTNVYADSFVIRGDEVRQIAPGQTGKIADYNYKLPDDFTGCVIAWNSNNLDSKVGGNYNYLYRLFRKSNLKPFERDISTEIYQAGSTPCNGVEGFNCYFPLQSYGFQPTNGVGYQPYRVVVLSFELLHAPATVCGPKKSTNLVKNKCVNFNFNGLTGTGVLTESNKKFLPFQQFGRDIADTTDAVRDPQTLEILDITPCSFGGVSVITPGTNTSNQVAVLYQDLNCTEVPVAIHADQLTPTWRVYSTGSNVFQTRAGCLIGAEHVNNSYECDIPIGAGICASYQTQTNSPRRARSVASQSIIAYTMSLGAENSVAYSNNSIAIPTNFTISVTTEILPVSMTKTSVDCTMYICGDSTECSNLLLQYGSFCTQLNRALTGIAVEQDKNTQEVFAQVKQIYKTPPIKDFGGFNFSQILPDPSKPSKRSFIEDLLFNKVTLADAGFIKQYGDCLGDIAARDLICAQKFNGLTVLPPLLTDEMIAQYTSALLAGTITSGWTFGAGAALQIPFAMQMAYRFNGIGVTQNVLYENQKLIANQFNSAIGKIQDSLSSTASALGKLQDVVNQNAQALNTLVKQLSSNFGAISSVLNDILSRLDPPEAEVQIDRLITGRLQSLQTYVTQQLIRAAEIRASANLAATKMSECVLGQSKRVDFCGKGYQLMSFPQSAPHGVVFLNVTYVPAQEKNFTTAPAICNDGKAHFPREGVFVSNGTNWFVTQRNFYEPQIITTDNTFVSGNCDVVIGIVNNTVYDPLQPELDSGGSGYIPEAPRDGQAYVRKDGEWVLLSTFL

SEQ ID NO: 9937 - protein, 1177 aa, Artificial Sequence
  SARS-CoV-2/Hong Kong/case42_VM20002493/2020__EPI_ISL_414527 spike protein (1-1147)(K986P_V987P_ H1048Q_H1064N_ H1083N_H1101N) Foldon construct
MFVFLVLLPLVSSQCVNLTTRTQLPPAYTNSFTRGVYYPDKVFRSSVLHSTQDLFLPFFSNVTWFHAIHVSGTNGTKRFDNPVLPFNDGVYFASTEKSNIIRGWIFGTTLDSKTQSLLIVNNATNVVIKVCEFQFCNDPFLGVYYHKNNKSWMESEFRVYSSANNCTFEYVSQPFLMDLEGKQGNFKNLREFVFKNIDGYFKIYSKHTPINLVRDLPQGFSALEPLVDLPIGINITRFQTLLALHRSYLTPGDSSSGWTAGAAAYYVGYLQPRTFLLKYNENGTITDAVDCALDPLSETKCTLKSFTVEKGIYQTSNFRVQPTESIVRFPNITNLCPFGEVFNATRFASVYAWNRKRISNCVADYSVLYNSASFSTFKCYGVSPTKLNDLCFTNVYADSFVIRGDEVRQIAPGQTGKIADYNYKLPDDFTGCVIAWNSNNLDSKVGGNYNYLYRLFRKSNLKPFERDISTEIYQAGSTPCNGVEGFNCYFPLQSYGFQPTNGVGYQPYRVVVLSFELLHAPATVCGPKKSTNLVKNKCVNFNFNGLTGTGVLTESNKKFLPFQQFGRDIADTTDAVRDPQTLEILDITPCSFGGVSVITPGTNTSNQVAVLYQDVNCTEVPVAIHADQLTPTWRVYSTGSNVFQTRAGCLIGAEHVNNSYECDIPIGAGICASYQTQTNSPRRARSVASQSIIAYTMSLGAENSVAYSNNSIAIPTNFAISVTTEILPVSMTKTSVDCTMYICGDSTECSNLLLQYGSFCTQLNRALTGIAVEQDKNTQEVFAQVKQIYKTPPIKDFGGFNFSQILPDPSKPSKRSFIEDLLFNKVTLADAGFIKQYGDCLGDIAARDLICAQKFNGLTVLPPLLTDEMIAQYTSALLAGTITSGWTFGAGAALQIPFAMQMAYRFNGIGVTQNVLYENQKLIANQFNSAIGKIQDSLSSTASALGKLQDVVNQNAQALNTLVKQLSSNFGAISSVLNDILSRLDPPEAEVQIDRLITGRLQSLQTYVTQQLIRAAEIRASANLAATKMSECVLGQSKRVDFCGKGYQLMSFPQSAPHGVVFLNVTYVPAQEKNFTTAPAICNDGKAHFPREGVFVSNGTNWFVTQRNFYEPQIITTDNTFVSGNCDVVIGIVNNTVYDPLQPELDSGGSGYIPEAPRDGQAYVRKDGEWVLLSTFL

SEQ ID NO: 9938 - protein, 1177 aa, Artificial Sequence
  SARS-CoV-2/USA/CruiseA-23/2020__EPI_ISL_414482 spike protein (1-1147)(K986P_V987P_ H1048Q_H1064N_ H1083N_H1101N) Foldon construct
MFVFLVLLPLVSSQCVNLTTRTQLPPAYTNSFTRGVYYPDKVFRSSVLHSTQDLFLPFFSNVTWFHAIHVSGTNGTKRFDNPVLPFNDGVYFASTEKSNIIRGWIFGTTLDSKTQSLLIVNNATNVVIKVCEFQFCNDPFLGVYYHKNNKSWMESEFRVYSSANNCTFEYVSQPFLMDLEVKQGNFKNLREFVFKNIDGYFKIYSKHTPINLVRDLPQGFSALEPLVDLPIGINITRFQTLLALHRSYLTPGDSSSGWTAGAAAYYVGYLQPRTFLLKYNENGTITDAVDCALDPLSETKCTLKSFTVEKGIYQTSNFRVQPTESIVRFPNITNLCPFGEVFNATRFASVYAWNRKRISNCVADYSVLYNSASFSTFKCYGVSPTKLNDLCFTNVYADSFVIRGDEVRQIAPGQTGKIADYNYKLPDDFTGCVIAWNSNNLDSKVGGNYNYLYRLFRKSNLKPFERDISTEIYQAGSTPCNGVEGFNCYFPLQSYGFQPTNGVGYQPYRVVVLSFELLHAPATVCGPKKSTNLVKNKCVNFNFNGLTGTGVLTESNKKFLPFQQFGRDIADTTDAVRDPQTLEILDITPCSFGGVSVITPGTNTSNQVAVLYQDVNCTEVPVAIHADQLTPTWRVYSTGSNVFQTRAGCLIGAEHVNNSYECDIPIGAGICASYQTQTNSPRRARSVASQSIIAYTMSLGAENSVAYSNNSIAIPTNFTISVTTEILPVSMTKTSVDCTMYICGDSTECSNLLLQYGSFCTQLNRALTGIAVEQDKNTQEVFAQVKQIYKTPPIKDFGGFNFSQILPDPSKPSKRSFIEDLLFNKVTLADAGFIKQYGDCLGDIAARDLICAQKFNGLTVLPPLLTDEMIAQYTSALLAGTITSGWTFGAGAALQIPFAMQMAYRFNGIGVTQNVLYENQKLIANQFNSAIGKIQDSLSSTASALGKLQDVVNQNAQALNTLVKQLSSNFGAISSVLNDILSRLDPPEAEVQIDRLITGRLQSLQTYVTQQLIRAAEIRASANLAATKMSECVLGQSKRVDFCGKGYQLMSFPQSAPHGVVFLNVTYVPAQEKNFTTAPAICNDGKAHFPREGVFVSNGTNWFVTQRNFYEPQIITTDNTFVSGNCDVVIGIVNNTVYDPLQPELDSGGSGYIPEAPRDGQAYVRKDGEWVLLSTFL

SEQ ID NO: 9939 - protein, 1177 aa, Artificial Sequence
  SARS-CoV-2/Hong Kong/case85_VM20002868/2020__EPI_ISL_414519 spike protein (1-1147)(K986P_V987P_ H1048Q_H1064N_ H1083N_H1101N) Foldon construct
MFVFLVLVPLVSSQCVNLTTRTQLPPAYTNSFTRGVYYPDKVFRSSVLHSTQDLFLPFFSNVTWFHAIHVSGTNGTKRFDNPVLPFNDGVYFASTEKSNIIRGWIFGTTLDSKTQSLLIVNNATNVVIKVCEFQFCNDPFLGVYYHKNNKSWMESEFRVYSSANNCTFEYVSQPFLMDLEGKQGNFKNLREFVFKNIDGYFKIYSKHTPINLVRDLPQGFSALEPLVDLPIGINITRFQTLLALHRSYLTPGDSSSGWTAGAAAYYVGYLQPRTFLLKYNENGTITDAVDCALDPLSETKCTLKSFTVEKGIYQTSNFRVQPTESIVRFPNITNLCPFGEVFNATRFASVYAWNRKRISNCVADYSVLYNSASFSTFKCYGVSPTKLNDLCFTNVYADSFVIRGDEVRQIAPGQTGKIADYNYKLPDDFTGCVIAWNSNNLDSKVGGNYNYLYRLFRKSNLKPFERDISTEIYQAGSTPCNGVEGFNCYFPLQSYGFQPTNGVGYQPYRVVVLSFELLHAPATVCGPKKSTNLVKNKCVNFNFNGLTGTGVLTESNKKFLPFQQFGRDIADTTDAVRDPQTLEILDITPCSFGGVSVITPGTNTSNQVAVLYQDVNCTEVPVAIHADQLTPTWRVYSTGSNVFQTRAGCLIGAEHVNNSYECDIPIGAGICASYQTQTNSPRRARSVASQSIIAYTMSLGAENSVAYSNNSIAIPTNFTISVTTEILPVSMTKTSVDCTMYICGDSTECSNLLLQYGSFCTQLNRALTGIAVEQDKNTQEVFAQVKQIYKTPPIKDFGGFNFSQILPDPSKPSKRSFIEDLLFNKVTLADAGFIKQYGDCLGDIAARDLICAQKFNGLTVLPPLLTDEMIAQYTSALLAGTITSGWTFGAGAALQIPFAMQMAYRFNGIGVTQNVLYENQKLIANQFNSAIGKIQDSLSSTASALGKLQDVVNQNAQALNTLVKQLSSNFGAISSVLNDILSRLDPPEAEVQIDRLITGRLQSLQTYVTQQLIRAAEIRASANLAATKMSECVLGQSKRVDFCGKGYQLMSFPQSAPHGVVFLNVTYVPAQEKNFTTAPAICNDGKAHFPREGVFVSNGTNWFVTQRNFYEPQIITTDNTFVSGNCDVVIGIVNNTVYDPLQPELDSGGSGYIPEAPRDGQAYVRKDGEWVLLSTFL

SEQ ID NO: 9940 - protein, 1177 aa, Artificial Sequence; identical to SEQ ID NO: 9930
  SARS-CoV-2/England/200990660/2020__EPI_ISL_414523 spike protein (1-1147)(K986P_V987P_ H1048Q_H1064N_ H1083N_H1101N) Foldon construct

SEQ ID NO: 9941 - protein, 1177 aa, Artificial Sequence
  SARS-CoV-2/Australia/NSW09/2020__EPI_ISL_413595 spike protein (1-1147)(K986P_V987P_ H1048Q_H1064N_ H1083N_H1101N) Foldon construct
MFVFLVLLPLVSSQCVNLTTRTQLPPAYTNSFTRGVYYPDKVFRSSVLHSTQDLFLPFFSNVTWFHAIHVSGTNGTKRFDNPVLPFNDGVYFASTEKSNIIRGWIFGTTLDSKTQSLLIVNNATNVVIKVCEFQFCNDPFLGVYYHKNNKSWMESEFRVYSSANNCTFEYVSQPFLMDLEGKQGNFKNLREFVFKNIDGYFKIYSKHTPINLVRDLPQGFSALEPLVDLPIGINITRFQTLLALHRSYLTPGDSSSGWTAGAAAYYVGYLQPRTFLLKYNENGTITDAVDCALDPLSETKCTLKSFTVEKGIYQTSNFRVQPTESIVRFPNITNLCPFGEVFNATRFASVYAWNRKRISNCVADYSVLYNSASFSTFKCYGVSPTKLNDLCFTNVYADSFVIRGDEVRQIAPGQTGKIADYNYKLPDDFTGCVIAWNSNNLDSKVGGNYNYLYRLFRKSNLKPFERDISTEIYQAGSTPCNGVEGFNCYFPLQSYGFQPTNGVGYQPYRVVVLSFELLHAPATVCGPKKSTNLVKNKCVNFNFNGLTGTGVLTESNKKFLPFQQFGRDIADTTDAVRDPQTLEILDITPCSFGGVSVITPGTNTSNQVAVLYQDVNCTEVPVAIHADQLTPTWRVYSTGSNVFQTRAGCLIGAEHVNNSYECDIPIGAGICASYQTQTNSPRRARSVASQSIIAYTMSLGAENSVAYSNNSIAIPTNFTISVTTEILPVSMTKTSVDCTMYICGDSTECSNLLLQYGSFCTQLNRALTGIAVEQDKNTQEVFAQVKQIYKTPPIKDFGGFNFSQILPDPSKPSKRSFIEDLLFNKVTLADAGFIKQYGDCLGDIAARDLICAQKFNGLTVLPPLLTDEMIAQYTSALLAGTITSGWTFGAGAALQIPFAMQMAYRFNGIGVTQNVLYENQKLIANQFNSAIGKIQDSLSFTASALGKLQDVVNQNAQALNTLVKQLSSNFGAISSVLNDILSRLDPPEAEVQIDRLITGRLQSLQTYVTQQLIRAAEIRASANLAATKMSECVLGQSKRVDFCGKGYQLMSFPQSAPHGVVFLNVTYVPAQEKNFTTAPAICNDGKAHFPREGVFVSNGTNWFVTQRNFYEPQIITTDNTFVSGNCDVVIGIVNNTVYDPLQPELDSGGSGYIPEAPRDGQAYVRKDGEWVLLSTFL

SEQ ID NO: 9942 - protein, 1177 aa, Artificial Sequence; identical to SEQ ID NO: 9922
  SARS-CoV-2/Australia/NSW10/2020__EPI_ISL_413596 spike protein (1-1147)(K986P_V987P_ H1048Q_H1064N_ H1083N_H1101N) Foldon construct

SEQ ID NO: 9943 - protein, 1177 aa, Artificial Sequence
  SARS-CoV-2/Switzerland/1000477797/2020__EPI_ISL_413023 spike protein (1-1147)(K986P_V987P_ H1048Q_H1064N_ H1083N_H1101N) Foldon construct
MFVFLVLLPLVSSQCVNLTTRTQLPPAYTNSFTRGVYYPDKVFRSSVLHSTQDLFLPFFSNVTWFHAIHVSGTNGTKRFDNPVLPFNDGVYFASTEKSNIIRGWIFGTTLDSKTQSLLIVNNATNVVIKVCEFQFCNDPFLGVYYHKNNKSWMESEFRVYSSANNCTFEYVSQPFLMDLEGKQGNFKNLREFVFKNIDGYFNIYSKHTPINLVRDLPQGFSALEPLVDLPIGINITRFQTLLALHRSYLTPGDSSSGWTAGAAAYYVGYLQPRTFLLKYNENGTITDAVDCALDPLSETKCTLKSFTVEKGIYQTSNFRVQPTESIVRFPNITNLCPFGEVFNATRFASVYAWNRKRISNCVADYSVLYNSASFSTFKCYGVSPTKLNDLCFTNVYADSFVIRGDEVRQIAPGQTGKIADYNYKLPDDFTGCVIAWNSNNLDSKVGGNYNYLYRLFRKSNLKPFERDISTEIYQAGSTPCNGVEGFNCYFPLQSYGFQPTNGVGYQPYRVVVLSFELLHAPATVCGPKKSTNLVKNKCVNFNFNGLTGTGVLTESNKKFLPFQQFGRDIADTTDAVRDPQTLEILDITPCSFGGVSVITPGTNTSNQVAVLYQGVNCTEVPVAIHADQLTPTWRVYSTGSNVFQTRAGCLIGAEHVNNSYECDIPIGAGICASYQTQTNSPRRARSVASQSIIAYTMSLGAENSVAYSNNSIAIPTNFTISVTTEILPVSMTKTSVDCTMYICGDSTECSNLLLQYGSFCTQLNRALTGIAVEQDKNTQEVFAQVKQIYKTPPIKDFGGFNFSQILPDPSKPSKRSFIEDLLFNKVTLADAGFIKQYGDCLGDIAARDLICAQKFNGLTVLPPLLTDEMIAQYTSALLAGTITSGWTFGAGAALQIPFAMQMAYRFNGIGVTQNVLYENQKLIANQFNSAIGKIQDSLSSTASALGKLQDVVNQNAQALNTLVKQLSSNFGAISSVLNDILSRLDPPEAEVQIDRLITGRLQSLQTYVTQQLIRAAEIRASANLAATKMSECVLGQSKRVDFCGKGYQLMSFPQSAPHGVVFLNVTYVPAQEKNFTTAPAICNDGKAHFPREGVFVSNGTNWFVTQRNFYEPQIITTDNTFVSGNCDVVIGIVNNTVYDPLQPELDSGGSGYIPEAPRDGQAYVRKDGEWVLLSTFL

SEQ ID NO: 9944 - protein, 1177 aa, Artificial Sequence
  SARS-CoV-2/Belgium/BA-02291/2020__EPI_ISL_415159 spike protein (1-1147)(K986P_V987P_ H1048Q_H1064N_ H1083N_H1101N) Foldon construct
MFVFLVLLPLVSSQCVNLTTRTQLPPAYTNSFTRGVYYPDKVFRSSVLHSTQDLFLPFFSNVTWFHAIHVSGTNGTKRFDNPVLPFNDGVYFASTEKSNIIRGWIFGTTLDSKTQSLLIVNNATNVVIKVCEFQFCNDPFLGVYYHKNNKSWMESEFRVYSSANNCTFEYVSQPFLMDLEGKQGNFKNLREFVFKNIDGYFKIYSKHTPINLVRDLPQGFSALEPLVDLPIGINITRFQTLLALHRSYLTPGDSSSGWTAGAAAYYVGYLQPRTFLLKYNENGTITDAVDCALDPLSETKCTLKSFTVEKGIYQTSNFRVQPTESIVRFPNITNLCPFGEVFNATRFASVYAWNRKRISNCVADYSVLYNSASFSTFKCYGVSPTKLNDLCFTNVYADSFVIRGDEVRQIAPGQTGKIADYNYKLPDDFTGCVIAWNSNNLDSKVGGNYNYLYRLFRRSNLKPFERDISTEIYQAGSTPCNGVEGFNCYFPLQSYGFQPTNGVGYQPYRVVVLSFELLPAPATVCGPKKSTNLVKNKCVNFNFNGLTGTGVLTESNKKFLPFQQFGRDIADTTDAVRDPQTLEILDITPCSFGGVSVITPGTNTSNQVAVLYQGVNCTEVPVAIHADQLTPTWRVYSTGSNVFQTRAGCLIGAEHVNNSYECDIPIGAGICASYQTQTNSPRRARSVASQSIIAYTMSLGAENSVAYSNNSIAIPTNFTISVTTEILPVSMTKTSVDCTMYICGDSTECSNLLLQYGSFCTQLNRALTGIAVEQDKNTQEVFAQVKQIYKTPPIKDFGGFNFSQILPDPSKPSKRSFIEDLLFNKVTLADAGFIKQYGDCLGDIAARDLICAQKFNGLTVLPPLLTDEMIAQYTSALLAGTITSGWTFGAGAALQIPFAMQMAYRFNGIGVTQNVLYENQKLIANQFNSAIGKIQDSLSSAAPALGKLQDVVNQNAQALNTLVKQLSSNFGAISSVLNDILSRLDPPEAEVQIDRLITGRLQSLQTYVTQQLIRAAEIRASANLAATKMSECVLGQSKRVDFCGKGYQLMSFPQSAPHGVVFLNVTYVPAQEKNFTTAPAICNDGKAHFPREGVFVSNGTNWFVTQRNFYEPQIITTDNTFVSGNCDVVIGIVNNTVYDPLQPELDSGGSGYIPEAPRDGQAYVRKDGEWVLLSTFL

SEQ ID NO: 9945 - protein, 1177 aa, Artificial Sequence
  SARS-CoV-2/USA/WA8-UW5/2020__EPI_ISL_413486 spike protein (1-1147)(K986P_V987P_ H1048Q_H1064N_ H1083N_H1101N) Foldon construct
MFVFLVLLPLVSSQCVNLTTRTQLPPAYTNSFTRGVYYPDKVFRSSVLHSTQDLFLPFFSNVTWFHAIHVSGTNGTKRFDNPVLPFNDGVYFASTEKSNIIRGWIFGTTLDSKTQSLLIVNNATNVVIKVCEFQFCNDPFLGVYYHKNNKSWMESEFRVYSSANNCTFEYVSQPFLMDLEGKQGNFKNLREFVFKNIDGYFKIYSKHTPINLVRDLPQGFSALEPLVDLPIGINITRFQTLLALHRSYLTPGDSSSGWTAGAAAYYVGYLQPRTFLLKYNENGTITDAVDCALDPLSETKCTLKSFTVEKGIYQTSNFRVQPTESIVRFPNITNLCPFGEVFNATRFASVYAWNRKRISNCVADYSVLYNSASFSTFKCYGVSPTKLNDLCFTNVYADSFVIRGDEVRQIAPGQTGKIADYNYKLPDDFTGCVIAWNSNNLDSKVGGNYNYLYRLFRKSNLKPFERDISTEIYQAGSTPCNGVEGFNCYFPLQSYGFQPTNGVGYQPYRVVVLSFELLHAPATVCGPKKSTNLVKNKCVNFNFNGLTGTGVLTESNKKFLPFQQFGRDIADTTDAVRDPQTLEILDITPCSFGGVSVITPGTNTSNQVAVLYQDVNCTEVPVAIHADQLTPTWRVYSTGSNVFQTRAGCLIGAEYVNNSYECDIPIGAGICASYQTQTNSPRRARSVASQSIIAYTMSLGAENSVAYSNNSIAIPTNFTISVTTEILPVSMTKTSVDCTMYICGDSTECSNLLLQYGSFCTQLNRALTGIAVEQDKNTQEVFAQVKQIYKTPPIKDFGGFNFSQILPDPSKPSKRSFIEDLLFNKVTLADAGFIKQYGDCLGDIAARDLICAQKFNGLTVLPPLLTDEMIAQYTSALLAGTITSGWTFGAGAALQIPFAMQMAYRFNGIGVTQNVLYENQKLIANQFNSAIGKIQDSLSSTASALGKLQDVVNQNAQALNTLVKQLSSNFGAISSVLNDILSRLDPPEAEVQIDRLITGRLQSLQTYVTQQLIRAAEIRASANLAATKMSECVLGQSKRVDFCGKGYQLMSFPQSAPHGVVFLNVTYVPAQEKNFTTAPAICNDGKAHFPREGVFVSNGTNWFVTQRNFYEPQIITTDNTFVSGNCDVVIGIVNNTVYDPLQPELDSGGSGYIPEAPRDGQAYVRKDGEWVLLSTFL

SEQ ID NO: 9946 - protein, 1177 aa, Artificial Sequence
  SARS-CoV-2/England/20102000506/2020__EPI_ISL_415147 spike protein (1-1147)(K986P_V987P_ H1048Q_H1064N_ H1083N_H1101N) Foldon construct
MFVFLVLLPLVSSQCVNLTTRTQLPPAYTNSFTRGVYYPDKVFRSSVLHSTQDLFLPFFSNVTWFHAIHVSGTNGTKRFDNPVLPFNDGVYFASTEKSNIIRGWIFGTTLDSKTQSLLIVNNATNVVIKVCEFQFCNDPFLGVYYHKNNKSWMESEFRVYSSANNCTFEYVSQPFLMDLEGKQGNFKNLREFVFKNIDGYFKIYSKHTPINLVRDLPQGFSALEPLVDLPIGINITRFQTLLALHRSYLTPGDSSSGWTAGAAAYYVGYLQPRTFLLKYNENGTITDAVDCALDPLSETKCTLKSFTVEKGIYQTSNFRVQPTESIVRFPNITNLCPFGEVFNATRFASVYAWNRKRISNCVADYSVLYNSASFSTFKCYGVSPTKLNDLCFTNVYADSFVIRGDEVRQIAPGQTGKIADYNYKLPDDFTGCVIAWNSNNLDSKVGGNYNYLYRLFRKSNLKPFERDISTEIYQAGSTPCNGVEGFNCYFPLQSYGFQPTNGVGYQPYRVVVLSFELLHAPATVCGPKKSTNLVKNKCVNFNFNGLTGTGVLTESNKKFLPFQQFGRDIADTTDAVRDPQTLEILDITPCSFGGVSVITPGTNTSNQVAVLYQGVNCTEVPVAIHADQLTPTWRVYSTGSNVFQTRAGCLIGAEHVNNSYECDIPIGAGICASYQTQTNSPRRARSVASQSIIAYTMSLGAENSVAYSNNSIAIPTNFTISVTTEILPVSMTKTSVDCTMYICGDSTECSNLLLQYGSFCTQLNRALTGIAVEQDKNTQEVFAQVKQIYKTPPIKDFGGFNFSQILPDPSKPSKRSFIEDLLFNKVTLADAGFIKQYGYCLGDIAARDLICAQKFNGLTVLPPLLTDEMIAQYTSALLAGTITSGWTFGAGAALQIPFAMQMAYRFNGIGVTQNVLYENQKLIANQFNSAIGKIQDSLSSTASALGKLQDVVNQNAQALNTLVKQLSSNFGAISSVLNDILSRLDPPEAEVQIDRLITGRLQSLQTYVTQQLIRAAEIRASANLAATKMSECVLGQSKRVDFCGKGYQLMSFPQSAPHGVVFLNVTYVPAQEKNFTTAPAICNDGKAHFPREGVFVSNGTNWFVTQRNFYEPQIITTDNTFVSGNCDVVIGIVNNTVYDPLQPELDSGGSGYIPEAPRDGQAYVRKDGEWVLLSTFL

SEQ ID NO: 9947 - protein, 1177 aa, Artificial Sequence
  SARS-CoV-2/Belgium/VAG-03013/2020__EPI_ISL_415155 spike protein (1-1147)(K986P_V987P_ H1048Q_H1064N_ H1083N_H1101N) Foldon construct
MFVFLVLLPLVSSQCVNLTTRTQLPPAYTNSFTRGVYYPDKVFRSSVLHSTQDLFLPFFSNVTWFHAIHVSGTNGTKRFDNPVLPFNDGVYFASTEKSNIIRGWIFGTTLDSKTQSLLIVNNATNVVIKVCEFQFCNDPFLGVYYHKNNKSWMESEFRVYSSANNCTFEYVSQPFLMDLEGKQGNFKNLREFVFKNIDGYFKIYSKHTPINLVRDLPQGFSALEPLVDLPIGINITRFQTLLALHRSYLTPGDSSSGWTAGAAAYYVGYLQPRTFLLKYNENGTITDAVDCALDPLSETKCTLKSFTVEKGIYQTSNFRVQPTESIVRFPNITNLCPFGEVFNATRFASVYAWNRKRISNCVADYSVLYNSASFSTFKCYGVSPTKLNDLCFTNVYADSFVIRGDEVRQIAPGQTGKIADYNYKLPDDFTGCVIAWNSNNLDSKVGGNYNYLYRLFRKSNLKPFERDISTEIYQAGSTPCNGVEGFNCYFPLQSYGFQPTNGVGYQPYRVVVLSFELLHAPATVCGPKKSTNLVKNKCVNFNFNGLTGTGVLTESNKKFLPFQQFGRDIADTTDAVRDPQTLEILDITPCSFGGVSVITPGTNTSNQVAVLYQGVNCTEVPVAIHADQLTPTWRVYSTGSNVFQTRAGCLIGAEHVNNSYECDIPIGAGICASYQTQTNSPRRARSVASQSIIAYTMSLGAENSVAYSNNSIAIPTNFTISVTTEILPVSMTKTSVDCTMYICGDSTECSNLLLQYGSFCTQLNRALTGIAVEQDKNTQEVFAQVKQIYKTPPIKDFGGFNFSQILPDPSKPSKRSFIEDLLFNKVTLADAGFIKQYGDCLGDIAARDLICAQKFNGLTVLPPLLTDEMIAQYTSALLAGTITSGWTFGAGAALQIPFAMQMAYRFNGIGVTQNVLYENQKLIANQFNSAIGKIQDSLSSTATALGKLQDVVNQNAQALNTLVKQLSSNFGAISSVLNDILSRLDPPEAEVQIDRLITGRLQSLQTYVTQQLIRAAEIRASANLAATKMSECVLGQSKRVDFCGKGYQLMSFPQSAPHGVVFLNVTYVPAQEKNFTTAPAICNDGKAHFPREGVFVSNGTNWFVTQRNFYEPQIITTDNTFVSGNCDVVIGIVNNTVYDPLQPELDSGGSGYIPEAPRDGQAYVRKDGEWVLLSTFL

SEQ ID NO: 9948 - protein, 1177 aa, Artificial Sequence
  SARS-CoV-2/Belgium/BC-03016/2020__EPI_ISL_415157 spike protein (1-1147)(K986P_V987P_ H1048Q_H1064N_ H1083N_H1101N) Foldon construct
MFVFLVLLPLVSSQCVNLTTRTQLPPAYTNSFTRGVYYPDKVFRSSVLHSTQDLFLPFFSNVTWFHAIHVSGTNGTKRFDNPVLPFNDGVYFASTEKSNIIRGWIFGTTLDSKTQSLLIVNNATNVVIKVCEFQFCNDPFLGVYYHKNNKSWMESEFRVYSSANNCTFEYVSQPFLMDLEGKQGNFKNLREFVFKNIDGYFKIYSKHTPINLVRDLPQGFSALEPLVDLPIGINITRFQTLLALHRSYLTPGDSSSGWTAGAAAYYVGYLQPRTFLLKYNENGTITDAVDCALDPLSETKCTLKSFTVEKGIYQTSNFRVQPTESIVRFPNITNLCPFGEVFNATRFASVYAWNRKRISNCVADYSVLYNSASFSTFKCYGVSPTKLNDLCFTNVYADSFVIRGDEVRQIAPGQTGKIADYNYKLPDDFTGCVIAWNSNNLDSKVGGNYNYLYRLFRKSNLKPFERDISTEIYQAGSTPCNGVEGFNCYFPLQSYGFQPTNGVGYQPYRVVVLSFELLHAPATVCGPKKSTNLVKNKCVNFNFNGLTGTGVLTESNKKFLPFQQFGRDIADTTDAVRDPQTLEILDITPCSFGGVSVITPGTNTSNQVAVLYQGVNCTEVPVAIHADQLTPTWRVYSTGSNVFQTRAGCLIGAEHVNNSYECDIPIGAGICASYQTQTNSPRRARSVASQSIIAYTMSLGAENSVAYSNNSIAIPTNFTISVTTEILPVSMTKTSVDCTMYICGDSTECSNLLLQYGSFCTQLNRALTGIAVEQDKNTQEVFAQVKQIYKTPPIKDFGGFNFSQILPDPSKPSKRSFIEDLLFNKVTLADAGFIKQYGDCLGDIAARDLICAQKFNGLTVLPPLLTDEMIAQYTSALLAGTITSGWTFGAGAALQIPFAMQMAYRFNGIGVTQNVLYENQKLIANQFNSAIGKIQDSLSSTAPALGKLQDVVNQNAQALNTLVKQLSSNFGAISSVLNDILSRLDPPEAEVQIDRLITGRLQSLQTYVTQQLIRAAEIRASANLAATKMSECVLGQSKRVDFCGKGYQLMSFPQSAPHGVVFLNVTYVPAQEKNFTTAPAICNDGKAHFPREGVFVSNGTNWFVTQRNFYEPQIITTDNTFVSGNCDVVIGIVNNTVYDPLQPELDSGGSGYIPEAPRDGQAYVRKDGEWVLLSTFL

SEQ ID NO: 9949 - protein, 1177 aa, Artificial Sequence
  SARS-CoV-2/Germany/BavPat3/2020__EPI_ISL_414521 spike protein (1-1147)(K986P_V987P_ H1048Q_H1064N_ H1083N_H1101N) Foldon construct
MFVFLVLLPLVSSQCVNLTTRTQLPPAYTNSFTRGVYYPDKVFRSSVLHSTQDLFLPFFSNVTWFHAIHVSGTNGTKRFDNPVLPFNDGVYFASTEKSNIIRGWIFGTTLDSKTQSLLIVNNATNVVIKVCEFQFCNDPFLGVYYHKNNKSWMESEFRVYSSANNCTFEYVSQPFLMDLEGKQGNFKNLREFVFKNIDGYFKIYSKHTPINLVRDLPQGFSALEPLVDLPIGINITRFQTLLALHRSYLTPGDSSSGWTAGAAAYYVGYLQPRTFLLKYNENGTITDAVDCALDPLSETKCTLKSFTVEKGIYQTSNFRVQPTESIVRFPNITNLCPFGEVFNATRFASVYAWNRKRISNCVADYSVLYNSASFSTFKCYGVSPTKLNDLCFTNVYADSFVIRGDEVRQIAPGQTGKIADYNYKLPDDFTGCVIAWNSNNLDSKVGGNYNYLYRLFRKSNLKPFERDISTEIYQAGSTPCNGVEGFNCYFPLQSYGFQPTNGVGYQPYRVVVLSFELLHAPATVCGPKKSTNLVKNKCVNFNFNGLTGTGVLTESNKKFLPFQQFGRDIADTTDAVRDPQTLEILDITPCSFGGVSVITPGTNTSNQVAVLYQDVNCTEVPVAIHADQLTPTWRVYSTGSNVFQTRAGCLIGAEHVNNSYECDIPIGAGICASYQTQTNSPRRARSVASQSIIAYTMSLGAENSVAYSNNSIAIPTNFTISVTTEILPVSMTKTSVDCTMYICGDSTECSNLLLQYGSFCTQLNRALTGIAVEQDKNTQQVFAQVKQIYKTPPIKDFGGFNFSQILPDPSKPSKRSFIEDLLFNKVTLADAGFIKQYGDCLGDIAARDLICAQKFNGLTVLPPLLTDEMIAQYTSALLAGTITSGWTFGAGAALQIPFAMQMAYRFNGIGVTQNVLYENQKLIANQFNSAIGKIQDSLSSTASALGKLQDVVNQNAQALNTLVKQLSSNFGAISSVLNDILSRLDPPEAEVQIDRLITGRLQSLQTYVTQQLIRAAEIRASANLAATKMSECVLGQSKRVDFCGKGYQLMSFPQSAPHGVVFLNVTYVPAQEKNFTTAPAICNDGKAHFPREGVFVSNGTNWFVTQRNFYEPQIITTDNTFVSGNCDVVIGIVNNTVYDPLQPELDSGGSGYIPEAPRDGQAYVRKDGEWVLLSTFL

SEQ ID NO: 9950 - protein, 1177 aa, Artificial Sequence
  SARS-CoV-2/France/HF1805/2020__EPI_ISL_414628 spike protein (1-1147)(K986P_V987P_ H1048Q_H1064N_ H1083N_H1101N) Foldon construct
MFVFLVLLPLVSSQCVNLTTRTQLPPAYTNSFTRGVYYPDKVFRSSVLHSTQDLFLPFFSNVTWFHAIHVSGTNGTKRFDNPVLPFNDGVYFASTEKSNIIRGWIFGTTLDSKTQSLLIVNNATNVVIKVCEFQFCNDPFLGVYYHKNNKSWMESEFRVYSSANNCTFEYVSQPFLMDLEGKQGNFKNLREFVFKNIDGYFKIYSKHTPINLVRDLPQGFSALEPLVDLPIGINITRFQTLLALHRSYLTPGDSSSGWTAGAAAYYVGYLQPRTFLLKYNENGTITDAVDCALDPLSETKCTLKSFTVEKGIYQTSNFRVQPTESIVRFPNITNLCPFGEVFNATRFASVYAWNRKRISNCVADYSVLYNSASFSTFKCYGVSPTKLNDLCFTNVYADSFVIRGDEVRQIAPGQTGKIADYNYKLPDDFTGCVIAWNSNNLDSKVGGNYNYLYRLFRKSNLKPFERDISTEIYQAGSTPCNGVEGFNCYFPLQSYGFQPTNGVGYQPYRVVVLSFELLHAPATVCGPKKSTNLVKNKCVNFNFNGLTGTGVLTESNKKFLPFQQFGRDIADTTDAVRDPQTLEILDITPCSFGGVSVITPGTNTSNQVAVLYQGVNCTEVPVAIHADQLTPTWRVYSTGSNVFQTRAGCLIGAEHVNNSYECDIPIGAGICASYQTQTNSPRRARSVASQSIIAYTMSLGAENSVAYSNNSIAIPTNFTISVTTEILPVSMTKTSVDCTMYICGDSTECSNLLLQYGSFCTQLNRALTGIAVEQDKNTQEVFAQVKQIYKTPPIKDFGGFNFSQILPDPSKPSKRSFIEDLLFNKVTLADAGFIKQYGDCLGDIAARDLICAQKFNGLTVLPPLLTDEMIAQYTSALLAGTITSGWTFGAGAALQIPFAMQMAYRFNGIGVTQNVLYENQKLIANQFNSAIGKIQDSLSSTASALGKLQDVVNQNAQALNTLVKQLSSNFGAISSVLNDILSRLDPPEAEVQIDRLITGRLQSLQTYVTQQLIRAAEIRASANLAATKMSECVLGQSKRVDFCGKGYQLMSFPQSAPHGVVFLNVTYVPAQEKNFTTAPAICNDGKAHFPREGVFVSNGTNWFVTQRNFYEPQIITTDNTFVSGNCDVVIGVVNNTVYDPLQPELDSGGSGYIPEAPRDGQAYVRKDGEWVLLSTFL

SEQ ID NO: 9951 - protein, 1177 aa, Artificial Sequence
  SARS-CoV-2/Netherlands/ZuidHolland_9/2020__EPI_ISL_414445 spike protein (1-1147)(K986P_V987P_ H1048Q_H1064N_ H1083N_H1101N) Foldon construct
MFVFLVLLPLVSSQCVNLTTRTQLPPAYTNSFTRGVYYPDKVFRSSVLHSTQDLFLPFFSNVTWFHAIHVSGTNGTKRFDNPVLPFNDGVYFASTEKSNIIRGWIFGTTLDSKTQSLLIVNNATNVVIKVCEFQFCNDPFLGVYYHKNNKSWMESEFRVYSSANNCTFEYVSQPFLMDLEGKQGNFKNLREFVFKNIDGYFKIYSKHTPINLVRDLPQGFSALEPLVDLPIGINITRFQTLLALHRSYLTPGDSSSGWTAGAAAYYVGYLQPRTFLLKYNENGTITDAVDCALDPLSETKCTLKSFTVEKGIYQTSNFRVQPTESIVRFPNITNLCPFGEVFNATRFASVYAWNRKRISNCVADYSVLYNSASFSTFKCYGVSPTKLNDLCFTNVYADSFVIRGDEVRQIAPGQTGKIADYNYKLPDDFTGCVIAWNSNNLDSKVGGNYNYLYRLFRKSNLKPFERDISTEIYQAGSTPCNGVEGFNCYFPLQSYGFQPTNGVGYQPYRVVVLSFELLHAPATVCGPKKSTNLVKNKCVNFNFNGLTGTGVLTESNKKFLPFQQFGRDIADTTDAVRDPQTLEILDITPCSFGGVSVITPGTNTSNQVAVLYQGVNCTEVPVAIHADQLTPTWRVYSTGSNVFQTRAGCLIGAEHVNNSYECDIPIGAGICASYQTQTNSPRRARSVASQSIIAYTMSLGAENSVAYSNNSIAIPTNFTISVTTEILPVSMTKTSVDCTMYICGDSTECSNLLLQYGSFCTQLNRALTGIAVEQDKNTQEVFAQVKQIYKTPPIKDFGGFNFSQILPDPSKPSKRSFIEDLLFNKVTLADAGFIKQYGDCLGDIAARDLICVQKFNGLTVLPPLLTDEMIAQYTSALLAGTITSGWTFGAGAALQIPFAMQMAYRFNGIGVTQNVLYENQKLIANQFNSAIGKIQDSLSSTASALGKLQDVVNQNAQALNTLVKQLSSNFGAISSVLNDILSRLDPPEAEVQIDRLITGRLQSLQTYVTQQLIRAAEIRASANLAATKMSECVLGQSKRVDFCGKGYQLMSFPQSAPHGVVFLNVTYVPAQEKNFTTAPAICNDGKAHFPREGVFVSNGTNWFVTQRNFYEPQIITTDNTFVSGNCDVVIGIVNNTVYDPLQPELDSGGSGYIPEAPRDGQAYVRKDGEWVLLSTFL

SEQ ID NO: 9952 - protein, 1177 aa, Artificial Sequence
  SARS-CoV-2/Finland/FIN03032020A/2020__EPI_ISL_413602 spike protein (1-1147)(K986P_V987P_ H1048Q_H1064N_ H1083N_H1101N) Foldon construct
MFVFLVLLPLVSSQCVNLTTRTQLPPAYTNSFTRGVYYPDKVFRSSVLHSTQDLFLPFFSNVTWFHAIHVSGTNGTKRFDNPVLPFNDGVYFASTEKSNIIRGWIFGTTLDSKTQSLLIVNNATNVVIKVCEFQFCNDPFLGVYYHKNNKSWMESEFRVYSSANNCTFEYVSQPFLMDLEGKQGNFKNLREFVFKNIDGYFKIYSKHTPINLVRDLPQGFSALEPLVDLPIGINITRFQTLLALHRSYLTPGDSSSGWTAGAAAYYVGYLQPRTFLLKYNENGTITDAVDCALDPLSETKCTLKSFTVEKGIYQTSNFRVQPTESIVRFPNITNLCPFGEVFNATRFASVYAWNRKRISNCVADYSVLYNSASFSTFKCYGVSPTKLNDLCFTNVYADSFVIRGDEVRQIAPGQTGKIADYNYKLPDDFTGCVISWNSNNLDSKVGGNYNYLYRLFRKSNLKPFERDISTEIYQAGSTPCNGVEGFNCYFPLQSYGFQPTNGVGYQPYRVVVLSFELLHAPATVCGPKKSTNLVKNKCVNFNFNGLTGTGVLTESNKKFLPFQQFGRDIADTTDAVRDPQTLEILDITPCSFGGVSVITPGTNTSNQVAVLYQGVNCTEVPVAIHADQLTPTWRVYSTGSNVFQTRAGCLIGAEHVNNSYECDIPIGAGICASYQTQTNSPRRARSVASQSIIAYTMSLGAENSVAYSNNSIAIPTNFTISVTTEILPVSMTKTSVDCTMYICGDSTECSNLLLQYGSFCTQLNRALTGIAVEQDKNTQEVFAQVKQIYKTPPIKDFGGFNFSQILPDPSKPSKRSFIEDLLFNKVTLADAGFIKQYGDCLGDIAARDLICAQKFNGLTVLPPLLTDEMIAQYTSALLAGTITSGWTFGAGAALQIPFAMQMAYRFNGIGVTQNVLYENQKLIANQFNSAIGKIQDSLSSTASALGKLQDVVNQNAQALNTLVKQLSSNFGAISSVLNDILSRLDPPEAEVQIDRLITGRLQSLQTYVTQQLIRAAEIRASANLAATKMSECVLGQSKRVDFCGKGYQLMSFPQSAPHGVVFLNVTYVPAQEKNFTTAPAICNDGKAHFPREGVFVSNGTNWFVTQRNFYEPQIITTDNTFVSGNCDVVIGIVNNTVYDPLQPELDSGGSGYIPEAPRDGQAYVRKDGEWVLLSTFL

SEQ ID NO: 9953 - protein, 1177 aa, Artificial Sequence
  SARS-CoV-2/France/GE1977/2020__EPI_ISL_414632 spike protein (1-1147)(K986P_V987P_ H1048Q_H1064N_ H1083N_H1101N) Foldon construct
MFVFLVLLPLVSSQCVNLTTRTQLPPAYTNSFTRGVYYPDKVFRSSVLHSTQDLFLPFFSNVTWFHAIHVSGTNGTKRFDNPVLPFNDGVYFASTEKSNIIRGWIFGTTLDSKTQSLLIVNNATNVVIKVCEFQFCNDPFLGVYYHKNNKSWMESEFRVYSSANNCTFEYVSQPFLMDLEGKQGNFKNLREFVFKNIDGYFKIYSKHTPINLVRDLPQGFSALEPLVDLPIGINITRFQTLLALHRSYLTPGDSSSGWTAGAAAYYVGYLQPRTFLLKYNENGTITDAVDCALDPLSETKCTLKSFTVEKGIYQTSNFRVQPTESIVRFPNITNLCPFGEVFNATRFASVYAWNRKRISNCVADYSVLYNSASFSTFKCYGVSPTKLNDLCFTNVYADSFVIRGDEVRQIAPGQTGKIADYNYKLPDDFTGCVIAWNSNNLDSKVGGNYNYLYRLFRKSNLKPFERDISTEIYQAGSTPCNGVEGFNCYFPLQSYGFQPTNGVGYQPYRVVVLSFELLHAPATVCGPKKSTNLVKNKCVNFNFNGLTGTGVLTESNKKFLPFQQFGRDIADTTDAVRDPQTLEILDITPCSFGGVSVITPGTNTSNQVAVLYQGVNCTEVPVAIHADQLTPTWRVYSTGSNVFQTRAGCLIGAEHVNNSYECDIPIGAGICASYQTQTNSPRRARSVASQSIIAYTMSLGAENSVAYSNNSIAIPTNFTISVTTEILPVSMTKTSVDCTMYICGDSTECSNLLLQYGSFCTQLNRALTGIAVEQDKNTQEVFAQVKQIYKTPPIKDFGGFNFSQILPDPSKPSKRSFIEDLLFNKVTLADAGFIKQYGDCLGDIAARDLICAQKFNGLTVLPPLLTDEMIAQYTSALLAGTITSGWTFGAGAALQIPFAMQMAYRFNGIGVTQNVLYENQKLIANQFNSAIGKIQDSLFSTASALGKLQDVVNQNAQALNTLVKQLSSNFGAISSVLNDILSRLDPPEAEVQIDRLITGRLQSLQTYVTQQLIRAAEIRASANLAATKMSECVLGQSKRVDFCGKGYQLMSFPQSAPHGVVFLNVTYVPAQEKNFTTAPAICNDGKAHFPREGVFVSNGTNWFVTQRNFYEPQIITTDNTFVSGNCDVVIGIVNNTVYDPLQPELDSGGSGYIPEAPRDGQAYVRKDGEWVLLSTFL

SEQ ID NO: 9954 - protein, 1177 aa, Artificial Sequence
  SARS-CoV-2/Finland/FIN-313/2020__EPI_ISL_414641 spike protein (1-1147)(K986P_V987P_ H1048Q_H1064N_ H1083N_H1101N) Foldon construct
MFVFLVLLPLVSSQCVNLTTRTQLPPAYTNSFTRGVYYPDKVFRSSVLHSTQDLFLPFFSNVTWFHAIHVSGTNGTKRFDNPVLPFNDGVYFASTEKSNIIRGWIFGTTLDSKTQSLLIVNNATNVVIKVCEFQFCNDPFLGVYYHKNNKSWMESEFRVYSSANNCTFEYVSQPFLMDLEGKQGNFKNLREFVFKNIDGYFKIYSKHTPINLVRDLPQGFSALEPLVDLPIGINITRFKTLLALHRSYLTPGDSSSGWTAGAAAYYVGYLQPRTFLLKYNENGTITDAVDCALDPLSETKCTLKSFTVEKGIYQTSNFRVQPTESIVRFPNITNLCPFGEVFNATRFASVYAWNRKRISNCVADYSVLYNSASFSTFKCYGVSPTKLNDLCFTNVYADSFVIRGDEVRQIAPGQTGKIADYNYKLPDDFTGCVIAWNSNNLDSKVGGNYNYLYRLFRKSNLKPFERDISTEIYQAGSTPCNGVEGFNCYFPLQSYGFQPTNGVGYQPYRVVVLSFELLHAPATVCGPKKSTNLVKNKCVNFNFNGLTGTGVLTESNKKFLPFQQFGRDIADTTDAVRDPQTLEILDITPCSFGGVSVITPGTNTSNQVAVLYQGVNCTEVPVAIHADQLTPTWRVYSTGSNVFQTRAGCLIGAEHVNNSYECDIPIGAGICASYQTQTNSPRRARSVASQSIIAYTMSLGAENSVAYSNNSIAIPTNFTISVTTEILPVSMTKTSVDCTMYICGDSTECSNLLLQYGSFCTQLNRALTGIAVEQDKNTQEVFAQVKQIYKTPPIKDFGGFNFSQILPDPSKPSKRSFIEDLLFNKVTLADAGFIKQYGDCLGDIAARDLICAQKFNGLTVLPPLLTDEMIAQYTSALLAGTITSGWTFGAGAALQIPFAMQMAYRFNGIGVTQNVLYENQKLIANQFNSAIGKIQDSLSSTASALGKLQDVVNQNAQALNTLVKQLSSNFGAISSVLNDILSRLDPPEAEVQIDRLITGRLQSLQTYVTQQLIRAAEIRASANLAATKMSECVLGQSKRVDFCGKGYQLMSFPQSAPHGVVFLNVTYVPAQEKNFTTAPAICNDGKAHFPREGVFVSNGTNWFVTQRNFYEPQIITTDNTFVSGNCDVVIGIVNNTVYDPLQPELDSGGSGYIPEAPRDGQAYVRKDGEWVLLSTFL

SEQ ID NO: 9955 - protein, 1177 aa, Artificial Sequence
  SARS-CoV-2/Netherlands/ZuidHolland_2/2020__EPI_ISL_414556 spike protein (1-1147)(K986P_V987P_ H1048Q_H1064N_ H1083N_H1101N) Foldon construct
MFVFLVLLPLVSSQCVNLTTRTQLPPAYTNSFTRGVYYPDKVFRSSVLHSTQDLFLPFFSNVTWFHAIHVSGTNGTKRFDNPVLPFNDGVYFASTEKSNIIRGWIFGTTLDSKTQSLLIVNNATNVVIKVCEFQFCNDPFLGVYYHKNNKSWMESEFRVYSSANNCTFEYVSQPFLMDLEGKQGNFKNLREFVFKNIDGYFKIYSKHTPINLVRDLPQGFSALEPLVDLPIGINITRFQTLLALHRSYLTPGDSSSGWTAGAAAYYVGYLQPRTFLLKYNENGTITDAVDCALDPLSETKCTLKSFTVEKGIYQTSNFRVQPTESIVRFPNITNLCPFGEVFNATRFASVYAWNRKRISNCVADYSVLYNSASFSTFKCYGVSPTKLNDLCFTNVYADSFVIRGDEVRQIAPGQTGKIADYNYKLPDDFTGCVIAWNSNNLDSKVGGNYNYLYRLFRKSNLKPFERDISTEIYQAGSTPCNGVEGFNCYFPLQSYGFQPTNGVGYQPYRVVVLSFELLHAPATVCGPKKSTNLVKNKCVNFNFNGLTGTGVLTESNKKFLPFQQFGRDIADTTDAVRDPQTLEILDITPCSFGGVSVITPGTNTSNQVAVLYQGVNCTEVPVAIHADQLTPTWRVYSTGSNVFQTRAGCLIGAEHVNNSYECDIPIGAGICASYQTQTNSPRRARSVASQSIIAYTMSLGAENSVAYSNNSIAIPTNFTISVTTEILPVSMTKTSVDCTMYICGDSTECSNLLLQYGSFCTQLNRALTGIALEQDKNTQEVFAQVKQIYKTPPIKDFGGFNFSQILPDPSKPSKRSFIEDLLFNKVTLADAGFIKQYGDCLGDIAARDLICAQKFNGLTVLPPLLTDEMIAQYTSALLAGTITSGWTFGAGAALQIPFAMQMAYRFNGIGVTQNVLYENQKLIANQFNSAIGKIQDSLSSTASALGKLQDVVNQNAQALNTLVKQLSSNFGAISSVLNDILSRLDPPEAEVQIDRLITGRLQSLQTYVTQQLIRAAEIRASANLAATKMSECVLGQSKRVDFCGKGYQLMSFPQSAPHGVVFLNVTYVPAQEKNFTTAPAICNDGKAHFPREGVFVSNGTNWFVTQRNFYEPQIITTDNTFVSGNCDVVIGIVNNTVYDPLQPELDSGGSGYIPEAPRDGQAYVRKDGEWVLLSTFL

SEQ ID NO: 9956 - protein, 1177 aa, Artificial Sequence
  SARS-CoV-2/USA/WA-UW31/2020__EPI_ISL_414618 spike protein (1-1147)(K986P_V987P_ H1048Q_H1064N_ H1083N_H1101N) Foldon construct
MFVFLVLLPLVSSQCVNLTTRTQLPPAYTNSFTRGVYYPDKVFRSSVLHSTQDLFLPFFSNVTWFHAIHVSGTNGTKRFDNPVLPFNDGVYFASTEKSNIIRGWIFGTTLDSKTQSLLIVNNATNVVIKVCEFQFCNDPFLGVYYHKNNKSWMESEFRVYSSANNCTFEYVSQPFLMDLEGKQGNFKNLREFVFKNIDGYFKIYSKHTPINLVRDLPQGFSALEPLVDLPIGINITRFQTLLALHRSYLTPGDSSSGWTAGAAAYYVGYLQPRTFLLKYNENGTITDAVDCALDPLSETKCTLKSFTVEKGIYQTSNFRVQPTESIVRFPNITNLCPFGEVFNATRFASVYAWNRKRISNCVADYSVLYNSASFSTFKCYGVSPTKLNDLCFTNVYADSFVIRGDEVRQIAPGQTGKIADYNYKLPDDFTGCVIAWNSNNLDSKVGGNYNYLYRLFRKSNLKPFERDISTEIYQAGSTPCNGAEGFNCYFPLQSYGFQPTNGVGYQPYRVVVLSFELLHAPATVCGPKKSTNLVKNKCVNFNFNGLTGTGVLTESNKKFLPFQQFGRDIADTTDAVRDPQTLEILDITPCSFGGVSVITPGTNTSNQVAVLYQDVNCTEVPVAIHADQLTPTWRVYSTGSNVFQTRAGCLIGAEHVNNSYECDIPIGAGICASYQTQTNSPRRARSVASQSIIAYTMSLGAENSVAYSNNSIAIPTNFTISVTTEILPVSMTKTSVDCTMYICGDSTECSNLLLQYGSFCTQLNRALTGIAVEQDKNTQEVFAQVKQIYKTPPIKDFGGFNFSQILPDPSKPSKRSFIEDLLFNKVTLADAGFIKQYGDCLGDIAARDLICAQKFNGLTVLPPLLTDEMIAQYTSALLAGTITSGWTFGAGAALQIPFAMQMAYRFNGIGVTQNVLYENQKLIANQFNSAIGKIQDSLSSTASALGKLQDVVNQNAQALNTLVKQLSSNFGAISSVLNDILSRLDPPEAEVQIDRLITGRLQSLQTYVTQQLIRAAEIRASANLAATKMSECVLGQSKRVDFCGKGYQLMSFPQSAPHGVVFLNVTYVPAQEKNFTTAPAICNDGKAHFPREGVFVSNGTNWFVTQRNFYEPQIITTDNTFVSGNCDVVIGIVNNTVYDPLQPELDSGGSGYIPEAPRDGQAYVRKDGEWVLLSTFL

SEQ ID NO: 9957 - protein, 1177 aa, Artificial Sequence
  SARS-CoV-2/South Korea/SNU01/2020__EPI_ISL_411929 spike protein (1-1147)(K986P_V987P_ H1048Q_H1064N_ H1083N_H1101N) Foldon construct
MFVFLVLLPLVSSQCVNLTTRTQLPPAYTNSFTRGVYYPDKVFRSSVLHSTQDLFLPFFSNVTWFHAIHVSGTNGTKRFDNPVLPFNDGVYFASTEKSNIIRGWIFGTTLDSKTQSLLIVNNATNVVIKVCEFQFCNDPFLGVYYHKNNKSWMESEFRVYSSANNCTFEYVSQPFLMDLEGKQGNFKNLREFVFKNIDGYFKIYSKHTPINLVRDLPQGFWALEPLVDLPIGINITRFQTLLALHRSYLTPGDSSSGWTAGAAAYYVGYLQPRTFLLKYNENGTITDAVDCALDPLSETKCTLKSFTVEKGIYQTSNFRVQPTESIVRFPNITNLCPFGEVFNATRFASVYAWNRKRISNCVADYSVLYNSASFSTFKCYGVSPTKLNDLCFTNVYADSFVIRGDEVRQIAPGQTGKIADYNYKLPDDFTGCVIAWNSNNLDSKVGGNYNYLYRLFRKSNLKPFERDISTEIYQAGSTPCNGVEGFNCYFPLQSYGFQPTNGVGYQPYRVVVLSFELLHAPATVCGPKKSTNLVKNKCVNFNFNGLTGTGVLTESNKKFLPFQQFGRDIADTTDAVRDPQTLEILDITPCSFGGVSVITPGTNTSNQVAVLYQDVNCTEVPVAIHADQLTPTWRVYSTGSNVFQTRAGCLIGAEHVNNSYECDIPIGAGICASYQTQTNSPRRARSVASQSIIAYTMSLGAENSVAYSNNSIAIPTNFTISVTTEILPVSMTKTSVDCTMYICGDSTECSNLLLQYGSFCTQLNRALTGIAVEQDKNTQEVFAQVKQIYKTPPIKDFGGFNFSQILPDPSKPSKRSFIEDLLFNKVTLADAGFIKQYGDCLGDIAARDLICAQKFNGLTVLPPLLTDEMIAQYTSALLAGTITSGWTFGAGAALQIPFAMQMAYRFNGIGVTQNVLYENQKLIANQFNSAIGKIQDSLSSTASALGKLQDVVNQNAQALNTLVKQLSSNFGAISSVLNDILSRLDPPEAEVQIDRLITGRLQSLQTYVTQQLIRAAEIRASANLAATKMSECVLGQSKRVDFCGKGYQLMSFPQSAPHGVVFLNVTYVPAQEKNFTTAPAICNDGKAHFPREGVFVSNGTNWFVTQRNFYEPQIITTDNTFVSGNCDVVIGIVNNTVYDPLQPELDSGGSGYIPEAPRDGQAYVRKDGEWVLLSTFL

SEQ ID NO: 9958 - protein, 1177 aa, Artificial Sequence
  SARS-CoV-2/China/WF0004/2020__EPI_ISL_413694 spike protein (1-1147)(K986P_V987P_ H1048Q_H1064N_ H1083N_H1101N) Foldon construct
MFVFLVLLPLVSSQCVNLTTRTQLPPAYTNSFTRGVYYPDKVFRSSVLHSTQDLFLPFFSNVTWFHAIHVSGTNGTKRFDNPVLPFNDGVYFASTEKSNIIRGWIFGTTLDSKTQSLLIVNNATNVVIKVCEFQFCNDPFLGVYYHKNNKSWTESEFRVYSSANNCTFEYVSQPFLMDLEGKQGNFKNLREFVFKNIDGYFKIYSKHTPINLVRDLPQGFSALEPLVDLPIGINITRFQTLLALHRSYLTPGDSSSGWTAGAAAYYVGYLQPRTFLLKYNENGTITDAVDCALDPLSETKCTLKSFTVEKGIYQTSNFRVQPTESIVRFPNITNLCPFGEVFNATRFASVYAWNRKRISNCVADYSVLYNSASFSTFKCYGVSPTKLNDLCFTNVYADSFVIRGDEVRQIAPGQTGKIADYNYKLPDDFTGCVIAWNSNNLDSKVGGNYNYLYRLFRKSNLKPFERDISTEIYQAGSTPCNGVEGFNCYFPLQSYGFQPTNGVGYQPYRVVVLSFELLHAPATVCGPKKSTNLVKNKCVNFNFNGLTGTGVLTESNKKFLPFQQFGRDIADTTDAVRDPQTLEILDITPCSFGGVSVITPGTNTSNQVAVLYQDVNCTEVPVAIHADQLTPTWRVYSTGSNVFQTRAGCLIGAEHVNNSYECDIPIGAGICASYQTQTNSPRRARSVASQSIIAYTMSLGAENSVAYSNNSIAIPTNFTISVTTEILPVSMTKTSVDCTMYICGDSTECSNLLLQYGSFCTQLNRALTGIAVEQDKNTQEVFAQVKQIYKTPPIKDFGGFNFSQILPDPSKPSKRSFIEDLLFNKVTLADAGFIKQYGDCLGDIAARDLICAQKFNGLTVLPPLLTDEMIAQYTSALLAGTITSGWTFGAGAALQIPFAMQMAYRFNGIGVTQNVLYENQKLIANQFNSAIGKIQDSLSSTASALGKLQDVVNQNAQALNTLVKQLSSNFGAISSVLNDILSRLDPPEAEVQIDRLITGRLQSLQTYVTQQLIRAAEIRASANLAATKMSECVLGQSKRFDFCGKGYQLMSFPQSAPHGVVFLNVTYVPAQEKNFTTAPAICNDGKAHFPREGVFVSNGTNWFVTQRNFYEPQIITTDNTFVSGNCDVVIGIVNNTVYDPLQPELDSGGSGYIPEAPRDGQAYVRKDGEWVLLSTFL

SEQ ID NO: 9959 - protein, 1177 aa, Artificial Sequence
  SARS-CoV-2/China/WF0028/2020__EPI_ISL_413791 spike protein (1-1147)(K986P_V987P_ H1048Q_H1064N_ H1083N_H1101N) Foldon construct
MFVFLVLLPLVSSQCVNLTTRTQLPPAYTNSFTRGVYYPDKVFRSSVLHSTQDLFLPFFSNVTWFHAIHVSGTNGTKRFDNPVLPFNDGVYFASTEKSNIIRGWIFGTTLDSKTQSLLIVNNATNVVIKVCEFQFCNDPFLGVYYHKNNKSWMESEFRVYSSANNCTFEYVSQPFLMDLEGKQGNFKNLREFVFKNIDGYFKIYSKHTPINLVRDLPQGFSALEPLVDLPIGINITRFQTLLALHRSYLTPGDSSSGWTAGAAAYYVGYLQPRTFLLKYNENGTITDAVDCALDPLSETKCTLKSFTVEKGIYQTSNFRVQPTESIVRFPNITNLCPFGEVFNATRFASVYAWNRKRISNCVADYSVLYNSASFSTFKCYGVSPTKLNDLCFTNVYADSFVIRGDEVRQIAPGQTGKIADYNYKLPDDFTGCVIAWNSNNLDSKVGGNYNYLYRLFRKSNLKPFERDISTEIYQAGSTPCNGVEGFNCYFPLQSYGFQPTNGVGYQPYRVVVLSFELLHAPATVCGPKKSTNLVKNKCVNFNFNGLTGTGVLTESNKKFLPFQQFGRDIADTTDAVRDPQTLEILDITPCSFGGVSVITPGTNTSNQVAVLYQDVNCTEVPVAIHADQLTPTWRVYSTGSNVFQTRAGCLIGAEHVNNSYECDIPIGAGICASYQTQTNSPRRARSVASQSIIAYTMSLGAENSVAYSNNSIAIPTNFTISVTTEILPVSMTKTSVDCTMYICGDSTECSNLLLQYGSFCTQLNRALTGIAVEQDKNTQEVFAQVKQIYKTPPIKDFGGFNFSQILPDPSKPSKRSFIEDLLFNKVTLADAGFIKQYGDCLGDIAARDLICAQKFNGLTVLPPLLTDEMIAQYTSALLAGTITSGWTFGAGAALQIPFAMQMAYRFNGIGVTQNVLYENQKLIANQFNSAIGKIQDSLSSTASALGKLQDVVNQNAQALNTLVKQLSSNFGAISSVLNDILSRLDPPEAEVQIDRLITGRLQSLQTYVTQQLIRAAEIRASANLAATKMSECVLGQSKRVDFCGKGYQLMSFPQSAPHGVVFLNVTYVPAQEKNFTTAPAICNDGKAHFPREGVFVSNGTNWFVTQRNFYEPQIITTDNTFVSGNCDVVIGIVNNTVYDPLQPELESGGSGYIPEAPRDGQAYVRKDGEWVLLSTFL

SEQ ID NO: 9960 - protein, 1177 aa, Artificial Sequence
  SARS-CoV-2/2019-nCoV/USA-CruiseA-18/2020__MT159716.1 spike protein (1-1147)(K986P_V987P_ H1048Q_H1064N_ H1083N_H1101N) Foldon construct
MFVFLVLLPLVSSQCVNLTTRTQLPPAYTNSFTRGVYYPDKVFRSSVLHSTQDLFLPFFSNVTWFHAIHVSGTNGTKRFDNPVLPFNDGVYFASTEKSNIIRGWIFGTTLDSKTQSLLIVNNATNVVIKVCEFQFCNDPFLGVYYHKNNKSWMESELRVYSSANNCTFEYVSQPFLMDLEGKQGNFKNLREFVFKNIDGYFKIYSKHTPINLVRDLPQGFSALEPLVDLPIGINITRFQTLLALHRSYLTPGDSSSGWTAGAAAYYVGYLQPRTFLLKYNENGTITDAVDCALDPLSETKCTLKSFTVEKGIYQTSNFRVQPTESIVRFPNITNLCPFGEVFNATRFASVYAWNRKRISNCVADYSVLYNSASFSTFKCYGVSPTKLNDLCFTNVYADSFVIRGDEVRQIAPGQTGKIADYNYKLPDDFTGCVIAWNSNNLDSKVGGNYNYLYRLFRKSNLKPFERDISTEIYQAGSTPCNGVEGFNCYFPLQSYGFQPTNGVGYQPYRVVVLSFELLHAPATVCGPKKSTNLVKNKCVNFNFNGLTGTGVLTESNKKFLPFQQFGRDIADTTDAVRDPQTLEILDITPCSFGGVSVITPGTNTSNQVAVLYQDVNCTEVPVAIHADQLTPTWRVYSTGSNVFQTRAGCLIGAEHVNNSYECDIPIGAGICASYQTQTNSPRRARSVASQSIIAYTMSLGAENSVAYSNNSIAIPTNFTISVTTEILPVSMTKTSVDCTMYICGDSTECSNLLLQYGSFCTQLNRALTGIAVEQDKNTQEVFAQVKQIYKTPPIKDFGGFNFSQILPDPSKPSKRSFIEDLLFNKVTLADAGFIKQYGDCLGDIAARDLICAQKFNGLTVLPPLLTDEMIAQYTSALLAGTITSGWTFGAGAALQIPFAMQMAYRFNGIGVTQNVLYENQKLIANQFNSAIGKIQDSLSSTASALGKLQDVVNQNAQALNTLVKQLSSNFGAISSVLNDILSRLDPPEAEVQIDRLITGRLQSLQTYVTQQLIRAAEIRASANLAATKMSECVLGQSKRVDFCGKGYQLMSFPQSAPHGVVFLNVTYVPAQEKNFTTAPAICNDGKAHFPREGVFVSNGTNWFVTQRNFYEPQIITTDNTFVSGNCDVVIGIVNNTVYDPLQPELDSGGSGYIPEAPRDGQAYVRKDGEWVLLSTFL

SEQ ID NO: 9961 - protein, 1177 aa, Artificial Sequence
  SARS-CoV-2/SARS-CoV-2/Yunnan-01/human/2020/CHN__MT049951.1 spike protein (1-1147)(K986P_V987P_ H1048Q_H1064N_ H1083N_H1101N) Foldon construct
MFVFLVLLPLVSSQCVNLTTRTQLPPANTNSFTRGVYYPDKVFRSSVLHSTQDLFLPFFSNVTWFHAIHVSGTNGTKRFDNPVLPFNDGVYFASTEKSNIIRGWIFGTTLDSKTQSLLIVNNATNVVIKVCEFQFCNDPFLGVYYHKNNKSWMESEFRVYSSANNCTFEYVSQPFLMDLEGKQGNFKNLREFVFKNIDGYFKIYSKHTPINLVRDLPQGFSALEPLVDLPIGINITRFQTLLALHRSYLTPGDSSSGWTAGAAAYYVGYLQPRTFLLKYNENGTITDAVDCALDPLSETKCTLKSFTVEKGIYQTSNFRVQPTESIVRFPNITNLCPFGEVFNATRFASVYAWNRKRISNCVADYSVLYNSASFSTFKCYGVSPTKLNDLCFTNVYADSFVIRGDEVRQIAPGQTGKIADYNYKLPDDFTGCVIAWNSNNLDSKVGGNYNYLYRLFRKSNLKPFERDISTEIYQAGSTPCNGVEGFNCYFPLQSYGFQPTNGVGYQPYRVVVLSFELLHAPATVCGPKKSTNLVKNKCVNFNFNGLTGTGVLTESNKKFLPFQQFGRDIADTTDAVRDPQTLEILDITPCSFGGVSVITPGTNTSNQVAVLYQDVNCTEVPVAIHADQLTPTWRVYSTGSNVFQTRAGCLIGAEHVNNSYECDIPIGAGICASYQTQTNSPRRARSVASQSIIAYTMSLGAENSVAYSNNSIAIPTNFTISVTTEILPVSMTKTSVDCTMYICGDSTECSNLLLQYGSFCTQLNRALTGIAVEQDKNTQEVFAQVKQIYKTPPIKDFGGFNFSQILPDPSKPSKRSFIEDLLFNKVTLADAGFIKQYGDCLGDIAARDLICAQKFNGLTVLPPLLTDEMIAQYTSALLAGTITSGWTFGAGAALQIPFAMQMAYRFNGIGVTQNVLYENQKLIANQFNSAIGKIQDSLSSTASALGKLQDVVNQNAQALNTLVKQLSSNFGAISSVLNDILSRLDPPEAEVQIDRLITGRLQSLQTYVTQQLIRAAEIRASANLAATKMSECVLGQSKRVDFCGKGYQLMSFPQSAPHGVVFLNVTYVPAQEKNFTTAPAICNDGKAHFPREGVFVSNGTNWFVTQRNFYEPQIITTDNTFVSGNCDVVIGIVNNTVYDPLQPELDSGGSGYIPEAPRDGQAYVRKDGEWVLLSTFL

SEQ ID NO: 9962 - protein, 1177 aa, Artificial Sequence
  SARS-CoV-2/USA/WA-UW292/2020__EPI_ISL_418077 spike protein (1-1147)(K986P_V987P_ H1048Q_H1064N_ H1083N_H1101N) Foldon construct
MFVFLVLLPLVSSQCVNLTTRTQLPPAYTNSFTRGVYYPDKVFRSSVLHSTQDLFLPFFSNVTWFHAIHVSGTNGTKRFDNPVLPFNDGVYFASTEKSNIIRGWIFGTTLDSKTQSLLIVNNATNVVIKVCEFQFCNDPFLGVYYHKNNKSWMESEFRVYSSANNCTFEYVSQPFLMDLEGKQGNFKNLREFVFKNIDGYFKIYSKHTPINLVRDLPQGFSALEPLVDLPIGINITRFQTLLALHRSYLTPGDSSSGWTAGAAAYYVGYLQPRTFLLKYNENGTITDAVDCALDPLSETKCTLKSFTVEKGIYQTSNFRVQPTESIVRFPNITNLCPFGEVFNATRFASVYAWNRKRISNCVADYSVLYNSASFSTFKCYGVSPTKLNDLCFTNVYADSFVIRGDEVRQIAPGQTGKIADYNYKLPDDFTGCVIAWNSNNLDSKVGGNYNYLYRLFRKSNLKPFERDISTEIYQASSTPCNGVEGFNCYFPLQSYGFQPTNGVGYQPYRVVVLSFELLHAPATVCGPKKSTNLVKNKCVNFNFNGLTGTGVLTESNKKFLPFQQFGRDIADTTDAVRDPQTLEILDITPCSFGGVSVITPGTNTSNQVAVLYQDVNCTEVPVAIHADQLTPTWRVYSTGSNVFQTRAGCLIGAEHVNNSYECDIPIGAGICASYQTQTNSPRRARSVASQSIIAYTMSLGAENSVAYSNNSIAIPTNFTISVTTEILPVSMTKTSVDCTMYICGDSTECSNLLLQYGSFCTQLNRALTGIAVEQDKNTQEVFAQVKQIYKTPPIKDFGGFNFSQILPDPSKPSKRSFIEDLLFNKVTLADAGFIKQYGDCLGDIAARDLICAQKFNGLTVLPPLLTDEMIAQYTSALLAGTITSGWTFGAGAALQIPFAMQMAYRFNGIGVTQNVLYENQKLIANQFNSAIGKIQDSLSSTASALGKLQDVVNQNAQALNTLVKQLSSNFGAISSVLNDILSRLDPPEAEVQIDRLITGRLQSLQTYVTQQLIRAAEIRASANLAATKMSECVLGQSKRVDFCGKGYQLMSFPQSAPHGVVFLNVTYVPAQEKNFTTAPAICNDGKAHFPREGVFVSNGTNWFVTQRNFYEPQIITTDNTFVSGNCDVVIGIVNNTVYDPLQPELDSGGSGYIPEAPRDGQAYVRKDGEWVLLSTFL

SEQ ID NO: 9963 - protein, 1177 aa, Artificial Sequence
  SARS-CoV-2/Iceland/192/2020__EPI_ISL_417819 spike protein (1-1147)(K986P_V987P_ H1048Q_H1064N_ H1083N_H1101N) Foldon construct
MFVFFVLLPLVSSQCVNLTTRTQLPPAYTNSFTRGVYYPDKVFRSSVLHSTQDLFLPFFSNVTWFHAIHVSGTNGTKRFDNPVLPFNDGVYFASTEKSNIIRGWIFGTTLDSKTQSLLIVNNATNVVIKVCEFQFCNDPFLGVYYHKNNKSWMESEFRVYSSANNCTFEYVSQPFLMDLEGKQGNFKNLREFVFKNIDGYFKIYSKHTPINLVRDLPQGFSALEPLVDLPIGINITRFQTLLALHRSYLTPGDSSSGWTAGAAAYYVGYLQPRTFLLKYNENGTITDAVDCALDPLSETKCTLKSFTVEKGIYQTSNFRVQPTESIVRFPNITNLCPFGEVFNATRFASVYAWNRKRISNCVADYSVLYNSASFSTFKCYGVSPTKLNDLCFTNVYADSFVIRGDEVRQIAPGQTGKIADYNYKLPDDFTGCVIAWNSNNLDSKVGGNYNYLYRLFRKSNLKPFERDISTEIYQAGSTPCNGVEGFNCYFPLQSYGFQPTNGVGYQPYRVVVLSFELLHAPATVCGPKKSTNLVKNKCVNFNFNGLTGTGVLTESNKKFLPFQQFGRDIADTTDAVRDPQTLEILDITPCSFGGVSVITPGTNTSNQVAVLYQGVNCTEVPVAIHADQLTPTWRVYSTGSNVFQTRAGCLIGAEHVNNSYECDIPIGAGICASYQTQTNSPRRARSVASQSIIAYTMSLGAENSVAYSNNSIAIPTNFTISVTTEILPVSMTKTSVDCTMYICGDSTECSNLLLQYGSFCTQLNRALTGIAVEQDKNTQEVFAQVKQIYKTPPIKDFGGFNFSQILPDPSKPSKRSFIEDLLFNKVTLADAGFIKQYGDCLGDIAARDLICAQKFNGLTVLPPLLTDEMIAQYTSALLAGTITSGWTFGAGAALQIPFAMQMAYRFNGIGVTQNVLYENQKLIANQFNSAIGKIQDSLSSTASALGKLQDVVNQNAQALNTLVKQLSSNFGAISSVLNDILSRLDPPEAEVQIDRLITGRLQSLQTYVTQQLIRAAEIRASANLAATKMSECVLGQSKRVDFCGKGYQLMSFPQSAPHGVVFLNVTYVPAQEKNFTTAPAICNDGKAHFPREGVFVSNGTNWFVTQRNFYEPQIITTDNTFVSGNCDVVIGIVNNTVYDPLQPELDSGGSGYIPEAPRDGQAYVRKDGEWVLLSTFL

SEQ ID NO: 9964 - protein, 1177 aa, Artificial Sequence
  SARS-CoV-2/Belgium/ULG-6939/2020__EPI_ISL_417020 spike protein (1-1147)(K986P_V987P_ H1048Q_H1064N_ H1083N_H1101N) Foldon construct
MFVFLVLLPLVSSQCVNLTTRTQLPPAYTNSFTRGVYYPDKVFRSSVLHSTQDLFLPFFSNVTWFHAIHVSGTNGTKRFDNPVLPFNDGVYFASTEKSNIIRGWIFGTTLDSKTQSLLIVNNATNVVIKVCEFQFCNDPFLGVYYHKNNKSWMESEFRVYSSANNCTFEYVSQPFLMDLEGKQGNFKNLREFVFKNIDGYFKIYSKHTPINLVRDLPQGFSALEPLVDLPIGINITRFQTLLALHRSYLTPGDSSSGWTAGAAAYYVGYLQPRTFLLKYNENGTITDAVDCALDPLSETKCTLKSFTVEKGIYQTSNFRVQPTESIVRFPNITNLCPFGEVFNATRFASVYAWNRKRISNCVADYSVLYNSASFSTFKCYGVSPTKLNDLCFTNVYADSFVIRGDEVRQIAPGQTGKIADYNYKLPDDFTGCVIAWNSNNLDSKVGGNYNYLYRLFRKSNLKPFERDISTEIYQAGSTPCNGVEGFNCYFPLQSYGFQPTNGVGYQPYRVVVLSFELLHAPATVCGPKKSTNLVKNKCVNFNFNGLTGTGVLTESNKKFLPFQQFGRDIADTTDAVRDPQTLEILDITPCSFGGVSVITPGTNTSNQVAVLYQGVNCTEVPVAIHADQLTPTWRVYSTGSNVFQTRAGCLIGAEHVNNSYECDIPIGAGICASYQTQTNSPRRARSVASQSIIAYTMSLGAENSVVYSNNSIAIPTNFTISVTTEILPVSMTKTSVDCTMYICGDSTECSNLLLQYGSFCTQLNRALTGIAVEQDKNTQEVFAQVKQIYKTPPIKDFGGFNFSQILPDPSKPSKRSFIEDLLFNKVTLADAGFIKQYGDCLGDIAARDLICAQKFNGLTVLPPLLTDEMIAQYTSALLAGTITSGWTFGAGAALQIPFAMQMAYRFNGIGVTQNVLYENQKLIANQFNSAIGKIQDSLSSTASALGKLQDVVNQNAQALNTLVKQLSSNFGAISSVLNDILSRLDPPEAEVQIDRLITGRLQSLQTYVTQQLIRAAEIRASANLAATKMSECVLGQSKRVDFCGKGYQLMSFPQSAPHGVVFLNVTYVPAQEKNFTTAPAICNDGKAHFPREGVFVSNGTNWFVTQRNFYEPQIITTDNTFVSGNCDVVIGIVNNTVYDPLQPELDSGGSGYIPEAPRDGQAYVRKDGEWVLLSTFL

SEQ ID NO: 9965 - protein, 1177 aa, Artificial Sequence
  SARS-CoV-2/France/HF2496/2020__EPI_ISL_418231 spike protein (1-1147)(K986P_V987P_ H1048Q_H1064N_ H1083N_H1101N) Foldon construct
MFVFLVLLPLVSSQCVNLTTRTQLPPAYTNSFTRGVYYPDKVFRSSVLHSTQDLFLPFFSNVTWFHAIHVSGTNGTKRFDNPVLPFNDGVYFASTEKSNIIRGWIFGTTLDSKTQSLLIVNNATNVVIKVCEFQFCNDPFLGVYYHKNNKSWMESEFRVYSSANNCTFEYVSQPFLMDLEGKQGNFKNLREFVFKNIDGYFKIYSKHTPINLVRDLPQGFSALEPLVDLPIGINITRFQTLLALHRSYLTPGDSSSGWTAGAAAYYVGYLQPRTFLLKYNENGTITDAVDCALDPLSETKCTLKSFTVEKGIYQTSNFRVQPTESIVRFPNITNLCPFGEVFNATRFASVYAWNRKRISNCVADYSVLYNSASFSTFKCYGVSPTKLNDLCFTNVYADSFVIRGDEVRQIAPGQTGKIADYNYKLPDDFTGCVIAWNSNNLDSKVGGNYNYLYRLFRKSNLKPFERDISTEIYQAGSTPCNGVEGFNCYFPLQSYGFQPTNGVGYQPYRVVVLSFELLHAPATVCGPKKSTNLVKNKCVNFNFNGLTGTGVLTESNKKFLPFQQFGRDIADTTDAVRDPQTLEILDITPCSFGGVSVITPGTNTSNQVAVLYQGVNCTEVPVAIHADQLTPTWRVYSTGSNVFQTRAGCLIGAEHVNNSYECDIPIGAGICASYQTQTNSPRRARSVASQSIIAYTMSLGAENSVAYSNNSIAIPTNFTISVTTEILPVSMTKTSVDCTMYICGDSTECSNLLLQYGSFCTQLNRALTGIAVEQDKNTQEVFAQVKQIYKTPPIKDFGGFNFSQILPDPSKPSKRSFIEDLLFNKVTLADAGFIKQYGDCLGDIVARDLICAQKFNGLTVLPPLLTDEMIAQYTSALLAGTITSGWTFGAGAALQIPFAMQMAYRFNGIGVTQNVLYENQKLIANQFNSAIGKIQDSLSSTASALGKLQDVVNQNAQALNTLVKQLSSNFGAISSVLNDILSRLDPPEAEVQIDRLITGRLQSLQTYVTQQLIRAAEIRASANLAATKMSECVLGQSKRVDFCGKGYQLMSFPQSAPHGVVFLNVTYVPAQEKNFTTAPAICNDGKAHFPREGVFVSNGTNWFVTQRNFYEPQIITTDNTFVSGNCDVVIGIVNNTVYDPLQPELDSGGSGYIPEAPRDGQAYVRKDGEWVLLSTFL

SEQ ID NO: 9966 - protein, 1177 aa, Artificial Sequence
  SARS-CoV-2/USA/WA-UW291/2020__EPI_ISL_418076 spike protein (1-1147)(K986P_V987P_ H1048Q_H1064N_ H1083N_H1101N) Foldon construct
MFVFLVLLPLVSSQCVNLTTRTQLPPAYTNSFTRGVYYPDKVFRSSVLHSTQDLFLPFFSNVTWFHAIHVSGTNGTKRFDNPVLPFNDGVYFASTEKSNIIRGWIFGTTLDSKTQSLLIVNNATNVVIKVCEFQFCNDPFLGVYYHKNNKSWMESEFRVYSSANNCTFEYVSQPFLMDLEGKQGNFKNLREFVFKNIDGYFKIYSKHTPINLVRDLPQGFSALEPLVDLPIGINITRFQTLLALHRSYLTPGDSSSGWTAGAAAYYVGYLQPRTFLLKYNENGTITDAVDCALDPLSETKCTLKSFTVEKGIYQTSNFRVQPTESIVRFPNITNLCPFGEVFNATRFASVYAWNRKRISNCVADYSVLYNSASFSTFKCYGVSPTKLNDLCFTNVYADSFVIRGDEVRQIAPGQTGKIADYNYKLPDDFTGCVIAWNSNNLDSKVGGNYNYLYRLFRKSNLKPFERDISTEIYQAGSTPCNGVEGFNCYFPLQSYGFQPTNGVGYQPYRVVVLSFELLHAPATVCGPKKSTNLVKNKCVNFNFNGLTGTGVLTESNKKFLPFQQFGRDIADTTDAVRDPQTLEILDITPCSFGGVSVITPGTNTSNQVAVLYQGVNCTEVPVAIHADQLTPTWRVYSTGSNVFQTRAGCLIGAEHVNNSYECDIPIGAGICASYQTQTNSPRRARSVASQSIIAYTMSLGAENSVAYSNNSIAIPTNFTISVTTEILPVSMTKTSVDCTMYICGDSTECSNLLLQYGSFCTQLNRALTGIAVEQDKNTQEVFAQVKQIYKTPPIKDFGGFNFSQILPDPSKPSKRSFIEDLLFNKVTLADAGFIKQYGDCLGDIAARDLICAQKFNGLTVLPPLLTDEMIAQYTSALLAGTITSGWTFGAGAALQIPFAMQMAYRFNGIGVTQNVLYENQKLIANQFNSAIGKIQYSLSSTASALGKLQDVVNQNAQALNTLVKQLSSNFGAISSVLNDILSRLDPPEAEVQIDRLITGRLQSLQTYVTQQLIRAAEIRASANLAATKMSECVLGQSKRVDFCGKGYQLMSFPQSAPHGVVFLNVTYVPAQEKNFTTAPAICNDGKAHFPREGVFVSNGTNWFVTQRNFYEPQIITTDNTFVSGNCDVVIGIVNNTVYDPLQPELDSGGSGYIPEAPRDGQAYVRKDGEWVLLSTFL

SEQ ID NO: 9967 - protein, 1177 aa, Artificial Sequence; identical to SEQ ID NO: 9930
  SARS-CoV-2/Portugal/PT0034/2020__EPI_ISL_418019 spike protein (1-1147)(K986P_V987P_ H1048Q_H1064N_ H1083N_H1101N) Foldon construct

SEQ ID NO: 9968 - protein, 1177 aa, Artificial Sequence; identical to SEQ ID NO: 9922
  SARS-CoV-2/Iceland/202/2020__EPI_ISL_417750 spike protein (1-1147)(K986P_V987P_ H1048Q_H1064N_ H1083N_H1101N) Foldon construct

SEQ ID NO: 9969 - protein, 1177 aa, Artificial Sequence
  SARS-CoV-2/USA/WA-UW261/2020__EPI_ISL_418046 spike protein (1-1147)(K986P_V987P_ H1048Q_H1064N_ H1083N_H1101N) Foldon construct
MFVFLVLLPLVSSQCVNLTTRTQLPPAYTNSFTRGVYYPDKVFRSSVLHSTQDLFLPFFSNVTWFHAIHVSGTNGTKRFDNPVLPFNDGVYFASTEKSNIIRGWIFGTTLDSKTQSLLIVNNATNVVIKVCEFQFCNDPFLGVYYHKNNKSWMESEFRVYSSANNCTFEYVSQPFLMDLEGKQGNFKNLREFVFKNIDGYFKIYSKHTPINLVRDLPQGFSALEPLVDLPIGINITRFQTLLALHRSYLTPGDSSSGWTAGAAAYYVGYLQPRTFLLKYNENGTITDAVDCALDPLSETKCTLKSFTVEKGIYQTSNFRVQPTESIVRFPNITNLCPFGEVFNATRFTSVYAWNRKRISNCVADYSVLYNSASFSTFKCYGVSPTKLNDLCFTNVYADSFVIRGDEVRQIAPGQTGKIADYNYKLPDDFTGCVIAWNSNNLDSKVGGNYNYLYRLFRKSNLKPFERDISTEIYQAGSTPCNGVEGFNCYFPLQSYGFQPTNGVGYQPYRVVVLSFELLHAPATVCGPKKSTNLVKNKCVNFNFNGLTGTGVLTESNKKFLPFQQFGRDIADTTDAVRDPQTLEILDITPCSFGGVSVITPGTNTSNQVAVLYQDVNCTEVPVAIHADQLTPTWRVYSTGSNVFQTRAGCLIGAEHVNNSYECDIPIGAGICASYQTQTNSPRRARSVASQSIIAYTMSLGAENSVAYSNNSIAIPTNFTISVTTEILPVSMTKTSVDCTMYICGDSTECSNLLLQYGSFCTQLNRALTGIAVEQDKNTQEVFAQVKQIYKTPPIKDFGGFNFSQILPDPSKPSKRSFIEDLLFNKVTLADAGFIKQYGDCLGDIAARDLICAQKFNGLTVLPPLLTDEMIAQYTSALLAGTITSGWTFGAGAALQIPFAMQMAYRFNGIGVTQNVLYENQKLIANQFNSAIGKIQDSLSSTASALGKLQDVVNQNAQALNTLVKQLSSNFGAISSVLNDILSRLDPPEAEVQIDRLITGRLQSLQTYVTQQLIRAAEIRASANLAATKMSECVLGQSKRVDFCGKGYQLMSFPQSAPHGVVFLNVTYVPAQEKNFTTAPAICNDGKAHFPREGVFVSNGTNWFVTQRNFYEPQIITTDNTFVSGNCDVVIGIVNNTVYDPLQPELDSGGSGYIPEAPRDGQAYVRKDGEWVLLSTFL

SEQ ID NO: 9970 - protein, 1177 aa, Artificial Sequence
  SARS-CoV-2/Portugal/PT0035/2020__EPI_ISL_418020 spike protein (1-1147)(K986P_V987P_ H1048Q_H1064N_ H1083N_H1101N) Foldon construct
MFVFLVLLPLVSSQCVNLTTRTQLPPAYTNSFTRGVYYPDKVFRSSVLHSTQDLFLPFFSNVTWFHAIHVSGTNGTKRFDNPVLPFNDGVYFASTEKSNIIRGWIFGTTLDSKTQSLLIVNNATNVVIKVCEFQFCNDPFLGVYYHKNNKSWMESEFRVYSSANNCTFEYVSQPFLMDLEGKQGNFKNLREFVFKNIDGYFKIYSKHTPINLVRDLPQGFSALEPLVDLPIGINITRFQTLLALHRSYLTPGDSSSGWTAGAAAYYVGYLQPRTFLLKYNENGTITDAVDCALDPLSETKCTLKSFTVEKGIYQTSNFRVQPTESIVRFPNITNLCPFGEVFNATRFASVYAWNRKRISNCVADYSVLYNSASFSTFKCYGVSPTKLNDLCFTNVYADSFVIRGDEVRQIAPGQTGKIADYNYKLPDDFTGCVIAWNSNNLDSKVGGNYNYLYRLFRKSNLKPFERDISTEIYQAGSTPCNGVEGFNCYFPLQSYGFQPTNGVGYQPYRVVVLSFELLHAPATVCGPKKSTNLVKNKCVNFNFNGLTGTGVLTESNKKFLPFQQFGRDIADTTDAVRDPQTLEILDITPCSFGGVSVITPGTNTSNQVAVLYQDVNCTEVPVAIHADQLTPTWRVYSTGSNVFQTRAGCLIGAEHVNNSYECDIPIGAGICASYQTQTNSPRRARSVASQSIIAYTMSLGAENSVAYSNNSIAIPTNFTISVTTEILPVSMTKTSVDCTMYICGDSTECSNLLLQYGSFCTQLNRALTGIAVEQDKNTQEVFAQVKQIYKTPPIKDFGGFNFSQILPDPSKPSKRSFIEDLLFNKVTLADAGFIKQYGDCLGDISARDLICAQKFNGLTVLPPLLTDEMIAQYTSALLAGTITSGWTFGAGAALQIPFAMQMAYRFNGIGVTQNVLYENQKLIANQFNSAIGKIQDSLSSTASALGKLQDVVNQNAQALNTLVKQLSSNFGAISSVLNDILSRLDPPEAEVQIDRLITGRLQSLQTYVTQQLIRAAEIRASANLAATKMSECVLGQSKRVDFCGKGYQLMSFPQSAPHGVVFLNVTYVPAQEKNFTTAPAICNDGKAHFPREGVFVSNGTNWFVTQRNFYEPQIITTDNTFVSGNCDVVIGIVNNTVYDPLQPELDSGGSGYIPEAPRDGQAYVRKDGEWVLLSTFL

SEQ ID NO: 9971 - protein, 1177 aa, Artificial Sequence
  SARS-CoV-2/USA/NY-NYUMC7/2020__EPI_ISL_418192 spike protein (1-1147)(K986P_V987P_ H1048Q_H1064N_ H1083N_H1101N) Foldon construct
MFVFLVLLPLVSSQCVNLTTRTQLPPAYTNSFTRGVYYPDKVFRSSVLHSTQDLFLPFFSNVTWFHAIHVSGTNGTKRFDNPVLPFNDGVYFASTEKSNIIRGWIFGTTLDSKTQSLLIVNNATNVVIKVCEFQFCNDPFLGVYHHKNNKSWMESEFRVYSSANNCTFEYVSQPFLMDLEGKQGNFKNLREFVFKNIDGYFKIYSKHTPINLVRDLPQGFSALEPLVDLPIGINITRFQTLLALHRSYLTPGDSSSGWTAGAAAYYVGYLQPRTFLLKYNENGTITDAVDCALDPLSETKCTLKSFTVEKGIYQTSNFRVQPTESIVRFPNITNLCPFGEVFNATRFASVYAWNRKRISNCVADYSVLYNSASFSTFKCYGVSPTKLNDLCFTNVYADSFVIRGDEVRQIAPGQTGKIADYNYKLPDDFTGCVIAWNSNNLDSKVGGNYNYLYRLFRKSNLKPFERDISTEIYQAGSTPCNGVEGFNCYFPLQSYGFQPTNGVGYQPYRVVVLSFELLHAPATVCGPKKSTNLVKNKCVNFNFNGLTGTGVLTESNKKFLPFQQFGRDIADTTDAVRDPQTLEILDITPCSFGGVSVITPGTNTSNQVAVLYQGVNCTEVPVAIHADQLTPTWRVYSTGSNVFQTRAGCLIGAEHVNNSYECDIPIGAGICASYQTQTNSPRRARSVASQSIIAYTMSLGAENSVAYSNNSIAIPTNFTISVTTEILPVSMTKTSVDCTMYICGDSTECSNLLLQYGSFCTQLNRALTGIAVEQDKNTQEVFAQVKQIYKTPPIKDFGGFNFSQILPDPSKPSKRSFIEDLLFNKVTLADAGFIKQYGDCLGDIAARDLICAQKFNGLTVLPPLLTDEMIAQYTSALLAGTITSGWTFGAGAALQIPFAMQMAYRFNGIGVTQNVLYENQKLIANQFNSAIGKIQDSLSSTASALGKLQDVVNQNAQALNTLVKQLSSNFGAISSVLNDILSRLDPPEAEVQIDRLITGRLQSLQTYVTQQLIRAAEIRASANLAATKMSECVLGQSKRVDFCGKGYQLMSFPQSAPHGVVFLNVTYVPAQEKNFTTAPAICNDGKAHFPREGVFVSNGTNWFVTQRNFYEPQIITTDNTFVSGNCDVVIGIVNNTVYDPLQPELDSGGSGYIPEAPRDGQAYVRKDGEWVLLSTFL

SEQ ID NO: 9972 - protein, 1177 aa, Artificial Sequence
  SARS-CoV-2/Iceland/189/2020__EPI_ISL_417709 spike protein (1-1147)(K986P_V987P_ H1048Q_H1064N_ H1083N_H1101N) Foldon construct
MFVFLVLLPLVSSQCVNLTTRTQLPPAYTNSFTRGVYYPDKVFRSSVLHSTQDLFLPFFSNVTWFHAIHVSGTNGTKRFDNPVLPFNDGVYFASTEKSNIIRGWIFGTTLDSKTQSLLIVNNATNVVIKVCEFQFCNDPFLGVYYHKNNKSWMESEFRVYSSANNCTFEYVSQPFLMDLEGKQGNFKNLREFVFKNIDGYFKIYSKHTPINLVRDLPQGFSALEPLVDLPIGINITRFQTLLALHRSYLTPGDSSSGWTAGAAAYYVGYLQPRTFLLKYNENGTITDAVDCALDPLSETKCTLKSFTVEKGIYQTSNFRVQPTESIVRFPNITNLCPFGEVFNATRFASVYAWNRKRISNCVADYSVLYNSASFSTFKCYGVSPTKLNDLCFTNVYADSFVIRGDEVRQIAPGQTGKIADYNYKLPDDFTGCVIAWNSNNLDSKVGGNYNYLYRLFRKSNLKPFERDISTEIYQAGSTPCNGVEGFNCYFPLQSYGFQPTNGVGYQPYRVVVLSFELLHAPATVCGPKKSTNLVKNKCVNFNFNGLTGTGVLTESNKKFLPFQQFGRDIADTTDAVRDPQTLEILDITPCSFGGVSVITPGTNTSNQVAVLYQGVNCTEVPVAIHADQLTPTWRVYSTGSNVFQTRAGCLIGAEHVNNSYECDIPIGAGICASYQTQTNSPRRARSVASQSIIAYTMSLGAENSVAYSNNSIAIPTNFTISVTTEILPVSMTKTSVDCTMYICGDSTECSNLLLQYGSFCTQLNRALTGIAVEQDKNTQEVFAQVKQIYKTPPIKDFGGFNFSQILPDPSKPSKRSFIEDLLFNKVTLADAGFTKQYGDCLGDIAARDLICAQKFNGLTVLPPLLTDEMIAQYTSALLAGTITSGWTFGAGAALQIPFAMQMAYRFNGIGVTQNVLYENQKLIANQFNSAIGKIQDSLSSTASALGKLQDVVNQNAQALNTLVKQLSSNFGAISSVLNDILSRLDPPEAEVQIDRLITGRLQSLQTYVTQQLIRAAEIRASANLAATKMSECVLGQSKRVDFCGKGYQLMSFPQSAPHGVVFLNVTYVPAQEKNFTTAPAICNDGKAHFPREGVFVSNGTNWFVTQRNFYEPQIITTDNTFVSGNCDVVIGIVNNTVYDPLQPELDSGGSGYIPEAPRDGQAYVRKDGEWVLLSTFL

SEQ ID NO: 9973 - protein, 1177 aa, Artificial Sequence
  SARS-CoV-2/Australia/NSW56/2020__EPI_ISL_417408 spike protein (1-1147)(K986P_V987P_ H1048Q_H1064N_ H1083N_H1101N) Foldon construct
MFVFLVLLPLVSSQCVNLTTRTQLPPAYTNSFTRGVYYPDKVFRSSVLHSTQDLFLPFFSNVTWFHAIHVSGTNGTKRFDNPVLPFNDGVYFASTEKSNIIRGWIFGTTLDSKTQSLLIVNNATNVVIKVCEFQFCNDPFLGVYYHKNNKSWMESEFRVYSSANNCTFEYVSQPFLMDLEGKQGNFKNLREFVFKNIDGYFKIYSKHTPINLVRDLPQGFSALEPLVDLPIGINITRFQTLLALHRSYLTPGDSSSGWTAGAAAYYVGYLQPRTFLLKYNENGTITDAVDCALDPLSETKCTLKSFTVEKGIYQTSNFRVQPTESIVRFPNITNLCPFGEVFNATRFASVYAWNRKRISNCVADYSVLYNSASFSTFKCYGVSPTKLNDLCFTNVYADSFVIRGDEVRQIAPGQTGKIADYNYKLPDDFTGCVIAWNSNNLDSKVGGNYNYLYRLFRKSNLKPFERDISTEIYQAGSTPCNGVEGFNCYFPLQSYGFQPTNGVGYQPYRVVVLSFELLHAPATVCGPKKSTNLVKNKCVNFNFNGLTGTGVLTESNKKFLPFQQFGRDIADTTDAVRDPQTLEILDITPCSFGGVSVITPGTNTSNQVAVLYQDVNCTEVPVAIHADQLTPTWRVYSTGSNVFQTRAGCLIGAEHVNNSYECDIPIGAGICASYQTQTNSPRRARSVASQSIIAYTMSLGAENSVAYSNNSIAIPTNFTISVTTEILPVSMTKTSVDCTMYICGDSTECSNLLLQYGSFCTQLNRALTGIAVEQDKNTQEVFAQVKQIYKTPPIKDFGGFNFSQILPDSSKPSKRSFIEDLLFNKVTLADAGFIKQYGDCLGDIAARDLICAQKFNGLTVLPPLLTDEMIAQYTSALLAGTITSGWTFGAGAALQIPFAMQMAYRFNGIGVTQNVLYENQKLIANQFNSAIGKIQDSLSSTASALGKLQDVVNQNAQALNTLVKQLSSNFGAISSVLNDILSRLDPPEAEVQIDRLITGRLQSLQTYVTQQLIRAAEIRASANLAATKMSECVLGQSKRVDFCGKGYQLMSFPQSAPHGVVFLNVTYVPAQEKNFTTAPAICNDGKAHFPREGVFVSNGTNWFVTQRNFYEPQIITTDNTFVSGNCDVVIGIVNNTVYDPLQPELDSGGSGYIPEAPRDGQAYVRKDGEWVLLSTFL

SEQ ID NO: 9974 - protein, 1177 aa, Artificial Sequence
  SARS-CoV-2/Iceland/280/2020__EPI_ISL_417608 spike protein (1-1147)(K986P_V987P_ H1048Q_H1064N_ H1083N_H1101N) Foldon construct
MFVFLVLLPLVSSQCVNLTTRTQLPPAYTNSFTRGVYYPDKVFRSSVLHSTQDLFLPFFSNVTWFHAIHVSGTNGTKRFDNPVLPFNDGVYFASTEKSNIIRGWIFGTTLDSKTQSLLIVNNATNVVIKVCEFQFCNDPFLGVYYHKNNKSWMESEFRVYSSANNCTFEYVSQPFLMDLEGKQGNFKNLREFVFKNIDGYFKIYSKHTPINLVRDLPQGFSALEPLVDLPIGINITRFQTLLALHRSYLTPGDSSSGWTAGAAAYYVGYLQPRTFLLKYNENGTITDAVDCALDPLSETKCTLKSFTVEKGIYQTSNFRVQPTESIVRFPNITNLCPFGEVFNATRFASVYAWNRKRISNCVADYSVLYNSASFSTFKCYGVSPTKLNDLCFTNVYADSFVIRGDEVRQIAPGQTGKIADYNYKLPDDFTGCVIAWNSNNLDSKVGGNYNYLYRLFRKSNLKPFERDISTEIYQAGSTPCNGVEGFNCYFPLQSYGFQPTNGVGYQPYRVVVLSFELLHAPATVCGPKKSTNLVKNKCVNFNFNGLTGTGVLTESNKKFLPFQQFGRDIADTTDAVRDPQTLEILDITPCSFGGVSVITPGTNTSNQVAVLYQGVNCTEVPVAIHADQLTPTWRVYSTGSNVFQTRAGCLIGAEHVNNSYECDIPIGAGICASYHTQTNSPRRARSVASQSIIAYTMSLGAENSVAYSNNSIAIPTNFTISVTTEILPVSMTKTSVDCTMYICGDSTECSNLLLQYGSFCTQLNRALTGIAVEQDKNTQEVFAQVKQIYKTPPIKDFGGFNFSQILPDPSKPSKRSFIEDLLFNKVTLADAGFIKQYGDCLGDIAARDLICAQKFNGLTVLPPLLTDEMIAQYTSALLAGTITSGWTFGAGAALQIPFAMQMAYRFNGIGVTQNVLYENQKLIANQFNSAIGKIQDSLSSTASALGKLQDVVNQNAQALNTLVKQLSSNFGAISSVLNDILSRLDPPEAEVQIDRLITGRLQSLQTYVTQQLIRAAEIRASANLAATKMSECVLGQSKRVDFCGKGYQLMSFPQSAPHGVVFLNVTYVPAQEKNFTTAPAICNDGKAHFPREGVFVSNGTNWFVTQRNFYEPQIITTDNTFVSGNCDVVIGIVNNTVYDPLQPELDSGGSGYIPEAPRDGQAYVRKDGEWVLLSTFL

SEQ ID NO: 9975 - protein, 1177 aa, Artificial Sequence; identical to SEQ ID NO: 9930
  SARS-CoV-2/Iceland/247/2020__EPI_ISL_417575 spike protein (1-1147)(K986P_V987P_ H1048Q_H1064N_ H1083N_H1101N) Foldon construct

SEQ ID NO: 9976 - protein, 1177 aa, Artificial Sequence
  SARS-CoV-2/Iceland/238/2020__EPI_ISL_417566 spike protein (1-1147)(K986P_V987P_ H1048Q_H1064N_ H1083N_H1101N) Foldon construct
MFVFLVLLPLVSSQCVNLTTRTQLPPAYTNSFTRGVYYPDKVFRSSVLHSTQDLFLPFFSNVTWFHAIHVSGTNGTKRFDNPVLPFNDGVYFASTEKSNIIRGWIFGTTLDSKTQSLLIVNNATNVVIKVCEFQFCNDPFLGVYYHKNNKSWMESEFRVYSSANNCTFEYVSQPFLMDLEGKQGNFKNLREFVFKNIDGYFKIYSKHTPINLVRDLPQGFSALEPLVDLPIGINITRFQTLLALHRSYLTPGDSSSGWTAGAAAYYVGYLQPRTFLLKYNENGTITDAVDCALDPLSETKCTLKSFTVEKGIYQTSNFRVQPTESIVRFPNITNLCPFGEVFNATRFASVYAWNRKRISNCVADYSVLYNSASFSTFKCYGVSPTKLNDLCFTNVYADSFVIRGDEVRQIAPGQTGKIADYNYKLPDDFTGCVIAWNSNNLDSKVGGNYNYLYRLFRKSNLKPFERDISTEIYQAGSTPCNGVEGFNCYFPLQSYGFQPTNGVGYQPYRVVVLSFELLHAPATVCGPKKSTNLVKNKCVNFNFNGLTGTGVLTESNKKFLPFQQFGRDIADTTDAVRDPQTLEILDITPCSFGGVSVITPGTNTSNQVAVLYQGVNCTEVPVAIHADQLTPTWRVYSTGSNVFQTRAGCLIGAEHVNNSYECDIPIGAGICASYQTQTNSPRRARSVASQSIIAYTMSLGAENSVAYSNNSIAIPTNFTISVTTEILPVSMTKTSVDCTMYICGDSTECSNLLLQYGSFCTQLNRALTGIAVEQDKNTQEVFAQVKQIYKTPPIKDFGGFNFSQILPDPSKPSKRSFIEDLLFNKVTLADVGFIKQYGDCLGDIAARDLICAQKFNGLTVLPPLLTDEMIAQYTSALLAGTITSGWTFGAGAALQIPFAMQMAYRFNGIGVTQNVLYENQKLIANQFNSAIGKIQDSLSSTASALGKLQDVVNQNAQALNTLVKQLSSNFGAISSVLNDILSRLDPPEAEVQIDRLITGRLQSLQTYVTQQLIRAAEIRASANLAATKMSECVLGQSKRVDFCGKGYQLMSFPQSAPHGVVFLNVTYVPAQEKNFTTAPAICNDGKAHFPREGVFVSNGTNWFVTQRNFYEPQIITTDNTFVSGNCDVVIGIVNNTVYDPLQPELDSGGSGYIPEAPRDGQAYVRKDGEWVLLSTFL

SEQ ID NO: 9977 - protein, 1177 aa, Artificial Sequence
  SARS-CoV-2/Greece/16/2020__EPI_ISL_418265 spike protein (1-1147)(K986P_V987P_ H1048Q_H1064N_ H1083N_H1101N) Foldon construct
MFVFLVLLPLVSSQCVNLTTRTQLPPAYTNSFTRGVYYPDKVFRSSVLHSTQDLFLPFFSNVTWFHAIHVSGTNGTKRFDNPVLPFNDGVYFASTEKSNIIRGWIFGTTLDSKTQSLLIVNNATNVVIKVCEFQFCNDPFLGVYYHKNNKSWMESEFRVYSSANNCTFEYVSQPFLMDLEGKQGNFKNLREFVFKNVDGYFKIYSKHTPINLVRDLPQGFSALEPLVDLPIGINITRFQTLLALHRSYLTPGDSSSGWTAGAAAYYVGYLQPRTFLLKYNENGTITDAVDCALDPLSETKCTLKSFTVEKGIYQTSNFRVQPTESIVRFPNITNLCPFGEVFNATRFASVYAWNRKRISNCVADYSVLYNSASFSTFKCYGVSPTKLNDLCFTNVYADSFVIRGDEVRQIAPGQTGKIADYNYKLPDDFTGCVIAWNSNNLDSKVGGNYNYLYRLFRKSNLKPFERDISTEIYQAGSTPCNGVEGFNCYFPLQSYGFQPTNGVGYQPYRVVVLSFELLHAPATVCGPKKSTNLVKNKCVNFNFNGLTGTGVLTESNKKFLPFQQFGRDIADTTDAVRDPQTLEILDITPCSFGGVSVITPGTNTSNQVAVLYQDVNCTEVPVAIHADQLTPTWRVYSTGSNVFQTRAGCLIGAEHVNNSYECDIPIGAGICASYQTQTNSPRRARSVASQSIIAYTMSLGAENSVAYSNNSIAIPTNFTISVTTEILPVSMTKTSVDCTMYICGDSTECSNLLLQYGSFCTQLNRALTGIAVEQDKNTQEVFAQVKQIYKTPPIKDFGGFNFSQILPDPSKPSKRSFIEDLLFNKVTLADAGFIKQYGDCLGDIAARDLICAQKFNGLTVLPPLLTDEMIAQYTSALLAGTITSGWTFGAGAALQIPFAMQMAYRFNGIGVTQNVLYENQKLIANQFNSAIGKIQDSLSSTASALGKLQDVVNQNAQALNTLVKQLSSNFGAISSVLNDILSRLDPPEAEVQIDRLITGRLQSLQTYVTQQLIRAAEIRASANLAATKMSECVLGQSKRVDFCGKGYQLMSFPQSAPHGVVFLNVTYVPAQEKNFTTAPAICNDGKAHFPREGVFVSNGTNWFVTQRNFYEPQIITTDNTFVSGNCDVVIGIVNNTVYDPLQPELDSGGSGYIPEAPRDGQAYVRKDGEWVLLSTFL

SEQ ID NO: 9978 - protein, 1177 aa, Artificial Sequence
  SARS-CoV-2/Iceland/319/2020__EPI_ISL_417648 spike protein (1-1147)(K986P_V987P_ H1048Q_H1064N_ H1083N_H1101N) Foldon construct
MFVFLVLLPLVSSQCVNLTTRTQLPPAYTNSFTRGVYYPDKVFRSSVLHSTQDLFLPFFSNVTWFHAIHVSGTNGTKRFDNPVLPFNDGVYFASTEKSNIIRGWIFGTTLDSKTQSLLIVNNATNVVIKVCEFQFCNDPFLGVYYHKNNKSWMESEFRVYSSANNCTFEYVSQPFLIDLEGKQGNFKNLREFVFKNIDGYFKIYSKHTPINLVRDLPQGFSALEPLVDLPIGINITRFQTLLALHRSYLTPGDSSSGWTAGAAAYYVGYLQPRTFLLKYNENGTITDAVDCALDPLSETKCTLKSFTVEKGIYQTSNFRVQPTESIVRFPNITNLCPFGEVFNATRFASVYAWNRKRISNCVADYSVLYNSASFSTFKCYGVSPTKLNDLCFTNVYADSFVIRGDEVRQIAPGQTGKIADYNYKLPDDFTGCVIAWNSNNLDSKVGGNYNYLYRLFRKSNLKPFERDISTEIYQAGSTPCNGVEGFNCYFPLQSYGFQPTNGVGYQPYRVVVLSFELLHAPATVCGPKKSTNLVKNKCVNFNFNGLTGTGVLTESNKKFLPFQQFGRDIADTTDAVRDPQTLEILDITPCSFGGVSVITPGTNTSNQVAVLYQGVNCTEVPVAIHADQLTPTWRVYSTGSNVFQTRAGCLIGAEHVNNSYECDIPIGAGICASYQTQTNSPRRARSVASQSIIAYTMSLGAENSVAYSNNSIAIPTNFTISVTTEILPVSMTKTSVDCTMYICGDSTECSNLLLQYGSFCTQLNRALTGIAVEQDKNTQEVFAQVKQIYKTPPIKDFGGFNFSQILPDPSKPSKRSFIEDLLFNKVTLADAGFIKQYGDCLGDIAARDLICAQKFNGLTVLPPLLTDEMIAQYTSALLAGTITSGWTFGAGAALQIPFAMQMAYRFNGIGVTQNVLYENQKLIANQFNSAIGKIQDSLSSTASALGKLQDVVNQNAQALNTLVKQLSSNFGAISSVLNDILSRLDPPEAEVQIDRLITGRLQSLQTYVTQQLIRAAEIRASANLAATKMSECVLGQSKRVDFCGKGYQLMSFPQSAPHGVVFLNVTYVPAQEKNFTTAPAICNDGKAHFPREGVFVSNGTNWFVTQRNFYEPQIITTDNTFVSGNCDVVIGIVNNTVYDPLQPELDSGGSGYIPEAPRDGQAYVRKDGEWVLLSTFL

SEQ ID NO: 9979 - protein, 1177 aa, Artificial Sequence
  SARS-CoV-2/Congo/94/2020__EPI_ISL_417947 spike protein (1-1147)(K986P_V987P_ H1048Q_H1064N_ H1083N_H1101N) Foldon construct
MFVFLVLLPLVSSQCVNLTTRTQLPPAYTNSFTRGVYYPDKVFRSSVLHSTQDLFLPFFSNVTWFHAIHVSGTNGTKRFDNPVLPFNDGVYFASTEKSNIIRGWIFGTTLDSKTQSLLIVNNATNVVIKVCEFQFCNDPFLGVYYHKNNKSWMESEFRVYSSANNCTFEYVSQPFLMDLEGKQGNFKNLREFVFKNIDGYFKIYSKHTPINLVRDLPQGFSALEPLVDLPIGINITRFQTLLALHRSYLTPGDSSSGWTAGAAAYYVGYLQPRTFLLKYNENGTITDAVDCALDPLSETKCTLKSFTVEKGIYQTSNFRVQPTESIVRFPNITNLCPFGEVFNATRFASVYAWNRKRISNCVADYSVLYNSASFSTFKCYGVSPTKLNDLCFTNVYADSFVIRGDEVRQIAPGQTGKIADYNYKLPDDFTGCVIAWNSNNLDSKVGGNYNYLYRLFRKSNLKPFERDISTEIYQAGSTPCNGVEGFNCYFPLQSYGFQPTNGVGYQPYRVVVLSFELLHAPATVCGPKKSTNLVKNKCVNFNFNGLTGTGVLTESNKKFLPFQQFGRDIADTTDAVRDPQTLEILDITPCSFGGVSVITPGTNTSNQVAVLYQGVNCTEVPVAIHADQLTPTWRVYSTGSNVFQTRAGCLIGAEHVNNSYECDIPIGAGICASYQTQTNSPRRARSVASQSIIAYTMSLGAENSVAYSNNSIAIPTNFTISVTTEILPVSMTKTSVDCTMYICGDSTECSNLLLQYGSFCTQLNRALTGIAVEQDKNTQEVFAQVKQIYKTPPIKDFGGFNFSQILPDPSKPSKRSFIEDILFNKVTLADAGFIKQYGDCLGDIAARDLICAQKFNGLTVLPPLLTDEMIAQYTSALLAGTITSGWTFGAGAALQIPFAMQMAYRFNGIGVTQNVLYENQKLIANQFNSAIGKIQDSLSSTASALGKLQDVVNQNAQALNTLVKQLSSNFGAISSVLNDILSRLDPPEAEVQIDRLITGRLQSLQTYVTQQLIRAAEIRASANLAATKMSECVLGQSKRVDFCGKGYQLMSFPQSAPHGVVFLNVTYVPAQEKNFTTAPAICNDGKAHFPREGVFVSNGTNWFVTQRNFYEPQIITTDNTFVSGNCDVVIGIVNNTVYDPLQPELDSGGSGYIPEAPRDGQAYVRKDGEWVLLSTFL

SEQ ID NO: 9980 - protein, 1177 aa, Artificial Sequence
  SARS-CoV-2/Congo/158/2020__EPI_ISL_417950 spike protein (1-1147)(K986P_V987P_ H1048Q_H1064N_ H1083N_H1101N) Foldon construct
MFVFLVLLPLVSSQCVNLTTRTQLPPAYTNSFTRGVYYPDKVFRSSVLHSTQDLFLPFFSNVTWFHAIHVSGTNGTKRFDNPVLPFNDGVYFASTEKSNIIRGWIFGTTLDSKTQSLLIVNNATNVVIKVCEFQFCNDPFLGVYYHKNNKSWMESEFRVYSSANNCTFEYVSQPFLMDLEGKQGNFKNLREFVFKNIDGYFKIYSKHTPINLVRDLPQGFSALEPLVDLPIGINITRFQTLLALHRSYLTPGDSSSGWTAGAAAYYVGYLQPRTFLLKYNENGTITDAVDCALDPLSETKCTLKSFTVEKGIYQTSNFRVQPTESIVRFPNITNLCPFGEVFNATRFASVYAWNRKRISNCVADYSVLYNSASFSTFKCYGVSPTKLNDLCFTNVYADSFVIRGDEVRQIAPGQTGKIADYNYKLPDDFTGCVIAWNSNNLDSKVGGNYNYLYRLFRKSNLKPFERDISTEIYQAGSTPCNGVEGFNCYFPLQSYGFQPTNGVGYQPYRVVVLSFELLHAPATVCGPKKSTNLVKNKCVNFNFNGLTGTGVLTESNKKFLPFQQFGRDIADTTDAVRDPQTLEILDITPCSFGGVSVITPGTNTSNQVAVLYQDVNCTEVPVAIHADQLTPTWRVYSTGSNVFQTRAGCLIGAEHVNNSYECDIPIGAGICASYQTQTNSPRRARSVASQSIIAYTMSLGAENSVAYSNNSIAIPTNFTISVTTEILPVSMTKTSVDCTMYICGDSTECSNLLLQYGSFCTQLNRALTGIAVEQDKNTQEVFAQVKQIYKTPPIKDFGGFNFSQILPDPSKPSKRSFIEDLLFNKVTLADAGFIKQYGDCLGDIAARDLICAQKFNGLTVLPPLLTDEMIAQYTSALLAGTITSGWTFGAGAALQIPFAMQMAYRFNGIGVTQNVLYENQKLIANQFNSAIGKIQDSLSSTASALGKLQDVVNQNAQALNTLVKQLSSNFGAISSVLNDILSRLDPPEAEVQIDRLITGRLQSLQTYVTQQLIRAAEIRASANLAATKMSECVLGQSKRVDFCGKGYQLMSFPQSAPHGVVFLNVTYVPAQEKNFTTAPAICNDGKAHFPREGVFVSNGTNWFVTQRNFYEPQIITTDNTFLSGNCDVVIGIVNNTVYDPLQPELDSGGSGYIPEAPRDGQAYVRKDGEWVLLSTFL

SEQ ID NO: 9981 - protein, 1177 aa, Artificial Sequence
  SARS-CoV-2/USA/UT-00034/2020__EPI_ISL_417977 spike protein (1-1147)(K986P_V987P_ H1048Q_H1064N_ H1083N_H1101N) Foldon construct
MFVFLVLLPLVSSQCVNLTTRTQLPPAYTNSFTRGVYYPDKVFRSSVLHSTQDLFLPFFSNVTWFHAIHVSGTNGTKRFDNPVLPFNDGVYFASTEKSNIIRGWIFGTTLDSKTQSLLIVNNATNVVIKVCEFQFCNDPFLGVYYYKNNKSWMESEFRVYSSANNCTFEYVSQPFLMDLEGKQGNFKNLREFVFKNIDGYFKIYSKHTPINLVRDLPQGFSALEPLVDLPIGINITRFQTLLALHRSYLTPGDSSSGWTAGAAAYYVGYLQPRTFLLKYNENGTITDAVDCALDPLSETKCTLKSFTVEKGIYQTSNFRVQPTESIVRFPNITNLCPFGEVFNATRFASVYAWNRKRISNCVADYSVLYNSASFSTFKCYGVSPTKLNDLCFTNVYADSFVIRGDEVRQIAPGQTGKIADYNYKLPDDFTGCVIAWNSNNLDSKVGGNYNYLYRLFRKSNLKPFERDISTEIYQAGSTPCNGVEGFNCYFPLQSYGFQPTNGVGYQPYRVVVLSFELLHAPATVCGPKKSTNLVKNKCVNFNFNGLTGTGVLTESNKKFLPFQQFGRDIADTTDAVRDPQTLEILDITPCSFGGVSVITPGTNTSNQVAVLYQGVNCTEVPVAIHADQLTPTWRVYSTGSNVFQTRAGCLIGAEHVNNSYECDIPIGAGICASYQTQTNSPRRARSVASQSIIAYTMSLGAENSVAYSNNSIAIPTNFTISVTTEILPVSMTKTSVDCTMYICGDSTECSNLLLQYGSFCTQLNRALTGIAVEQDKNTQEVFAQVKQIYKTPPIKDFGGFNFSQILPDPSKPSKRSFIEDLLFNKVTLADAGFIKQYGDCLGDIAARDLICAQKFNGLTVLPPLLTDEMIAQYTSALLAGTITSGWTFGAGAALQIPFAMQMAYRFNGIGVTQNVLYENQKLIANQFNSAIGKIQDSLSSTASALGKLQDVVNQNAQALNTLVKQLSSNFGAISSVLNDILSRLDPPEAEVQIDRLITGRLQSLQTYVTQQLIRAAEIRASANLAATKMSECVLGQSKRVDFCGKGYQLMSFPQSAPHGVVFLNVTYVPAQEKNFTTAPAICNDGKAHFPREGVFVSNGTNWFVTQRNFYEPQIITTDNTFVSGNCDVVIGIVNNTVYDPLQPELDSGGSGYIPEAPRDGQAYVRKDGEWVLLSTFL

SEQ ID NO: 9982 - protein, 1177 aa, Artificial Sequence
  SARS-CoV-2/USA/UT-00033/2020__EPI_ISL_417976 spike protein (1-1147)(K986P_V987P_ H1048Q_H1064N_ H1083N_H1101N) Foldon construct
MFVFLVLLPLVSSQCVNLTTRTQLPPAYTNSFTRGVYYPDKVFRSSVLHSTQDLFLPFFSNVTWFHAIHVSGTNGTKRFDNPVLPFNDGVYFASTEKSNIIRGWIFGTTLDSKTQSLLIVNNATNVVIKVCEFQFCNDPFLGVYYHKNNKSWMESEFRVYSSANNCTFEYVSQPFLMDLEGKQGNFKNLREFVFKNIDGYFKIYSKHTPINLVRDLPQGFSALEPLVDLPIGINITRFQTLLALHRSYLTPGDSSSGLTAGAAAYYVGYLQPRTFLLKYNENGTITDAVDCALDPLSETKCTLKSFTVEKGIYQTSNFRVQPTESIVRFPNITNLCPFGEVFNATRFASVYAWNRKRISNCVADYSVLYNSASFSTFKCYGVSPTKLNDLCFTNVYADSFVIRGDEVRQIAPGQTGKIADYNYKLPDDFTGCVIAWNSNNLDSKVGGNYNYLYRLFRKSNLKPFERDISTEIYQAGSTPCNGVEGFNCYFPLQSYGFQPTNGVGYQPYRVVVLSFELLHAPATVCGPKKSTNLVKNKCVNFNFNGLTGTGVLTESNKKFLPFQQFGRDIADTTDAVRDPQTLEILDITPCSFGGVSVITPGTNTSNQVAVLYQGVNCTEVPVAIHADQLTPTWRVYSTGSNVFQTRAGCLIGAEHVNNSYECDIPIGAGICASYQTQTNSPRRARSVASQSIIAYTMSLGAENSVAYSNNSIAIPTNFTISVTTEILPVSMTKTSVDCTMYICGDSTECSNLLLQYGSFCTQLNRALTGIAVEQDKNTQEVFAQVKQIYKTPPIKDFGGFNFSQILPDPSKPSKRSFIEDLLFNKVTLADAGFIKQYGDCLGDIAARDLICAQKFNGLTVLPPLLTDEMIAQYTSALLAGTITSGWTFGAGAALQIPFAMQMAYRFNGIGVTQNVLYENQKLIANQFNSAIGKIQDSLSSTASALGKLQDVVNQNAQALNTLVKQLSSNFGAISSVLNDILSRLDPPEAEVQIDRLITGRLQSLQTYVTQQLIRAAEIRASANLAATKMSECVLGQSKRVDFCGKGYQLMSFPQSAPHGVVFLNVTYVPAQEKNFTTAPAICNDGKAHFPREGVFVSNGTNWFVTQRNFYEPQIITTDNTFVSGNCDVVIGIVNNTVYDPLQPELDSGGSGYIPEAPRDGQAYVRKDGEWVLLSTFL

SEQ ID NO: 9983 - protein, 1177 aa, Artificial Sequence
  SARS-CoV-2/USA/WI-13/2020__EPI_ISL_417516 spike protein (1-1147)(K986P_V987P_ H1048Q_H1064N_ H1083N_H1101N) Foldon construct
MFVFLVLLPLVSSQCVNLTTRTQLPPAYTNSFTRGVYYPDKVFRSSVLHSTQDLFLPFFSNVTWFHAIHVSGTNGTKRFDNPVLPFNDGVYFASTEKSNIIRGWIFGTTLDSKTQSLLIVNNATNVVIKVCEFQFCNDPFLGVYYHKNNKSWMESEFRVYSSANNCTFEYVSQPFLMDLEGKQGNFKNLREFVFKNIDGYFKIYSKHTPINLVRDLPQGFSALEPLVDLPIGINITRFQTLLALHRSYLTPGDSSSGWTAGAAAYYVGYLQPRTFLLKYNENGTITDAVDCALDPLSETKCTLKSFTVEKGIYQTSNFRVLPTESIVRFPNITNLCPFGEVFNATRFASVYAWNRKRISNCVADYSVLYNSASFSTFKCYGVSPTKLNDLCFTNVYADSFVIRGDEVRQIAPGQTGKIADYNYKLPDDFTGCVIAWNSNNLDSKVGGNYNYLYRLFRKSNLKPFERDISTEIYQAGSTPCNGVEGFNCYFPLQSYGFQPTNGVGYQPYRVVVLSFELLHAPATVCGPKKSTNLVKNKCVNFNFNGLTGTGVLTESNKKFLPFQQFGRDIADTTDAVRDPQTLEILDITPCSFGGVSVITPGTNTSNQVAVLYQGVNCTEVPVAIHADQLTPTWRVYSTGSNVFQTRAGCLIGAEHVNNSYECDIPIGAGICASYQTQTNSPRRARSVASQSIIAYTMSLGAENSVAYSNNSIAIPTNFTISVTTEILPVSMTKTSVDCTMYICGDSTECSNLLLQYGSFCTQLNRALTGIAVEQDKNTQEVFAQVKQIYKTPPIKDFGGFNFSQILPDPSKPSKRSFIEDLLFNKVTLADAGFIKQYGDCLGDIAARDLICAQKFNGLTVLPPLLTDEMIAQYTSALLAGTITSGWTFGAGAALQIPFAMQMAYRFNGIGVTQNVLYENQKLIANQFNSAIGKIQDSLSSTASALGKLQDVVNQNAQALNTLVKQLSSNFGAISSVLNDILSRLDPPEAEVQIDRLITGRLQSLQTYVTQQLIRAAEIRASANLAATKMSECVLGQSKRVDFCGKGYQLMSFPQSAPHGVVFLNVTYVPAQEKNFTTAPAICNDGKAHFPREGVFVSNGTNWFVTQRNFYEPQIITTDNTFVSGNCDVVIGIVNNTVYDPLQPELDSGGSGYIPEAPRDGQAYVRKDGEWVLLSTFL

SEQ ID NO: 9984 - protein, 1176 aa, Artificial Sequence
  SARS-CoV-2/India/1-27/2020__EPI_ISL_413522 spike protein (1-1146)(K985P_V986P_ H1047Q_H1063N_ H1082N_H1100N) Foldon construct
MFVFLVLLPLVSSQCVNLTTRTQLPPAYTNSFTRGVYYPDKVFRSSVLHSTQDLFLPFFSNVTWFHAIHVSGTNGTKRFDNPVLPFNDGVYFASTEKSNIIRGWIFGTTLDSKTQSLLIVNNATNVVIKVCEFQFCNDPFLGVYHKNNKSWMESEFRVYSSANNCTFEYVSQPFLMDLEGKQGNFKNLREFVFKNIDGYFKIYSKHTPINLVRDLPQGFSALEPLVDLPIGINITRFQTLLALHRSYLTPGDSSSGWTAGAAAYYVGYLQPRTFLLKYNENGTITDAVDCALDPLSETKCTLKSFTVEKGIYQTSNFRVQPTESIVRFPNITNLCPFGEVFNATRFASVYAWNRKRISNCVADYSVLYNSASFSTFKCYGVSPTKLNDLCFTNVYADSFVIRGDEVIQIAPGQTGKIADYNYKLPDDFTGCVIAWNSNNLDSKVGGNYNYLYRLFRKSNLKPFERDISTEIYQAGSTPCNGVEGFNCYFPLQSYGFQPTNGVGYQPYRVVVLSFELLHAPATVCGPKKSTNLVKNKCVNFNFNGLTGTGVLTESNKKFLPFQQFGRDIADTTDAVRDPQTLEILDITPCSFGGVSVITPGTNTSNQVAVLYQDVNCTEVPVAIHADQLTPTWRVYSTGSNVFQTRAGCLIGAEHVNNSYECDIPIGAGICASYQTQTNSPRRARSVASQSIIAYTMSLGAENSVAYSNNSIAIPTNFTISVTTEILPVSMTKTSVDCTMYICGDSTECSNLLLQYGSFCTQLNRALTGIAVEQDKNTQEVFAQVKQIYKTPPIKDFGGFNFSQILPDPSKPSKRSFIEDLLFNKVTLADAGFIKQYGDCLGDIAARDLICAQKFNGLTVLPPLLTDEMIAQYTSALLAGTITSGWTFGAGAALQIPFAMQMAYRFNGIGVTQNVLYENQKLIANQFNSAIGKIQDSLSSTASALGKLQDVVNQNAQALNTLVKQLSSNFGAISSVLNDILSRLDPPEAEVQIDRLITGRLQSLQTYVTQQLIRAAEIRASANLAATKMSECVLGQSKRVDFCGKGYQLMSFPQSAPHGVVFLNVTYVPAQEKNFTTAPAICNDGKAHFPREGVFVSNGTNWFVTQRNFYEPQIITTDNTFVSGNCDVVIGIVNNTVYDPLQPELDSGGSGYIPEAPRDGQAYVRKDGEWVLLSTFL

SEQ ID NO: 9985 - protein, 1171 aa, Artificial Sequence
  SARS-CoV-2/pangolin/Guangxi/P4L/2017__EPI_ISL_410538 spike protein (1-1141)(K980P_V981P_ H1042Q_H1058N_ H1077N_H1095N) Foldon construct
MFVFLFVLPLVSSQCVNLTTRTGIPPGYTNSSTRGVYYPDKVFRSSILHLTQDLFLPFFSNVTWFNTINYQGGFKKFDNPVLPFNDGVYFASTEKSNIIRGWIFGTTLDARTQSLLIVNNATNVVIKVCEFQFCTDPFLGVYYHNNNKTWVENEFRVYSSANNCTFEYISQPFLMDLEGKQGNFKNLREFVFKNVDGYFKIYSKHTPIDLVRDLPRGFAALEPLVDLPIGINITRFQTLLALHRSYLTPGNLESGWTTGAAAYYVGYLQQRTFLLSYNQNGTITDAVDCSLDPLSETKCTLKSLTVEKGIYQTSNFRVQPTISIVRFPNITNLCPFGEVFNASKFASVYAWNRKRISNCVADYSVLYNSTSFSTFKCYGVSPTKLNDLCFTNVYADSFVVKGDEVRQIAPGQTGVIADYNYKLPDDFTGCVIAWNSVKQDALTGGNYGYLYRLFRKSKLKPFERDISTEIYQAGSTPCNGQVGLNCYYPLERYGFHPTTGVNYQPFRVVVLSFELLNGPATVCGPKLSTTLVKDKCVNFNFNGLTGTGVLTTSKKQFLPFQQFGRDISDTTDAVRDPQTLEILDITPCSFGGVSVITPGTNTSNQVAVLYQDVNCTEVPMAIHAEQLTPAWRVYSAGANVFQTRAGCLVGAEHVNNSYECDIPVGAGICASYHSMSSLRSVNQRSIIAYTMSLGAENSVAYSNNSIAIPTNFTISVTTEILPVSMTKTSVDCTMYICGDSIECSNLLLQYGSFCTQLNRALTGIAVEQDKNTQEVFAQVKQIYKTPPIKDFGGFNFSQILPDPSKPSKRSFIEDLLFNKVTLADAGFIKQYGDCLGDIAARDLICAQKFNGLTVLPPLLTDEMIAQYTSALLAGTITSGWTFGAGAALQIPFAMQMAYRFNGIGVTQNVLYENQKLIANQFNSAIGKIQDSLSSTASALGKLQDVVNQNAQALNTLVKQLSSNFGAISSVLNDILSRLDPPEAEVQIDRLITGRLQSLQTYVTQQLIRAAEIRASANLAATKMSECVLGQSKRVDFCGKGYQLMSFPQSAPHGVVFLNVTYVPAQEKNFTTAPAICNEGKAHFPREGVFVSNGTNWFITQRNFYEPQIITTDNTFVSGSCDVVIGIVNNTVYDPLQPELDSGGSGYIPEAPRDGQAYVRKDGEWVLLSTFL

SEQ ID NO: 9986 - protein, 1171 aa, Artificial Sequence
  SARS-CoV-2/pangolin/Guangxi/P5L/2017__EPI_ISL_410540 spike protein (1-1141)(K980P_V981P_ H1042Q_H1058N_ H1077N_H1095N) Foldon construct
MFVFLFVLPLVSSQCVNLTTRTGIPPGYTNSSTRGVYYPDKVFRSSILHLTQDLFLPFFSNVTWFNTINYQGGFKKFDNPVLPFNDGVYFASTEKSNIIRGWIFGTTLDARTQSLLIVNNATNVVIKVCEFQFCTDPFLGVYYHNNNKTWVENEFRVYSSANNCTFEYISQPFLMDLEGKQGNFKNLREFVFKNVDGYFKIYSKHTPIDLVRDLPRGFAALEPLVDLPIGINITRFQTLLALHRSYLTPGKLESGWTTGAAAYYVGYLQQRTFLLSYNQNGTITDAVDCSLDPLSETKCTLKSLTVEKGIYQTSNFRVQPTISIVRFPNITNLCPFGEVFNASKFASVYAWNRKRISNCVADYSVLYNSTSFSTFKCYGVSPTKLNDLCFTNVYADSFVVKGDEVRQIAPGQTGVIADYNYKLPDDFTGCVIAWNSVKQDALTGGNYGYLYRLFRKSKLKPFERDISTEIYQAGSTPCNGQVGLNCYYPLERYGFHPTTGVNYQPFRVVVLSFELLNGPATVCGPKLSTTLVKDKCVNFNFNGLTGTGVLTTSKKQFLPFQQFGRDISDTTDAVRDPQTLEILDITPCSFGGVSVITPGTNTSNQVAVLYQDVNCTEVPMAIHAEQLTPAWRVYSAGANVFQTRAGCLVGAEHVNNSYECDIPVGAGICASYHSMSSFRSVNQRSIIAYTMSLGAENSVAYSNNSIAIPTNFTISVTTEILPVSMTKTSVDCTMYICGDSIECSNLLLQYGSFCTQLNRALTGIAVEQDKNTQEVFAQVKQIYKTPPIKDFGGFNFSQILPDPSKPSKRSFIEDLLFNKVTLADAGFIKQYGDCLGDIAARDLICAQKFNGLTVLPPLLTDEMIAQYTSALLAGTITSGWTFGAGAALQIPFAMQMAYRFNGIGVTQNVLYENQKLIANQFNSAIGKIQDSLSSTASALGKLQDVVNQNAQALNTLVKQLSSNFGAISSVLNDILSRLDPPEAEVQIDRLITGRLQSLQTYVTQQLIRAAEIRASANLAATKMSECVLGQSKRVDFCGKGYQLMSFPQSAPHGVVFLNVTYVPAQEKNFTTAPAICNEGKAHFPREGVFVSNGTNWFITQRNFYEPQIITTDNTFVSGSCDVVIGIVNNTVYDPLQPELDSGGSGYIPEAPRDGQAYVRKDGEWVLLSTFL

SEQ ID NO: 9987 - protein, 1171 aa, Artificial Sequence
  SARS-CoV-2/pangolin/Guangxi/P5E/2017__EPI_ISL_410541 spike protein (1-1141)(K980P_V981P_ H1042Q_H1058N_ H1077N_H1095N) Foldon construct
MFVFLFVLPLVSSQCVNLTTRTGIPPGYTNSSTRGVYYPDKVFRSSILHLTQDLFLPFFSNVTWFNTITYQGGSKKFDNPVLPFNDGVYFASTEKSNIIRGWIFGTTLDARTQSLLIVNNATNVVIKVCEFQFCTDPFLGVYYHNNNKTWVENEFRVYSSANNCTFEYISQPFLMDLEGKQGNFKNLREFVFKNVDGYFKIYSKHTPIDLVRDLPRGFAALEPLVDLPIGINITRFQTLLALHRSYLTPGKLESGWTTGAAAYYVGYLQQRTFLLSYNQNGTITDAVDCSLDPLSETKCTLKSLTVEKGIYQTSNFRVQPTISIVRFPNITNLCPFGEVFNASKFASVYAWNRKRISNCVADYSVLYNSTSFSTFKCYGVSPTKLNDLCFTNVYADSFVVKGDEVRQIAPGQTGVIADYNYKLPDDFTGCVIAWNSVKQDALTGDNYGYLYRLFRKSKLKPFERDISTEIYQAGSTPCNGQVGLNCYYPLERYGFHPTTGVNYQPFRVVVLSFELLNGPATVCGPKLSTTLVKDKCVNFNFNGLTGTGVLTTSKKQFLPFQQFGRDISDTTDAVRDPQTLEILDITPCSFGGVSVITPGTNTSNQVAVLYQDVNCTEVPMAIHAEQLTPAWRVYSAGANVFQTRAGCLVGAEHVNNSYECDIPVGAGICASYHSMSSFRSVNQRSIIAYTMSLGAENSVAYSNNSIAIPTNFTISVTTEILPVSMTKTSVDCTMYICGDSIECSNLLLQYGSFCTQLNRALTGIAVEQDKNTQEVFAQVKQIYKTPPIKDFGGFNFSQILPDPSKPSKRSFIEDLLFNKVTLADAGFIKQYGDCLGDIAARDLICAQKFNGLTVLPPLLTDEMIAQYTSALLAGTITSGWTFGAGAALQIPFAMQMAYRFNGIGVTQNVLYENQKLIANQFNSAIGKIQDSLSSTASALGKLQDVVNQNAQALNTLVKQLSSNFGAISSVLNDILSRLDPPEAEVQIDRLITGRLQSLQTYVTQQLIRAAEIRASANLAATKMSECVLGQSKRVDFCGKGYQLMSFPQSAPHGVVFLNVTYVPAQEKNFTTAPAICNEGKAHFPREGVFVSNGTNWFITQRNFYEPQIITTDNTFVSGSCDVVIGIVNNTVYDPLQPELDSGGSGYIPEAPRDGQAYVRKDGEWVLLSTFL

SEQ ID NO: 9988 - protein, 1169 aa, Artificial Sequence
  SARS-CoV-2/pangolin/Guangxi/P1E/2017__EPI_ISL_410539 spike protein (1-1139)(K978P_V979P_ H1040Q_H1056N_ H1075N_H1093N) Foldon construct
MFVFLFVLPLVSSQCVNLTTRTGIQPGYTNSSTRGVYYPDKVFRSSILHLTQDLFLPFFSNVTWFNTINYQGGFKKFDNPVLPFNDGVYFASTEKSNIIRGWIFGTTLDARTQSLLIVNNATNVVIKVCEFQFCTDPFLGVYYHNNNKTWVENEFRVYSSANNCTFEYISQPFLMDLEGKQGNFKNLREFVFKNVDGYFKIYSKHTPIDLVRDLPRGFAALEPLVDLPIGINITRFQTLLALHRSYLTPGKLESGWTTGAAAYYVGYLQQRTFLLSYNQNGTITDAVDCSLDPLSETKCTLKSLTVEKGIYQTSNFRVQPTISIVRFPNITNLCPFGEVFNASKFASVYAWNRKRISNCVADYSVLYNSTSFSTFKCYGVSPTKLNDLCFTNVYADSFVVKGDEVRQIAPGQTGVIADYNYKLPDDFTGCVIAWNSVKQDALTGGNYLYRLFRKSKLKPFERDISTEIYQAGSTPCNGQVGLNCYYPLERYGFHPTTGVNYQPFRVVVLSFELLNGPATVCGPKLSTTLVKDKCVNFNFNGLTGTGVLTTSKKQFLPFQQFGRDISDTTDAVRDPQTLEILDITPCSFGGVSVITPGTNTSNQVAVLYQDVNCTEVPMAIHAEQLTPAWRVYSAGANVFQTRAGCLVGAEHVNNSYECDIPVGAGICASYHSMSSLRSVNQRSIIAYTMSLGAENSVAYSNNSIAIPTNFTISVTTEILPVSMTKTSVDCTMYICGDSIECSNLLLQYGSFCTQLNRALTGIAVEQDKNTQEVFAQVKQIYKTPPIKDFGGFNFSQILPDPSKPSKRSFIEDLLFNKVTLADAGFIKQYGDCLGDIAARDLICAQKFNGLTVLPPLLTDEMIAQYTSALLAGTITSGWTFGAGAALQIPFAMQMAYRFNGIGVTQNVLYENQKLIANQFNSAIGKIQDSLSSTASALGKLQDVVNQNAQALNTLVKQLSSNFGAISSVLNDILSRLDPPEAEVQIDRLITGRLQSLQTYVTQQLIRAAEIRASANLAATKMSECVLGQSKRVDFCGKGYQLMSFPQSAPHGVVFLNVTYVPAQEKNFTTAPAICNEGKAHFPREGVFVSNGTNWFITQRNFYEPQIITTDNTFVSGSCDVVIGIVNNTVYDPLQPELDSGGSGYIPEAPRDGQAYVRKDGEWVLLSTFL
